(19) United States
(12) Patent Application Publication
(10) Pub. No.: US 2005/0147987 A1
(43) Pub. Date: Jul. 7, 2005

(54) Polymorphisms in known genes associated with type II diabetes and obesity, methods of detection and uses thereof

(75) Inventors: J. Craig Venter, Rockville, MD (US); Jinghui N. Zhang, Rockville, MD (US); Xiangjun Liu, Olney, MD (US); William Rowe, Rockville, MD (US); Anibal Cravchik, Gaithersburg, MD (US); Francis Kalush, Rockville, MD (US); Ashwinikumar Naik, Gaithersburg, MD (US); Gangadharan Subramanian, Columbia, MD (US); Trevor Woodage, Washington, DC (US)

Correspondence Address: CELERA GENOMICS;ATTN: WAYNE MONTGOMERY, VICE PRES, INTEL PROPERTY, 45 WEST GUDE DRIVE, C2-4#20, ROCKVILLE, MD, 20850, US

(73) Assignee: APPLERA CORPORATION (NY), Norwalk, CT (US)

(21) Appl. No.: 10/893,315

(22) Filed: Jul. 19, 2004

Related U.S. Application Data
(63) Continuation of application No. 09/948,947, filed on Sep. 10, 2001, now abandoned.
(60) Provisional application No. 60/231,397, filed on Sep. 8, 2000.

(51) Int. Cl. C12Q 1/68; C07H 21/04

(52) U.S. Cl. 435/6; 536/24.3

(57) ABSTRACT

The present invention is based on the discovery of novel polymorphisms (SNPs) in the genes known in the art to contribute to type II diabetes and obesity. Such polymorphisms can lead to a variety of disorders that are mediated/modulated by a variant type II diabetes and obesity associated protein. The present invention provides reagents used for detecting and expressing the variant nucleic acid/protein sequence as well as methods of identifying and using these variants.

### FIELD OF THE INVENTION

[0001] The present invention is in the field of type II diabetes and obesity diagnosis and therapy. The present invention specifically provides previously unknown single nucleotide polymorphisms (SNPs) in genes that have been identified as being involved in pathologies associated with type II diabetes and obesity. Since these genes are known to be associated with type II diabetes and obesity, the presently disclosed naturally occurring polymorphisms (variants) are valuable for association and linkage analysis. Specifically, the identified SNPs are useful for such applications as screening for type II diabetes and obesity susceptibility, prevention of type II diabetes and obesity, development of diagnostics and therapies for type II diabetes and obesity, development of drugs for type II diabetes and obesity, and development of individualized drug treatments based on an individual's SNP profile. The SNPs provided by the present invention are also useful for human identification. Methods and reagents for detecting the presence of these polymorphisms are provided.

### BACKGROUND OF THE INVENTION

[0002] Type II Diabetes (Non-Insulin-Dependent Diabetes Mellitus) and Obesity

[0003] Diabetes is one of the most prevalent chronic disorders worldwide with significant personal and financial costs for patients and their families, as well as for society. Diabetes is the sixth leading cause of death by disease in the United States, and seventh leading overall cause of death. Diabetes contributed to 198,140 deaths in 1996. 15.7 million Americans, or 5.9% of the U.S. population, have diabetes. Of these, 5.4 million people are unaware that they have diabetes, and may not realize they have the disorder until severe symptoms occur or they are treated for one of the serious complications of diabetes, such as blindness, kidney disease, nerve disease which may require lower limb amputations, and heart disease and stroke. Approximately 800,000 new case are diagnosed annually. Heart disease is present in 75% of diabetes-related deaths. Consequently, diabetes is one of the most costly health problems in the U.S. In 1997, the total direct and indirect cost of diabetes was approximately $98 billion. Direct medical and treatment costs accounted for approximately $44 billion of the total cost, representing 5.8% of the total personal health-care expenditures in the U.S. (above statistics are from the American Diabetes Association (“ADA”), 2000).

[0004] Diabetes refers to a disease process characterized by elevated levels of plasma glucose or hyperglycemia. Hyperglycemia is defined as blood glucose concentration in excess of the accepted norm for the general population (American Diabetes Association, Physician's Guide to Non-Insulin-Dependent (Type II) Diabetes, 1988). Different types of diabetes exist with distinct etiologies and pathogeneses. The disease diabetes mellitus is characterized by metabolic defects in production and utilization of carbohydrates and a consequent failure to maintain appropriate blood sugar levels, thereby resulting in hyperglycemia. Two major forms of diabetes mellitus are recognized. Type I diabetes, or insulin-dependent diabetes (IDDM or IDD), is an autoimmune disorder in which the body does not produce any insulin, the hormone which regulates carbohydrate utilization. Type II diabetes, or non-insulin dependent diabetes (NIDDM or NIDD) is the form of diabetes mellitus that occurs predominantly in adults in whom adequate production of insulin is generally available for use, yet a defect exists in insulin-mediated utilization and metabolism of glucose in peripheral tissues. Some NIDDM cases are characterized by the inability to make enough insulin, however, some insulin is produced, in contrast to type I diabetes in which no insulin is produced. Many NIDDM patients are also obese. NIDDM accounts for 90-95% of all diabetes (ADA), and is one of the most common inherited diseases in man with an estimated prevalence in Caucasian populations of 8-10% (Harris, et al., Diabetes, 36:523-534, 1987). African Americans are 1.7 times as likely to have type II diabetes as the general population and Latinos almost twice as likely. 12.2% of Native Americans have diabetes, and in some tribes the incidence is 50% of the population (ADA). NIDDM usually develops after age 45.

[0005] NIDDM is diagnosed based on recognized criteria (American Diabetes Association, Physician's Guide to Insulin-Dependent (Type I) Diabetes, 1988; American Diabetes Association, Physician's Guide to Non-Insulin-Dependent (Type II) Diabetes, 1988). Overt NIDDM is characterized by three major metabolic abnormalities: resistance to insulin-mediated glucose disposal, impairment of nutrient-stimulated insulin secretion, and overproduction of glucose by the liver. NIDDM is due to a profound resistance to insulin stimulating or regulatory effect on glucose and lipid metabolism in the main insulin-sensitive tissues, such as muscle, liver, and adipose tissue. This resistance to insulin responsiveness results in insufficient insulin activation of glucose uptake, oxidation, and storage in muscle, inadequate insulin repression of lipolysis in adipose tissue, and inadequate glucose production and secretion in liver. NIDDM patients have an abnormally high blood glucose concentration when fasting and delayed cellular uptake of glucose following meals or after a diagnostic test known as the glucose tolerance test.

[0006] Reports indicate that insulin secretion is often enhanced early in NIDDM pathogenesis, presumably as compensation for the insulin resistance. People who actually develop NIDDM appear to do so because their B-cells eventually fail to maintain sufficient insulin secretion to compensate for the insulin resistance. Mechanisms responsible for the B-cell failure have not been identified, but may be related to the chronic demands placed on the B-cells by peripheral insulin resistance and/or to the effects of hyperglycemia to impair B-cell function. The B-cell failure could also occur as an independent, inherent defect in “pre-diabetic” individuals.

[0007] Warning signs of type II diabetes include frequent infections, blurred vision, cuts or bruises that are slow to heal, tingling/numbness in the hands or feet, and recurring skin, gum, or bladder infections, as well as any of the warning signs for type I diabetes, which are frequent urination, unusual thirst, extreme hunger, unusual weight loss, extreme fatigue, and irritability. However, it must be noted that individuals with type II diabetes often have no symptoms.

[0008] Serious, often life threatening, disorders can result from diabetes. Ocular complications of diabetes are the leading cause of new cases of legal blindness in people ages 20 to 74 in the United States; 12,000-24,000 people lose their site each year due to diabetes. Nerve damage due to diabetes can lead to lower limb amputations. The risk for lower extremity amputation is 15 times greater in individuals with diabetes than in individuals without it. Estimates suggest that persons with diabetes undergo over one-half of the approximately 125,000 amputations performed annually in the United States. Kidney disease is a frequent and serious complication of diabetes. Approximately 40 percent of all new patients in the United States being treated for end-stage renal disease have diabetes. Individuals with diabetes are also two to four times more likely to have heart disease or to suffer a stroke. Individuals with diabetes are also at increased risk for periodontal disease. Periodontal infections advance rapidly and lead not only to loss of teeth but also to compromised metabolic control. Women with diabetes risk serious complications of pregnancy. Current statistics suggest that the mortality rates of infants of mothers with diabetes are approximately 7 percent.

[0009] Obesity is a known risk factor for the development of NIDDM (Barrett-Conner, E., Epidemiol. Rev., 11:172-181, 1989; and Knowler, et al., Am. J. Clin. Nutr., 53:1543-1551, 1991). Obesity results from an imbalance between caloric intake and energy expenditure. Obesity is a condition in which there is an increase in body fat content resulting in excess body weight above the accepted norms for age, gender, height, and body build (Bray, Obesity, An Endocrine Perspective, p. 2303, Multihormonal Systems and Disorders (1989)). Accepted norms have been determined by life insurance mortality experience and by incidence of morbidity in relation to body composition. The excess mortality that occurs in obese individuals results from diseases that are predisposed by this condition. Such diseases include not only diabetes mellitus, but also cancer, cardiovascular disease, digestive disease, and respiratory disease.

[0010] Impaired glucose tolerance occurs when the rate of metabolic clearance of glucose from the blood is less than that commonly occurring in the general population after a standard dose of glucose has been orally or parenterally administered (American Diabetes Association, Physician's Guide to Non-Insulin-Dependent (Type II) Diabetes, 1988). Impaired glucose tolerance can occur in both NIDDM and obesity, as well as in other individuals not meeting the diagnostic criteria for either of these disease states. Impaired glucose tolerance in non-diabetic individuals is a predisposing factor for the development of NIDDM.

[0011] In patients with chronic hyperglycemia, such as occurs in NIDDM, glucose-dependent protein cross-linking occurs at a rate in excess of the norm (Bunn, American Journal of Medicine, Vol. 70, p.325, 1981) resulting in altered tertiary protein structure (Brownlee, Chapter 18, Diabetes Mellitus, p. 279, 1990). Uncontrolled hyperglycemia is associated with increased and premature mortality due to an increased risk for microvascular and macrovascular diseases, including nephropathy, neuropathy, retinopathy, hypertension, stroke, and heart disease. Therefore, control of glucose homeostasis is a critically important approach for the treatment of diabetes.

[0012] Treatment of diabetes generally centers on attempts to normalize blood glucose levels and inhibit hyperglycemia. Current treatments include administration of exogenous insulin, oral administration of drugs, and dietary therapies. The most widely prescribed oral drugs for treating hyperglycemia are sulfonylureas. Sulfonylureas stimulate the pancrease to increase insulin production. This is accomplished by binding to a receptor that closes an ATP-sensitive potassium channel of pancreatic B cells which depolarizes the cell membrane, resulting in an influx of extracellular calcium through voltage-gated calcium channels, thereby causing insulin granules to move towards the cell surface and facilitating exocytosis. Another class of antihyperglycemic drugs are biguanides, such as Metformin. A third class is alpha-glucosidase inhibitors, which reduce the rate of absorption of most carbohydrates such as starches, dextrins, maltose, and sucrose. Another class are thiazolidinediones, which are insulin sensitizers. Nonsulfonylurea insulin stimulators, which represent a fifth class of oral antihyperglycemic agents, stimulate insulin release by closing the ATP-sensitive potassium channel of pancreatic B cells, but through substantially different binding kinetics than the sulfonylureas (Tiemey et. al., ed., Current Medical Diagnosis & Treatment 1999).

[0013] Although most forms of NIDDM do not exhibit simple Mendelian inheritance, the contribution of heredity is well recognized (Rotter, et al., Diabetes Mellitus: Theory and Practice, 378-413, 1990). The genetic basis of a few monogenic syndromes of NIDDM have been elucidated (Taylor, et al., Endocrine Rev., 13:566-595, 1992; Froguel, et al., N. Engl. J. Med., 328:697-702, 1993; Steiner, et al., Diabetes Care, 13:600-609, 1990; and Kadowaki, et al., N. Engl. J. Med., 330:962-968, 1994). It has been shown that a genetic predisposition to diabetes in some individuals stems from polymorphism(s) in the gene(s) coding for insulin and/or the insulin receptor and/or insulin-mediated signal transduction factor(s). These genetic polymorphisms result in ineffective insulin and/or insulin-mediated effects, thereby impairing the utilization or metabolism of glucose. Furthermore, these polymorphisms can also determine an individual's response to various treatment regimens, such as response to particular pharmacological agents. For example, some patients with severe insulin resistance due to insulin receptor mutations respond to insulin-like growth factor-I (IGF-1) therapy, but not to insulin (Tiemey et. al., ed., Current Medical Diagnosis & Treatment 1999).

[0014] Obesity, a known risk factor for the development of NIDDM, also has clear genetic determinants (Bouchard, C., World Rev. Nutr. Diet, 72:68-77, 1993; and Stunkard, et al., N. Engl. J. Med., 314:193-197,1986). Genetic factors associated with obesity have been uncovered based on studies on twins, adopted children, and on animal models of obesity (Bouchard, C., Perusse, L., Ann. Rev. Nutr., 8:259-277, 1988). Morbid obesity in humans appears to have a particularly strong genetic component (Price, et al., Hum. Biol., 62:, 1990; and Adams, et al., Obes. Res., 1:261-270, 1993). However, the molecular basis of inheritance of obesity in humans is unknown. As adipose tissue plays a crucial role in the regulation of energy storage and mobilization, it has been the focus for studies involved in the identification of candidate genes. Recently, positional cloning approaches have succeeded in identifying an obesity gene in a monogenic rodent model, the ob mouse (Zhang, et al., Nature, 372:425-432, 1994). The human ob homologue has been cloned, but mutations, deletions, or polymorphisms in this gene have yet to be identified. In humans, evidence supports the involvement of several genes as well as environmental and behavioral influences in the predisposition, onset and progression of obesity and NIDDM.

[0015] Potential candidate genes for obesity (and therefore also NIDDM) include those that influence energy expenditure. In adult Pima Indians, resting metabolic rate (RMR) is familial (Bogardus, et al., N. Engl. J Med, 315:96-100, 1986), and in prospective studies, a low RMR is a risk factor for weight gain and obesity (Ravussin, et al., N. Engl. J Med, 318:467-472, 1988). Studies in other populations (Bouchard, et al., Metabolism, 38:364-370, 1989; and Griffith, et al., Lancet, 336:76-78, 1990), as well as in animal models (Coleman, D. L., Diabetes, 31:1-6, 1992), support the relationship between heredity, low RMR and obesity. In rodents, RMR is regulated by the sympathetic nervous system and acts through modulation of thermogenesis in brown adipose tissue (Lowell, et al., Nature, 366:740-749, 1993). Although humans do not have anatomically distinct deposits of brown adipose tissue, the identification of human uncoupling protein, a molecular marker widely regarded as being specific for brown adipose tissue, suggests that modulation of thermogenesis in adipose tissue may also be important in humans (Cassard, et al., J. Cell Biochem., 43:255-264, 1990).

[0016] There is a definite need to identify SNPs in genes that are associated with diabetes and obesity. Such SNPs are useful as molecular markers for the early detection of susceptible individuals so that treatment programs may be instituted for delay or prevention of NIDDM and/or obesity. A delay in the onset of diabetes would markedly reduce morbidity and mortality due to chronic complications. Further, identification of specific susceptibility SNPs would allow for the design of more effective medications having specific molecular targets, as well as development of individual treatment regimens specifically tailored to an individual's genetic make-up or SNP profile.

[0017] Genes identified in the art as being associated with diabetes mellitus type II and/or obesity include, but are not limited to, genes encoding the proteins listed in the following table (Table 2) and notes. Table 2 lists the art known protein name, an NCBI (National Center for Biotechnology Information) Protein GI identifying number for the protein, and an NCBI PubMed PMID identifying number for a reference that associates the gene/protein with type II diabetes and/or obesity. The last column lists citation information for references related to the gene/protein. When a PMID number is given in the third column, the first reference citation given for that protein is the reference identified by the PMID number.

TABLE 2

| | PROTEIN | | |
|---|---|---|---|
| | GI | PMID | |
| PROTEIN NAME | NUMBER | NUMBER | REFERENCE CITATIONS |
| adenosine deaminase, RNA- | 4501917 | 10459555 | Bottini et al., Metabolism 1999 |
| specific, isoform ADAR-a | | | Aug; 48(8): 949-51 |
| | | | Kim et al., Proc. Natl. Acad. Sci. |
| | | | U.S.A. 91 (24), 11457-11461 (1994) |
| | | | O'Connell et al., Mol. Cell. Biol. 15 |
| | | | (3), 1389-1397 (1995) |
| | | | Patterson et al., Virology 210 (2), |
| | | | 508-511 (1995) |
| | | | Patterson et al., Mol. Cell. Biol. 15 |
| | | | (10), 5376-5388 (1995) |
| | | | Weier et al., Genomics 30 (2), 372-375 |
| | | | (1995) |
| | | | Wang et al., J. Mol. Biol. 254 (2), |
| | | | 184-195 (1995) |
| | | | Liu et al., J. Biol. Chem. 272 (7), |
| | | | 4419-4428 (1997) |
| adrenergic, alpha-1A-, | 4501961 | 10940648 | Hemmings et al., Int J Biochem Cell |
| receptor | | | Biol 2000 Aug 1; 32(8): 905-919 |
| | | | Schwinn et al., J. Biol. Chem. 265 |
| | | | (14), 8183-8189 (1990) |
| | | | Hirasawa et al., Cellular and |
| | | | Molecular Biology Research 195, |
| | | | 902-909 (1993) |
| | | | Hirasawa et al., Biochem. Biophys. |
| | | | Res. Commun. 195 (2), 902-909 |
| | | | (1993) |
| alpha-2-HS-glycoprotein B- | 4502005 | 9503031 | Kalabay et al., Horm Metab Res |
| chain | | | 1998 Jan; 30(1): 1-6 |
| | | | Lee et al., Proc. Natl. Acad. Sci. |
| | | | U.S.A. 84 (13), 4403-4407 (1987) |
| | | | Magnuson et al., Cytogenet. Cell |
| | | | Genet. 47 (1-2), 72-74 (1988) |
| | | | Rizzu et al., Cytogenet. Cell Genet. |
| | | | 70 (1-2), 26-28 (1995) |
| | | | Osawa et al., Hum. Genet. 99 (1), |
| | | | 18-21 (1997) |
| | | | Osawa et al., Gene 196 (1-2), 121-125 |
| | | | (1997) |
| glucagon-like peptide 1 | 4504017 | 10893327 | Ebinger et al., Am J Physiol |
| receptor | | | Endocrinol Metab 2000 |
| | | | Jul; 279(1): E88-94 |
| | | | Thorens et al., Diabetes 42 (11), |
| | | | 1678-1682 (1993) |
| | | | Wei et al., FEBS Letters 385, 219-224 |
| | | | (1995) |
| insulin-like growth factor 2 | 4504611 | | Morgan et al., Nature 329 (6137), |
| receptor | | | 301-307 (1987) |
| insulin-like growth factor | 4504615 | 10913147 | Hall et al., J Biol Chem 2000 Jul 25 |
| binding protein 1 | | | |
| | | | Brewer et al., Biochem. Biophys. |
| | | | Res. Commun. 152 (3), 1289-1297 |
| | | | (1988) |
| | | | Brinkman et al., EMBO J. 7 (8), |
| | | | 2417-2423 (1988) |
| | | | Cubbage et al., Mol. Endocrinol. 3 |
| | | | (5), 846-851 (1989) |
| | | | Alitalo et al., Hum. Genet. 83 (4), |
| | | | 335-338 (1989) |
| | | | Ekstrand et al., Genomics 6 (3), |
| | | | 413-418 (1990) |
| | | | Suwanichkul et al., J. Biol. Chem. |
| | | | 265 (34), 21185-21193 (1990) |
| | | | Ehrenborg et al., Genomics 12 (3), |
| | | | 497-502 (1992) |
| insulin receptor substrate 2 | 4504731 | 10830270 | Withers et al., Endocrinology 2000 |
| | | | Jun; 141(6): 1917-21 |
| | | | Ogihara et al., J. Biol. Chem. 272 |
| | | | (40), 25267-25274 (1997) |
| | | | White, Mol. Cell. Biochem. 182 (1-2), |
| | | | 3-11 (1998) |
| | | | Rother et al., J. Biol. Chem. 273 |
| | | | (28), 17491-17497 (1998) |
| | | | Kim et al., J. Biol. Chem. 273 (51), |
| | | | 34543-34550 (1998) |
| insulin receptor substrate 4 | 4504733 | 10830270 | Withers et al., Endocrinology 2000 |
| | | | Jun; 141(6): 1917-21 |
| | | | Lavan et al., J. Biol. Chem. 272 |
| | | | (34), 21403-21407 (1997) |
| | | | Fantin et al., J. Biol. Chem. 273 |
| | | | (17), 10726-10732 (1998) |
| | | | White, Mol. Cell. Biochem. 182 (1-2), |
| | | | 3-11 (1998) |
| leptin receptor | 4504979 | 8702421 | Kieffer et al., Biochem Biophys Res |
| | | | Commun Jul 16, 1996; 224(2): 522-7 |
| | | | Tartaglia et al., Cell 83 (7), 1263-1271 |
| | | | (1995) |
| glucokinase regulatory protein | 4557621 | 10830270 | Withers et al., Endocrinology 2000 |
| | | | Jun; 141(6): 1917-21 |
| | | | Vaxillaire et al., Diabetes 43 (3), |
| | | | 389-395 (1994) |
| | | | Warner et al., Mamm. Genome 6 |
| | | | (8), 532-536 (1995) |
| | | | Hayward et al., Mamm. Genome 7 |
| | | | (6), 454-458 (1996) |
| | | | Hayward et al., Genomics 49 (1), |
| | | | 137-142 (1998) |
| orexin receptor 1 | 4557637 | 10588447 | Sakurai et al., Regul Pept 1999 Nov |
| | | | 30; 85(1): 25-30 |
| | | | de Lecea et al., Proc. Natl. Acad. |
| | | | Sci. U.S.A. 95 (1), 322-327 (1998) |
| | | | Sakurai et al., Cell 92 (4), 573-585 |
| | | | (1998) |
| | | | Flier et al., Cell 92 (4), 437-440 |
| | | | (1998) |
| | | | Sakurai et al., Cell 92 (5), 1 (1998) |
| orexin receptor 2 | 4557639 | 10588447 | Sakurai et al., Regul Pept 1999 Nov |
| | | | 30; 85(1): 25-30 |
| | | | de Lecea et al., Proc. Natl. Acad. |
| | | | Sci. U.S.A. 95 (1), 322-327 (1998) |
| | | | Flier et al., Cell 92 (4), 437-440 |
| | | | (1998) |
| | | | Sakurai et al., Cell 92 (4), 573-585 |
| | | | (1998) |
| | | | Sakurai et al., Cell 92 (5), 1 (1998) |
| insulin-like growth factor 1 | 4557665 | | Francke et al., Cold Spring Harb. |
| receptor beta chain | | | Symp. Quant. Biol. 51, 855-866 |
| | | | (1986) |
| | | | Ullrich et al., EMBO J. 5 (10), |
| | | | 2503-2512 (1986) |
| | | | Flier et al., Proc. Natl. Acad. Sci. |
| | | | U.S.A. 83 (3), 664-668 (1986) |
| | | | Abbott et al., J. Biol. Chem. 267 |
| | | | (15), 10759-10763 (1992) |
| | | | Werner et al., Proc. Natl. Acad. Sci. |
| | | | U.S.A. 93 (16), 8318-8323 (1996) |
| | | | Grant et al., J. Clin. Endocrinol. |
| | | | Metab. 83 (9), 3252-3257 (1998) |
| potassium large conductance | 4758626 | 8858210 | Ferrer et al., Diabetologia 1996 |
| calcium-activated channel, | | | Aug; 39(8): 891-8 |
| subfamily M, beta member 1 | | | |
| | | | Meera et al., FEBS Lett. 382 (1-2), |
| | | | 84-88 (1996) |
| lipase, gastric | 4758676 | 10952471 | Brownrigg et al., Diabetologia 2000 |
| | | | Jul; 43(7): 953-4 |
| | | | Bodmer et al., Biochim. Biophys. |
| | | | Acta 909 (3), 237-244 (1987) |
| alpha-glucosidase | 4758712 | 10937515 | Meneilly et al., Diabetes Care 2000 |
| | | | Aug; 23(8): 1162-7 |
| | | | Naim et al., J. Biol. Chem. 263 (36), |
| | | | 19709-19717 (1988) |
| | | | Nichols et al., J. Biol. Chem. 273 |
| | | | (5), 3076-3081 (1998) |
| protein tyrosine phosphatase, | 4758978 | 7544790 | Ahmad et al., J Biol Chem 1995 Sep |
| non-receptor type substrate 1 | | | 1; 270(35): 20503-8 |
| | | | Kharitonenkov et al., Nature 386 |
| | | | (6621), 181-186 (1997) |
| pancreatic lipase-related | 4885555 | 9813028 | Lowe et al., J Biol Chem 1998 Nov |
| protein 2 | | | 20; 273(47): 31215-21 |
| | | | Giller et al., J. Biol. Chem. 267 (23), |
| | | | 16509-16516 (1992) |
| pancreatic lipase-related | 5453920 | 9813028 | Lowe et al., J Biol Chem 1998 Nov |
| protein 1 | | | 20; 273(47): 31215-21 |
| | | | Giller et al., J. Biol. Chem. 267 (23), |
| | | | 16509-16516 (1992) |
| hepatocyte nuclear factor 4, | 6631088 | 9839108 | Iwasaki et al., Diabetes Care 1998 |
| gamma | | | Dec; 21(12): 2144-8 |
| | | | Drewes et al., Mol. Cell. Biol. 16 |
| | | | (3), 925-931 (1996) |
| | | | Plengvidhya et al., Diabetes 48, |
| | | | 2009-2102 (1999) |
| tubby like protein 1 | 6715610 | 10629044 | Stubdal et al., Mol Cell Biol 2000 |
| | | | Feb; 20(3): 878-82 |
| | | | Knowles et al., Hum. Mol. Genet. 3 |
| | | | (8), 1401-1403 (1994) |
| | | | North et al., Proc. Natl. Acad. Sci. |
| | | | U.S.A. 94 (7), 3128-3133 (1997) |
| | | | Banerjee et al., Genomics 48 (2), |
| | | | 171-177 (1998) |
| | | | Gu et al., Lancet 351 (9109), 1103-1104 |
| | | | (1998) |
| peroxisome proliferative | 7019499 | 10937499 | Akazawa et al., Diabetes Care 2000 |
| activated receptor, gamma, | | | Aug; 23(8): 1067-71 |
| coactivator 1 | | | |
| | | | Esterbauer et al., Genomics 62 (1), |
| | | | 98-102 (1999) |
| high-glucose-regulated protein 8 | 7705411 | 10922516 | Yun et al., Brain Res Bull 2000 Jul |
| | | | 15; 52(5): 371-8 |
| | | | Roberts et al., unpublished, |
| | | | accession NP_057342 |

Notes:

[0018] adenosine deaminase, RNA-specific, isoform ADAR-a: Genetic variability of adenosine deaminase could contribute to degree of obesity in NIDDM.

[0019] adrenergic, alpha-1A-, receptor: Alpha(1)-adrenergic receptor response to catecholamines may be defective in type II diabetes.

[0020] alpha-2-HS-glycoprotein B-chain: May be an inhibitor of the insulin receptor tyrosine kinase.

[0021] glucagon-like peptide 1 (GLP-1) receptor: GLP-1 stimulates basal and glucose-induced insulin secretion and proinsulin gene expression; may modulate insulin receptor binding.

[0022] insulin-like growth factor 2 receptor: Involved in the regulation of insulin-responsive genes.

[0023] insulin-like growth factor binding protein 1: Associated with the regulation of insulin-responsive genes.

[0024] insulin receptor substrate 2: Involved in insulin signaling and may play a role in type II diabetes.

[0025] insulin receptor substrate 4: Involved in insulin signaling and may play a role in type II diabetes.

[0026] leptin receptor: Leptin regulates satiety centers in the brain; a defect in either leptin production or transmission of the leptin signal in animal models results in a syndrome of obesity and diabetes similar to that which occurs in humans; the binding of leptin to its receptor in beta-cells may modulate insulin expression and thereby may have an anti-obesity effect.

[0027] glucokinase regulatory protein: A regulatory protein that inhibits glucokinase in liver and pancreatic islet cells; a candidate gene for a form of maturity onset diabetes of the young.

[0028] orexin receptor 1: A G-protein coupled receptor expressed in the hypothalamus and involved in the regulation of feeding behaviour.

[0029] orexin receptor 2: Involved in the central feedback mechanism that regulates feeding behaviour.

[0030] insulin-like growth factor 1 receptor beta chain: Binds insulin-like growth factor with a high affinity.

[0031] potassium large conductance calcium-activated channel, subfamily M, beta member 1: May play an key role in regulating insulin secretion from pancreatic beta cells.

[0032] lipase, gastric: Involved in fat digestion.

[0033] alpha-glucosidase: A brush border membrane enzyme that plays a role in the final steps of digestion of starch.

[0034] protein tyrosine phosphatase, non-receptor type substrate 1: Involved in the negative regulation of insulin signaling.

[0035] pancreatic lipase-related protein 2: Performs a critical role in the digestion of dietary fats in animals.

[0036] pancreatic lipase-related protein 1: Involved in fat digestion.

[0037] hepatocyte nuclear factor 4, gamma: May impair pancreatic beta-cell function, leading to maturity-onset diabetes of the young; may lead to abnormal liver or kidney function.

[0038] tubby like protein 1: Loss of the tub gene gives rise to maturity-onset obesity in a mouse model.

[0039] peroxisome proliferative activated receptor, gamma, coactivator 1: Activation promotes preadipocyte differentiation in adipose tissue, leading to weight gain and accumulation of subcutaneous adipose tissue.

[0040] high-glucose-regulated protein 8: Gene is selectively expressed in hyperglycaemia.

[0041] SNPs

[0042] The genomes of all organisms undergo spontaneous mutation in the course of their continuing evolution, generating variant forms of progenitor sequences (Gusella, Ann. Rev. Biochem. 55, 831-854 (1986)). The variant form may confer an evolutionary advantage or disadvantage relative to a progenitor form or may be neutral. In some instances, a variant form confers a lethal disadvantage and is not transmitted to subsequent generations of the organism. In other instances, a variant form confers an evolutionary advantage to the species and is eventually incorporated into the DNA of many or most members of the species and effectively becomes the progenitor form. Additionally, the effect of a variant form may be both beneficial and detrimental, depending on the circumstances. For example, a heterozygous sickle cell mutation confers resistance to malaria, but a homozygous sickle cell mutation is usually lethal. In many instances, both progenitor and variant form(s) survive and co-exist in a species population. The coexistence of multiple forms of a sequence gives rise to polymorphisms, such as SNPs.

[0043] The reference allelic form is arbitrarily designated and may be, for example, the most abundant form in a population, or the first allelic form to be identified, and other allelic forms are designated as alternative, variant or polymorphic alleles. The allelic form occurring most frequently in a selected population is sometimes referred to as the “wild type” form.

[0044] Approximately 90% of all polymorphisms in the human genome are single nucleotide polymorphisms (SNPs). SNPs are single base pair positions in DNA at which different alleles, or alternative nucleotides, exist in some population. The SNP position, or SNP site, is usually preceded by and followed by highly conserved sequences of the allele (e.g., sequences that vary in less than 1/100 or 1/1000 members of the populations). An individual may be homozygous or heterozygous for an allele at each SNP position. As defined by the present invention, the least frequent allele at a SNP position can have any frequency that is less than the frequency of the more frequent allele, including a frequency of less than 1% in a population. A SNP can, in some instances, be referred to as a “cSNP” to denote that the nucleotide sequence containing the SNP is an amino acid coding sequence.

[0045] A SNP may arise due to a substitution of one nucleotide for another at the polymorphic site. Substitutions can be transitions or transversions. A transition is the replacement of one purine nucleotide by another purine nucleotide, or one pyrimidine by another pyrimidine. A transversion is the replacement of a purine by a pyrimidine, or vice versa. A SNP may also be a single base insertion/deletion variant (referred to as “indels”). A substitution that changes a codon coding for one amino acid to a codon coding for a different amino acid is referred to as a non-synonymous codon change, or missense mutation. A synonymous codon change, or silent mutation, is one that does not result in a change of amino acid due to the degeneracy of the genetic code. A nonsense mutation is a type of non-synonymous codon change that results in the formation of a stop codon, thereby leading to premature termination of a polypeptide chain and a defective protein.

[0046] SNPs, in principle, can be bi-, tri-, or tetra- allelic. However, tri- and tetra-allelic polymorphisms are extremely rare, almost to the point of non-existence (Brookes, Gene 234 (1999) 177-186). For this reason, SNPs are often referred to as “bi-allelic markers”, or “di-allelic markers”.

[0047] Causative SNPs are those SNPs that produce alterations in gene expression or in the expression or function of a gene product, and therefore are most predictive of a possible clinical phenotype. One such class includes SNPs falling within regions of genes encoding a polypeptide product, i.e. cSNPs. These SNPs may result in an alteration of the amino acid sequence of the polypeptide product (i.e., non-synonymous codon changes) and give rise to the expression of a defective or other variant protein. Furthermore, in the case of nonsense mutations, a SNP may lead to premature termination of a polypeptide product. Such variant products can result in a pathological condition, e.g., genetic disease. Examples of genes in which a polymorphism within a coding sequence gives rise to genetic disease include sickle cell anemia and cystic fibrosis. Causative SNPs do not necessarily have to occur in coding regions; causative SNPs can occur in any region that can ultimately affect the expression and/or activity of the protein encoded by the nucleic acid. Such gene areas include those involved in transcription, such as SNPs in promoter regions, in gene areas involved in transcript processing, such as SNPs at intron-exon boundaries that may cause defective splicing, or SNPs in mRNA processing signal sequences such as polyadenylation signal regions. For example, a SNP may inhibit splicing of an intron and result in mRNA containing a premature stop codon, leading to a defective protein. Consequently, SNPs in regulatory regions can have substantial phenotypic impact.

[0048] Some SNPs that are not causative SNPs nevertheless are in close association with, and therefore segregate with, a disease-causing sequence. In this situation, the presence of the SNP correlates with the presence of, or susceptibility to, the disease. These SNPs are invaluable for diagnostics and disease susceptibility screening.

[0049] Clinical trials have shown that patient response to treatment with pharmaceuticals is often heterogeneous. Thus there is a need for improved approaches to pharmaceutical agent design and therapy. SNPs can be used to help identify patients most suited to therapy with particular pharmaceutical agents (this is often termed “pharmacogenomics”). Pharmacogenomics can also be used in pharmaceutical research to assist the drug selection process. (Linder et al. (1997), Clinical Chemistry, 43, 254; Marshall (1997), Nature Biotechnology, 15, 1249; International Patent Application WO 97/40462, Spectra Biomedical; and Schafer et al. (1998), Nature Biotechnology, 16, 3.).

[0050] Population Genetics

[0051] Population Genetics is the study of how Mendel's laws and other genetic principles apply to entire populations. Such a study is essential to a proper understanding of the genetic basis of type II diabetes and obesity and SNP-based association studies and linkage disequilibrium mapping. Population genetics thus seeks to understand and to predict the effects of such genetic phenomena as segregation, recombination, and mutation; at the same time, population genetics must take into account such ecological and evolutionary factors as population size, patterns of mating, geographic distribution of individuals, migration and natural selection.

[0052] Linkage is the coinheritance of two or more nonallelic genes because their loci are in close proximity on the same chromosome, such that after meiosis they remain associated more often than the 50% expected for unlinked genes. During meiosis, there is a physical crossing over, it is clear that during the production of germ cells there is a physical exchange of maternal and paternal genetic contributions between individual chromatids. This exchange necessarily separates genes in chromosomal regions that were contiguous in each parent and, by mixing them with retained linear order, results in “recombinants”. The process of forming recombinants through meiotic crossing-over is an essential feature in the reassortment of genetic traits and is central to understanding the transmission of genes.

[0053] Recombination generally occurs between large segments of DNA. This means that contiguous stretches of DNA and genes are likely to be moved together. Conversely, regions of the DNA that are far apart on a given chromosome are more likely to become separated during the process of crossing-over than regions of the DNA that are close together.

[0054] It is possible to use polymorphic molecular markers, such as SNPs, to clarify the recombination events that take place during meiosis. They are used as position markers and regional identifying characters along chromosomes and can also be used to distinguish paternally derived gene regions from maternally derived gene regions.

[0055] The pattern of a set of markers along a chromosome is referred to as a “Haplotype”. Therefore sets of alleles on the same small chromosomal segment tend to be transmitted as a block through a pedigree. By analyzing the haplotypes in a series of offspring of parents whose haplotypes are known, it is possible to establish which parental segment of which chromosome was transmitted to which child. When not broken up by recombination, haplotypes can be treated for mapping purposes as alleles at a single highly polymorphic locus.

[0056] The existence of a preferential occurrence of a disease gene in association with specific alleles of linked markers, such as SNPs, is called “Linkage Disequilibrium”(LD). This sort of disequilibrium generally implies that most of the disease chromosomes carry the same mutation and the markers being tested are quite close to the disease gene. For example, there is considerable linkage disequilibrium across the entire HLA locus. The A3 allele is in LD with the B7 and B14 alleles, and as a result B7 and B14 are also highly associated with hemochromatosis. Thus, HLA typing alone can significantly alter the estimate of risk for hemochromatosis, even if other family members are not available for formal linkage analysis. Consequently, by using a combination of several markers surrounding the presumptive location of the gene, a haplotype can be determined for affected and unaffected family members.

[0057] SNP-Based Association Analysis and Linkage Disequilibrium Mapping

[0058] SNPs are useful in association studies for identifying particular SNPs, or other polymorphisms, associated with pathological conditions, such as type II diabetes and obesity. Association studies may be conducted within the general population and are not limited to studies performed on related individuals in affected families (linkage studies). An association study using SNPs involves determining the frequency of the SNP allele in many patients with the disorder of interest, such as type II diabetes and obesity, as well as controls of similar age and race. The appropriate selection of patients and controls is critical to the success of SNP association studies. Therefore, a pool of individuals with well-characterized phenotypes is extremely desirable. For example, blood pressure and heart rate can be correlated with SNP patterns in hypertensive individuals in whom these physiological parameters are known in order to find associations between particular SNP genotypes and known phenotypes. Significant associations between particular SNPs or SNP haplotypes and phenotypic characteristics can be determined by standard statistical methods. Association analysis can either be direct or LD based. In direct association analysis, causative SNPs are tested that are candidates for the pathogenic sequence itself.

[0059] In LD based SNP association analysis, random SNPs are tested over a large genomic region, possibly the entire genome, in order to find a SNP in LD with the true pathogenic sequence or pathogenic SNP. For this approach, high density SNP maps are required in order for random SNPs to be located close enough to an unknown pathogenic locus to be in linkage disequilibrium with that locus in order to detect an association. SNPs tend to occur with great frequency and are spaced uniformly throughout the genome. The frequency and uniformity of SNPs means that there is a greater probability, compared with other types of polymorphisms such as tandem repeat polymorphisms, that a SNP will be found in close proximity to a genetic locus of interest. SNPs are also mutationally more stable than tandem repeat polymorphisms, such as VNTRs. LD-based association studies are capable of finding a disease susceptibility gene without any a priori assumptions about what or where the gene is.

[0060] Currently, however, it is not feasible to do SNP association studies over the entire human genome, therefore candidate genes associated with type II diabetes and obesity are targeted for SNP identification and association analysis. The candidate gene approach uses a priori knowledge of disease pathogenesis to identify genes that are hypothesized to directly influence development of the disease. The candidate gene approach may focus on a gene that is directly targeted by a drug used to treat the disorder. To discover SNPs associated with an increased susceptibility to type II diabetes and obesity, candidate genes can be selected from systems physiologically implicated in the disease pathway. SNPs found in these genes are then tested for statistical association with disease in individuals who have the disease compared with appropriate controls. The candidate gene approach has the advantages of drastically reducing the number of candidate SNPs, and the number of individuals, that need to be typed, compared with LD-based association studies of random SNPs over large areas of, or complete, genomes. Furthermore, in the candidate gene approach, no assumptions are made about the extent of LD over any particular area of the genome.

[0061] Combined with the use of a high density map of appropriately spaced, sufficiently informative SNP markers, association studies, including linkage disequilibrium-based genome wide association studies, will enable the identification of most genes involved in complex disorders, such as type II diabetes and obesity. This will enhance the selection of candidate genes most likely to contain causative SNPs associated with a particular disease. All of the SNPs disclosed by the present invention can be employed as part of genome-wide association studies or as part of candidate gene association studies.

[0062] The present invention advances the state of the art and provides commercially useful embodiments by providing previously unidentified SNPs in genes known in the art to be associated with type II diabetes and obesity.

### SUMMARY OF THE INVENTION

[0063] The present invention is based on the identification of novel SNPs and previously unknown haplotypes in genes known in the art to be associated with the pathologies of type II diabetes and obesity. Such polymorphisms/haplotypes can lead to a variety of pathologies and disorders associated with type II diabetes and obesity that are mediated/modulated by a variant gene/protein. Further, such polymorphisms are important reagents in studying the pathologies of type II diabetes and obesity.

[0064] Based on these identifications, the present invention provides methods of detecting these novel variants as well as reagents needed to accomplish this task. The invention specifically provides novel SNPs in genes known to be involved in type II diabetes and obesity, variant proteins encoded by the novel SNP forms of these genes, antibodies to the variant proteins, computer-based and data storage systems containing the novel SNP information, methods of detecting these SNPs in a sample, methods of determining a risk of having or developing a disorder mediated by a variant gene/protein, methods of screening for compounds used to treat disorders mediated by a variant gene/protein, methods of treating disorders mediated by a variant gene/protein, and methods of using the novel SNPs of the present invention for human identification. The present invention also provides genomic nucleotide sequences, transcript sequences, encoded amino acid sequences, and context sequences that contain the SNPs of the present invention.

[0065] Description of the Files Contained on the CD-R Labeled CL00786CDR

[0066] NOTE: Two duplicate copies of the CD-R are submitted herewith, labeled “Copy 1” and “Copy 2”. The material on each of the duplicate CD-R's is identical. Thus, descriptions or references herein to the CD-R labeled CL00786CDR and the files contained thereon apply to both “Copy 1” and “Copy 2”.

[0067] The CD-R labeled CL00786CDR contains the following two files:

[0068] 1) File SEQLIST_{—}786.txt provides the Sequence Listing of the transcript sequences (SEQ ID NOS:1-61), protein sequences (SEQ ID NOS:62-122), and genomic sequences (SEQ ID NOS:123-183) for each type II diabetes and obesity-associated gene that contains a SNP of the present invention. Also provided are the context sequences (SEQ ID NOS:184-2172) that flank each SNP of the present invention. The context sequences generally provide about 300 bp upstream (5′) and 300 bp downstream (3′) of each SNP, with the SNP about in the middle of the sequence, for a total of about 600 bp of context sequence surrounding each SNP. The transcript, protein, genomic, and context sequences provided in the Sequence Listing are also provided in Table 1, where they are identified by their SEQ ID NO. The Sequence Listing is provided in text (ASCII) format. SEQLIST_{—}786.txt is 6,047 KB in size and was created on Sep. 10, 2001.

[0069] 2) File TABLE1_{—}786.txt provides Table 1 in text (ASCII) format, which discloses the SNP and associated gene information of the present invention as indicated below in the “Detailed Description of Table 1 ”, including the context sequences (SEQ ID NOS:184-2172) flanking each SNP and the transcript (SEQ ID NOS:1-61), protein (SEQ ID NOS:62-122), and genomic sequences (SEQ ID NOS:123-183) of the type II diabetes and obesity-associated genes that contain each SNP. File TABLE1_{—}786.txt is 4,925 KB in size and was created on Sep. 10, 2001.

[0070] The material contained on the CD-R labeled CL00786CDR is hereby incorporated by reference pursuant to 37 CFR 1.77(b)(4).

[0071] Description of Table 1

[0072] Table 1 discloses the SNP and associated gene information of the present invention. For each SNP, Table 1 provides gene information followed by SNP information.

[0073] The gene information includes: a gene number, a Celera hCT number and/or a RefSeq NM number (the NM number is a reference number to an annotated human gene that is publicly known and whose role in disease processes is understood to the point of providing commercial uses for the naturally occurring variants herein described; the public gene identified by the NM number may be the same as the gene identified by the hCT number, or may be a homolog, or paralog thereof), the art-known gene name, the art-known protein name, Celera genomic axis position and chromosomal position/cytoband of the gene where available, a public reference (e.g., OMIM reference information, which can readily be used by one of ordinary skill in the art to associate the allelic variants of each gene provided herein with medically significant disease conditions and pathologies, thus providing readily apparent commercial utilities for the SNP information of the present invention) to the gene/protein name supporting the medical significance of the gene/protein, transcript sequence (corresponding to SEQ ID NOS:1-61 of the Sequence Listing), protein sequence (corresponding to SEQ ID NOS:62-122 of the Sequence Listing), and genomic sequence (corresponding to SEQ ID NOS:123-183 of the Sequence Listing) of the assembled genomic region containing the gene. The SEQ ID NOS provided for each sequence in Table 1 correspond with the SEQ ID NOS in the Sequence Listing, provided in file SEQLIST_{—}786.TXT on the accompanying CD-R, label CL00786CDR. NOTE: the genomic sequences always correspond to Celera genomic sequences; where both a Celera hCT number and an NM number are provided for a gene, the transcript and protein sequences correspond to the Celera sequences identified by the hCT number; where only an NM number is provided for a gene, the transcript and protein sequences correspond to the public sequences identified for the NM number.

[0074] The SNP information includes: 300 bp of 5′ and 3′ context sequence (corresponding to SEQ ID NOS:184-2172 of the Sequence Listing; in some instances, the context sequences may be reverse complemented relative to the gene/transcript sequences), Celera CV identification number for internal tracking, identified alleles, populations seen with alleles (“cau”=Caucasian, “his”=Hispanic, “chn”=Chinese, and “afr”=African, “jpn”=Japanese, “ind”=Indian, “mex”=Mexican, “ain”=“American Indian, ”cra“=Celera donor, “no_pop”=no population information available), SNP type [“MIS-SENSE MUTATION”=SNP causes a change in the encoded amino acid (i.e., a non-synonymous coding SNP); “INTERGENIC/UNKNOWN”=SNP occurs in an intergenic region of the genome; “UNKNOWN”=SNP is located in an uncharacterized genomic region; “SILENT MUTATION”=SNP does not cause a change in the encoded amino acid (i.e., a synonymous coding SNP); “STOP CODON MUTATION”=SNP is located in a stop codon; “NONSENSE MUTATION”=SNP creates a stop codon; “INTRON”=SNP is located in an intron, “UTR 5”=SNP is located in a 5′ UTR of a transcript; “UTR 3”=SNP is located in a 3′ UTR of a transcript; “PUTATIVE UTR 5”=SNP is located in a putative 5′ UTR; “PUTATIVE UTR 3”=SNP is located in a putative 3′ UTR; “DONOR SPLICE SITE”=SNP is located in a donor splice site (5′ intron boundary); “ACCEPTOR SPLICE SITE”=SNP is located in an acceptor splice site (3′ intron boundary); “REPEATS”=SNP is located in a repeat element; CODING REGION=generally, the SNP is an insertion/deletion (“indel”) polymorphism that may cause a frameshift that alters the encoded protein downstream of the SNP; EXON=SNP is located in an exon; “HUMAN-MOUSE CONSERVED REGION”=SNP is located in a region of the human genome that shares a high degree of sequence similarity with the mouse; “CONSERVED SEGMENT PUTATIVE”=generally, SNP is located in a segment of the genome that is a putative regulatory region conserved between human and mouse; “CORE PROMOTER PREDICTION PUTATIVE”=SNP is located in a predicted core promoter; “TRANSCRIPTION FACTOR SITE PUTATIVE”=SNP is located in a predicted transcription factor binding site; “REGULATORY REGION”=SNP is located in a regulatory region; and “PUTATIVE REGULATORY REGION”=SNP is located in a putative regulatory region], affected protein (including Celera hCP or Genbank GI number, position of the amino acid residue within the protein identified by the hCP or GI number that is encoded by the codon containing the SNP, and alternative amino acids represented by 1-letter amino acid codes that are encoded by the alternative SNP alleles), and source [whether the SNP is found only in Celera data and is novel to the present invention (“Celera”), or at least one SNP allele has been found in a public database as well as in Celera data but the map position of the SNP may not be publicly known (“Celera+”)].

### DESCRIPTION OF THE FIGURE

[0075] FIG. 1 provides a diagrammatic representation of a discovery system containing the SNP information of the present invention in computer readable form.

### DETAILED DESCRIPTION OF THE INVENTION

[0076] General Description

[0077] The shotgun sequencing method was used to sequence and assemble the human genome. During the sequencing phase, DNA samples from six individuals of various racial backgrounds (Caucasian, Hispanic, Chinese, and Negro) were sequenced to various extents and the sequence fragments were assembled to obtain an assembled consensus genomic sequence for human. Since DNA was sampled from six individuals, and each individual represents two sets of chromosomes, in addition to the consensus, genetic variation was found in the assemblies. These variations were subjected to rigorous analytical selection to lead to the identification of sequence variations that represent SNPs between the individuals whose DNA was sequenced.

[0078] The genomic assembly and identified sequence variation was then compared to publicly known genes involved in type II diabetes and obesity. Regions of the assemblies that represented the corresponding gene were selected and the variations are provided herein.

[0079] Based on this work, the present invention provides methods and reagents needed to detect the disclosed SNPs in genes known in the art to contribute to type II diabetes and obesity (See Background, Table 1, and the Sequence Listing). Such polymorphisms/haplotypes can lead to a variety of disorders that are mediated/modulated by a gene/protein, particularly susceptibility to type II diabetes and obesity and associated pathologies.

[0080] The present invention specifically provides genomic nucleotide sequences, cDNA sequences, amino acid sequences, and context/probes and primer sequences that contain SNPs in the genes provided in Table 1 and the Sequence Listing, methods of detecting these polymorphisms/haplotypes in a sample, methods of determining a risk of having or developing a disorder mediated by a variant gene/protein, methods of treating a disorder mediated by a SNP of the present invention, methods of screening for compounds used to treat disorders mediated by a variant gene/protein of the present invention, and methods of using the SNPs of the present invention for human identification.

[0081] Those in the art will readily recognize that nucleic acid molecules may be double stranded molecules and that reference to a particular site on one strand refers, as well, to the corresponding site on a complementary strand. Thus, in defining a polymorphic site, reference to an adenine, a thymine (uridine), a cytosine, or a guanine at a particular site on one strand of a nucleic acid molecule is also intended to include the thymine (uridine), adenine, guanine, or cytosine (respectively) at the corresponding site on a complementary strand of the nucleic acid molecule. Thus, reference may be made to either strand in order to refer to a particular SNP position. Oligonucleotide, such as probes and primers, may be designed to hybridize to either strand and SNP genotyping methods may generally target either strand. Throughout the text, in identifying a polymorphic site, reference is made to the protein encoding strand, only for the purpose of convenience.

[0082] References made throughout the text to SNP-containing nucleic acids, variant nucleic acids, or variant genes may include a SNP site alone, as well as one or more SNP sites in combination with neighboring context nucleic acid sequences that contain the SNP site(s). The nucleic acid sequence can be a nucleotide sequence comprising one or more SNPs of the present invention, or a complementary nucleotide sequence comprising a sequence complementary to one or more SNPs of the present invention.

[0083] References to either variant peptides/polypeptides, or variant proteins of the present invention includes peptides/polypeptides/proteins, or fragments thereof, that contain an amino acid that differs from the corresponding amino acid found in the “wild-type”, “reference”, “normal”, or previously characterized peptide/polypeptide/protein due to a codon change resulting from a nonsynonymous nucleotide substitution at a SNP position disclosed by the present invention. Variant peptides/polypeptides/proteins of the present invention may also be due to a SNP disclosed by the present that generates a nonsense mutation that leads to a premature stop codon or a SNP that abolishes a stop codon, or due to any SNP disclosed by the present invention that alters the expression, structure, or function of a protein, for example, a SNP in a control element such as a promoter or enhancer or a SNP that leads to defective splicing.

[0084] Reagents for Detecting SNP Variants

[0085] In Table 1, the present invention provides the name of a known gene that has been shown to be involved in, or implicated in, type II diabetes and obesity, its chromosomal position, a citation or public reference identifier, the transcript and protein sequence of the encoded gene products, the consensus human genome assembly containing the known gene and the SNP information of the present invention.

[0086] The SNP information is provided as context 300 base pair sequences found 3′ and 5′ of the variant, the alleles present at the site, and additional information about the variant, such as the nature of the SNP (coding, missense, etc.), population it was found in, etc.

[0087] The SNP information provided herein can be provided as reagents needed for detecting the variant in the form of sequence probes and primers specific for the variant sequence or antibodies specific for the variant protein, as information in discovery systems for analyzing this and/or other variants in these important genes. These reagents can be used in methods for detecting the presence of these variants and discriminating them for the art known forms.

[0088] Isolated SNP-Containing Nucleic Acid Molecules

[0089] The present invention provides isolated nucleic acid molecules that contain one or more SNPs disclosed by the present invention. The present invention further provides isolated nucleic acid molecules that encode the variant protein. Such nucleic acid molecules will consist of, consist essentially of, or comprise one or more SNPs of the present invention. The nucleic acid molecule can have additional nucleic acid residues, such as nucleic acid residues that are naturally associated with it or heterologous nucleotide sequences.

[0090] As used herein, an “isolated” SNP-containing nucleic acid molecule is one that contains a SNP of the present invention and is separated from other nucleic acid present in the natural source of the nucleic acid. Generally, the isolated SNP-containing nucleic acid, as used herein, will be comprised of one or more SNP positions disclosed by the present invention with flanking nucleotide sequence on either side of the SNP positions. Preferably the flanking sequence is up to about 300 bases, 100 bases, 50 bases, 30 bases, 15 bases, 10 bases, or 4 bases on either side of a SNP position for detection reagents or as long as the entire protein encoding sequence if it is to be used to produce a protein containing the coding variants disclosed in Table 1 and the Sequence Listing. The important point is that the nucleic acid is isolated from remote and unimportant flanking sequences and is of appropriate length such that it can be subjected to the specific manipulations or uses described herein such as recombinant expression, preparation of probes and primers for the SNP position, and other uses specific to the SNP-containing nucleic acid sequences.

[0091] Moreover, an “isolated” nucleic acid molecule, such as a cDNA molecule containing a SNP of the present invention, can be substantially free of other cellular material, or culture medium when produced by recombinant techniques, or chemical precursors or other chemicals when chemically synthesized. However, the nucleic acid molecule can be fused to other coding or regulatory sequences and still be considered isolated. For example, recombinant DNA molecules contained in a vector are considered isolated. Further examples of isolated DNA molecules include recombinant DNA molecules maintained in heterologous host cells or purified (partially or substantially) DNA molecules in solution. Isolated RNA molecules include in vivo or in vitro RNA transcripts of the isolated SNP-containing DNA molecules of the present invention. Isolated nucleic acid molecules according to the present invention further include such molecules produced synthetically.

[0092] Isolated SNP-containing nucleic acid molecules can be in the form of RNA, such as mRNA, or in the form DNA, including cDNA and genomic DNA obtained by cloning or produced by chemical synthetic techniques or by a combination thereof. The nucleic acid, especially DNA, can be double-stranded or single-stranded. Single-stranded nucleic acid can be the coding strand (sense strand) or the non-coding strand (anti-sense strand).

[0093] The present invention further provides related nucleic acid molecules that hybridize under stringent conditions to the nucleic acid molecules disclosed herein. As used herein, the term “hybridizes under stringent conditions” is intended to describe conditions for hybridization and washing under which nucleotide sequences encoding a peptide at least 60-70% homologous to each other typically remain hybridized to each other. The conditions can be such that sequences at least about 60%, at least about 70%, or at least about 80%, or at least about 90% or more homologous to each other typically remain hybridized to each other. Such stringent conditions are known to those skilled in the art and can be found in Current Protocols in Molecular Biology, John Wiley & Sons, N.Y. (1989), 6.3.1-6.3.6. One example of stringent hybridization conditions are hybridization in 6× sodium chloride/sodium citrate (SSC) at about 45° C., followed by one or more washes in 0.2×SSC, 0.1% SDS at 50-65° C. Examples of moderate to low stringency hybridization conditions are well known in the art.

[0094] Variant Protein/Peptide Molecules

[0095] The present invention provides polymorphic, SNP-containing, nucleic acid sequences that encode variants of the type II diabetes and obesity associated gene product (protein) disclosed herein (See Table 1 and the Sequence Listing). These variant molecules/sequences will be referred to herein as the variants of the present invention, the variant proteins of the present invention, or variant peptides/polypeptides/proteins of the present invention.

[0096] The present invention provides isolated variant protein molecules that comprise, consist of or consist essentially of one or more variant amino acids encoded by a nonsynonymous nucleotide substitution at one or more of the SNP positions disclosed herein; also referred to as variant amino acids, peptides/polypeptides, or proteins encoded by SNPs disclosed herein.

[0097] Variant proteins include, but are not limited to deletions, additions and substitutions in the amino acid sequence of the protein caused by SNPs of the present invention. Table 1 provides the variant protein information of the present invention. For example, one class of substitutions is conserved amino acid substitutions. Such substitutions are those that substitute a given amino acid in a peptide for another amino acid of like characteristics. Typical conservative substitutions are replacements, one for another, among the aliphatic amino acids Ala, Val, Leu, and Ile; interchange of the hydroxyl residues Ser and Thr; exchange of the acidic residues Asp and Glu; substitution between the amide residues Asn and Gln; exchange of the basic residues Lys and Arg; and replacements among the aromatic residues Phe and Tyr. Guidance concerning which amino acid changes are likely to be phenotypically silent are found in Bowie et al., Science 24 7:1306-1310 (1990).

[0098] Variant proteins can be fully functional or can lack function in one or more activities, e.g. ability to bind substrate, ability to phosphorylate substrate, ability to mediate signaling, etc. Fully functional variants typically contain only conservative variation or variation in non-critical residues or in non-critical regions. Functional variants can also contain substitution of similar amino acids that result in no change or an insignificant change in function. Alternatively, such substitutions may positively or negatively affect function to some degree.

[0099] Non-functional variants typically contain one or more non-conservative amino acid substitutions, deletions, insertions, inversions, or truncation or a substitution, insertion, inversion, or deletion in a critical residue or critical region.

[0100] As used herein, a protein or peptide is said to be “isolated” or “purified” when it is substantially free of cellular material or free of chemical precursors or other chemicals. The variant peptides of the present invention can be purified to homogeneity or other degrees of purity. The level of purification will be based on the intended use. The critical feature is that the preparation allows for the desired function of the variant peptide, even if in the presence of considerable amounts of other components.

[0101] In some uses, “substantially free of cellular material” includes preparations of the variant peptide having less than about 30% (by dry weight) other proteins (i.e., contaminating protein), less than about 20% other proteins, less than about 10% other proteins, or less than about 5% other proteins. When the variant peptide is recombinantly produced, it can also be substantially free of culture medium, i.e., culture medium represents less than about 20% of the volume of the protein preparation.

[0102] The language “substantially free of chemical precursors or other chemicals” includes preparations of the variant peptide in which it is separated from chemical precursors or other chemicals that are involved in its synthesis. In one embodiment, the language “substantially free of chemical precursors or other chemicals” includes preparations of the variant protein having less than about 30% (by dry weight) chemical precursors or other chemicals, less than about 20% chemical precursors or other chemicals, less than about 10% chemical precursors or other chemicals, or less than about 5% chemical precursors or other chemicals.

[0103] The isolated variant proteins can be purified from cells that naturally express it, purified from cells that have been altered to express it (recombinant), or synthesized using known protein synthesis methods. For example, a nucleic acid molecule containing SNP(s) encoding the variant protein is cloned into an expression vector, the expression vector introduced into a host cell and the variant protein expressed in the host cell. The variant protein can then be isolated from the cells by an appropriate purification scheme using standard protein purification techniques. Many of these techniques are described in detail below.

[0104] Accordingly, the present invention provides variant proteins that consist of amino acid sequences that contain one or more of the amino acid polymorphisms encoded by a SNP provided in Table 1. A protein consists of an amino acid sequence when the amino acid sequence is the final amino acid sequence of the protein.

[0105] The present invention further provides variant proteins that consist essentially of amino acid sequences that contain one or more of the amino acid polymorphisms encoded by a SNP provided in Table 1. A protein consists essentially of an amino acid sequence when such an amino acid sequence is present with only a few additional amino acid residues in the final protein.

[0106] The present invention further provides variant proteins that are comprised of amino acid sequences that contain one or more of the amino acid polymorphisms encoded by a SNP provided in Table 1. A protein is comprised of an amino acid sequence when the amino acid sequence is at least part of the final amino acid sequence of the protein. In such a fashion, the protein can be only the variant peptide or have additional amino acid molecules, such as amino acid residues (contiguous encoded sequence) that are naturally associated with it or heterologous amino acid residues/peptide sequences. Such a protein can have a few additional amino acid residues or can comprise several hundred or more additional amino acids. A brief description of how various types of these proteins can be made/isolated is provided below.

[0107] The variant proteins of the present invention can be attached to heterologous sequences to form chimeric or fusion proteins. Such chimeric and fusion proteins comprise a variant protein operatively linked to a heterologous protein having an amino acid sequence not substantially homologous to the variant protein. “Operatively linked” indicates that the variant protein and the heterologous protein are fused in-frame. The heterologous protein can be fused to the N-terminus or C-terminus of the variant protein.

[0108] A chimeric or fusion protein can be produced by standard recombinant DNA techniques. For example, DNA fragments coding for the different protein sequences are ligated together in-frame in accordance with conventional techniques. In another embodiment, the fusion gene can be synthesized by conventional techniques including automated DNA synthesizers. Alternatively, PCR amplification of gene fragments can be carried out using anchor primers which give rise to complementary overhangs between two consecutive gene fragments which can subsequently be annealed and re-amplified to generate a chimeric gene sequence (see Ausubel et al., Current Protocols in Molecular Biology, 1992). Moreover, many expression vectors are commercially available that already encode a fusion moiety (e.g., a GST protein). A variant protein-encoding nucleic acid can be cloned into such an expression vector such that the fusion moiety is linked in-frame to the variant protein.

[0109] Polypeptides often contain amino acids other than the 20 amino acids commonly referred to as the 20 naturally occurring amino acids. Further, many amino acids, including the terminal amino acids, may be modified by natural processes, such as processing and other post-translational modifications, or by chemical modification techniques well known in the art. Common modifications that occur naturally in polypeptides are described in basic texts, detailed monographs, and the research literature, and they are well known to those of skill in the art. Accordingly, the variant peptides of the present invention also encompass derivatives or analogs in which a substituted amino acid residue is not one encoded by the genetic code, in which a substituent group is included, in which the mature polypeptide is fused with another compound, such as a compound to increase the half-life of the polypeptide (for example, polyethylene glycol), or in which the additional amino acids are fused to the mature polypeptide, such as a leader or secretory sequence or a sequence for purification of the mature polypeptide or a pro-protein sequence.

[0110] Known modifications include, but are not limited to, acetylation, acylation, ADP-ribosylation, amidation, covalent attachment of flavin, covalent attachment of a heme moiety, covalent attachment of a nucleotide or nucleotide derivative, covalent attachment of a lipid or lipid derivative, covalent attachment of phosphotidylinositol, cross-linking, cyclization, disulfide bond formation, demethylation, formation of covalent crosslinks, formation of cystine, formation of pyroglutamate, formylation, gamma carboxylation, glycosylation, GPI anchor formation, hydroxylation, iodination, methylation, myristoylation, oxidation, proteolytic processing, phosphorylation, prenylation, racemization, selenoylation, sulfation, transfer-RNA mediated addition of amino acids to proteins such as arginylation, and ubiquitination.

[0111] The present invention further provides fragments of the variant proteins of the present invention, in addition to proteins and peptides that comprise and consist of such fragments, provided that such fragments contain one or more amino acid polymorphisms encoded by a nonsynonymous SNP substitution provided by the present invention. The fragments to which the invention pertains, however, are not to be construed as encompassing fragments that may be disclosed publicly prior to the present invention.

[0112] As used herein, a fragment comprises at least 8 or more contiguous amino acid residues from a variant protein, wherein at least one residue is a variant amino acid encoded by a nonsynonymous nucleotide substitution at a SNP position provided by the present invention. Such fragments can be chosen based on the ability to retain one or more of the biological activities of the variant protein or could be chosen for the ability to perform a function, e.g. act as an immunogen. Particularly important fragments are biologically active fragments. Such fragments will typically comprise a domain or motif of the variant proteins of the present invention, e.g., active site or ligand binding domain. Further, possible fragments include, but are not limited to, domain or motif containing fragments, soluble peptide fragments, and fragments containing immunogenic structures. Predicted domains and functional sites are readily identifiable by computer programs well known and readily available to those of skill in the art (e.g., PROSITE analysis).

[0113] Antibodies

[0114] The invention also provides antibodies that selectively bind to the variant proteins of the present invention as well as fragments thereof. Such antibodies may be used to quantitatively or qualitatively detect the variant protein or variant peptide molecules of the present invention. As used herein, an antibody selectively binds a target variant protein when it binds the variant protein and does not significantly bind to non-variant proteins, i.e., the antibody does not bind to normal, wild-type, or previously disclosed proteins that do not contain a variant amino acid encoded by a nonsynonymous nucleotide substitution at a SNP position disclosed herein.

[0115] As used herein, an antibody is defined in terms consistent with that recognized within the art: they are multi-subunit proteins produced by a mammalian organism in response to an antigen challenge. The antibodies of the present invention include monoclonal antibodies and polyclonal antibodies, as well as fragments of such antibodies, including, but not limited to, Fab or F(ab′)₂, and Fv fragments.

[0116] Many methods are known for generating and/or identifying antibodies to a given target peptide. Several such methods are described by Harlow, Antibodies, Cold Spring Harbor Press, (1989). In general, to generate antibodies, an isolated peptide is used as an immunogen and is administered to a mammalian organism, such as a rat, rabbit or mouse. Either the full-length protein, an antigenic peptide fragment, or a fusion protein can be used.

[0117] Monoclonal antibodies can be produced by hybridomas, which are immortalized cell lines capable of secreting a specific monoclonal antibody. The immortalized cell lines can be created in vitro by fusing two different cell types, usually lymphocytes, one of which is a tumor cell.

[0118] Antibodies are preferably prepared from regions or discrete fragments of the variant protein containing a variant amino acid. Antibodies can be prepared from any region of the variant peptide as described herein, provided that the region contains a variant amino acid encoded by a nonsynonymous nucleotide substitution at a SNP position disclosed by the present invention. However, preferred regions will include those involved in function/activity and/or protein/binding partner interaction. An antigenic fragment will typically comprise at least 10 contiguous amino acid residues; at least one of the amino acid residues is an amino acid encoded by a SNP of the present invention. The antigenic peptide can comprise, however, at least 12, 14, 20 or more amino acid residues, provided that at least one amino acid is encoded by a SNP of the present invention. Such fragments can be selected on a physical property, such as fragments corresponding to regions that are located on the surface of the protein, e.g., hydrophilic regions or can be selected based on sequence uniqueness, or based on the position of the variant amino acid residue(s) encoded by the SNPs provided by the present invention.

[0119] Detection of an antibody of the present invention can be facilitated by coupling (i.e., physically linking) the antibody to a detectable substance. Examples of detectable substances include various enzymes, prosthetic groups, fluorescent materials, luminescent materials, bioluminescent materials, and radioactive materials. Examples of suitable enzymes include horseradish peroxidase, alkaline phosphatase, β-galactosidase, or acetylcholinesterase; examples of suitable prosthetic group complexes include streptavidin/biotin and avidin/biotin; examples of suitable fluorescent materials include umbelliferone, fluorescein, fluorescein isothiocyanate, rhodamine, dichlorotriazinylarnine fluorescein, dansyl chloride or phycoerythrin; an example of a luminescent material includes luminol; examples of bioluminescent materials include luciferase, luciferin, and aequorin, and examples of suitable radioactive material include ¹²⁵I, ¹³¹I, ³⁵S or ³H.

[0120] Design of SNP-Containing Nucleic Acids Detection Methods

[0121] The SNP-containing nucleic acid molecules of the present invention are useful as probes, primers, chemical intermediates, and in biological assays for SNPs of the present invention. The probes/primers can correspond to one or more of the SNPs provided in Table 1 and the Sequence Listing or can correspond to a specific region 5′ and/or 3′ to a SNP position, particularly a region corresponding to the context sequences provided in the Sequence Listing (SEQ ID NOS:184-2172). However, as discussed above, fragments are not to be construed as encompassing fragments that are not associated with SNPs of the present invention or those known in the art for SNP detection. The SNP-containing nucleic acid molecules and information provided herein are also useful for designing primers for PCR to amplify any given SNP of the present invention and to design any formatted SNP detection reagent/kits.

[0122] A probe/primer typically comprises substantially a purified oligonucleotide or oligonucleotide pair. The oligonucleotide typically comprises a region of nucleotide sequence that hybridizes under stringent conditions to at least about 12, 20, 25, 40, 50 or more consecutive nucleotides. Depending on the particular application, the consecutive nucleotides can either include the target SNP position, or be a specific region in close enough proximity 5′ and/or 3′ to the SNP position to carry out the desired assay.

[0123] Preferred primer and probe sequences can readily be determined using the sequences provided in the Sequence Listing, particularly the SNP context sequences (SEQ ID NOS:184-2172). It will be apparent to one of skill in the art that such primers and probes are useful as diagnostic probes or amplification primers for genotyping SNPs of the present invention, and can be incorporated into a kit format.

[0124] For analyzing SNPs, it may be appropriate to use oligonucleotides specific to alternative SNP alleles (referred to as “allele-specific oligonucleotides”, “allele-specific probes”, or “allele-specific primers”). The design and use of allele-specific probes for analyzing polymorphisms is described by e.g., Saiki et al., Nature 324, 163-166 (1986); Dattagupta, EP 235,726, Saiki, WO 89/11548.

[0125] In a hybridization-based assay, allele-specific probes can be designed that hybridize to a segment of target DNA from one individual but do not hybridize to the corresponding segment from another individual due to the presence of different polymorphic forms in the respective segments from the two individuals. Hybridization conditions should be sufficiently stringent that there is a significant difference in hybridization intensity between alleles, and preferably an essentially binary response, whereby a probe hybridizes to only one of the alleles. Some probes are designed to hybridize to a segment of target DNA such that the polymorphic site aligns with a central position (e.g., in a 15-mer at the 7 position; in a 16-mer, at either the 8 or 9 position) of the probe. This design of probe achieves good discrimination in hybridization between different allelic forms.

[0126] Allele-specific probes are often used in pairs, the “pairs” may be identical except for a one nucleotide mismatch that represents the allelic variants at the SNP position. One member of a pair perfectly matches a reference form of a target sequence and the other member perfectly matches a variant form. In the case of an array, several pairs of probes can then be immobilized on the same support for simultaneous analysis of multiple polymorphisms within the same target sequence.

[0127] In one type of PCR-based assay, an allele-specific primer hybridizes to a site on target DNA overlapping the SNP position and only primes amplification of an allelic form to which the primer exhibits perfect complementarity. See Gibbs, Nucleic Acid Res. 17 2427-2448 (1989). This primer is used in conjunction with a second primer that hybridizes at a distal site. Amplification proceeds from the two-primers, resulting in a detectable product that indicates the particular allelic form is present. A control is usually performed with a second pair of primers, one of which shows a single base mismatch at the polymorphic site and the other of which exhibits perfect complementarity to a distal site. The single-base mismatch prevents amplification and no detectable product is formed. The method works best when the mismatch is included in the 3′-most position of the oligonucleotide aligned with the polymorphism because this position is most destabilizing to elongation from the primer (see, e.g., WO 93/22456). This PCR-based assay can be utilized as part of the TaqMan assay, described below.

[0128] SNP Detection Kits, Nucleic Acid Arrays, and Integrated Systems

[0129] The present invention further provides SNP detection reagents and kits, such as arrays/microarrays of nucleic acid molecules, or probe/primer sets, and other detection reagent sets, that are based on the SNPs provided in Table 1 and the Sequence Listing.

[0130] In one embodiment of the present invention, kits are provided which contain the necessary reagents to carry out one or more assays that detect one or more SNPs disclosed herein. The present invention also provides multicomponent integrated systems for analyzing the SNPs provided by the present invention.

[0131] SNP detection kits may contain one or more oligonucleotide probes, or pairs of probes, that hybridize at or near each SNP position. Multiple pairs of allele-specific oligonucleotides may be included in the kit to simultaneously assay large numbers of SNPs, at least one of which is one of the SNPs of the present invention. In some kits/detection reagents, such as arrays, the allele-specific oligonucleotides are provided immobilized to a substrate. For example, the same substrate can comprise allele-specific oligonucleotide probes for detecting at least 1; 10; 100; 1000; 10,000; 100,000 or substantially all of the polymorphisms shown in Table 1 and the Sequence Listing.

[0132] Specifically, the invention provides a compartmentalized kit to receive, in close confinement, one or more containers which comprises: (a) a first container comprising one of the nucleic acid probes, for example an allele-specific oligonucleotide, that can bind to a fragment of the human genome containing a SNP disclosed herein; and (b) one or more other containers comprising one or more of the following: wash reagents or reagents capable of detecting the presence of a bound probe. Containers may be interchangeably referred to as, for example, “compartments”, “chambers”, or “channels”.

[0133] In detail, a compartmentalized kit includes any kit in which reagents are contained in separate containers. Such containers include small glass containers, plastic containers, strips of plastic, glass or paper, or arraying material such as silica. Such containers allow one to efficiently transfer reagents from one compartment to another compartment such that the samples and reagents are not cross-contaminated, and the agents or solutions of each container can be added in a quantitative fashion from one compartment to another. Such containers may include a container which will accept the test sample, a container which contains the SNP probe, containers which contain wash reagents (such as phosphate buffered saline, Tris-buffers, etc.), and containers which contain the reagents used to detect the bound probe. The kit can further comprise reagents for PCR or other enzymatic reactions, and instructions for using the kit. One skilled in the art will readily recognize that the previously unidentified SNPs of the present invention can be routinely identified using the sequence information disclosed herein and can be readily incorporated into one of the established kit formats which are well known in the art.

[0134] As used herein “Arrays” or “Microarrays” refers to an array of distinct polynucleotides or oligonucleotides synthesized on a substrate, such as paper, nylon or other type of membrane, filter, chip, glass slide, or any other suitable solid support. In one embodiment, the microarray is prepared and used according to the methods described in U.S. Pat. No. 5,837,832, Chee et al., PCT application W095/11995 (Chee et al.), Lockhart, D. J. et al. (1996; Nat. Biotech. 14: 1675-1680) and Schena, M. et al. (1996; Proc. Natl. Acad. Sci. 93: 10614-10619), all of which are 30 incorporated herein in their entirety by reference. In other embodiments, such arrays are produced by the methods described by Brown et al., U.S. Pat. No. 5,807,522. Arrays or microarrays are commonly referred to as “DNA chips”. As used herein, arrays/microarrays may be interchangeably referred to as detection reagents or kits.

[0135] Any number of oligonucleotide probes, such as allele-specific oligonucleotides, may be implemented in an array, wherein each probe or pair of probes corresponds to a different SNP position. The oligonucleotides are synthesized at designated areas on a substrate using a light-directed chemical process. The substrate may be paper, nylon or other type of membrane, filter, chip, glass slide or any other suitable solid support.

[0136] Hybridization assays based on oligonucleotide arrays rely on the differences in hybridization stability of short oligonucleotides probes to perfectly matched and mismatched target sequence variants. Efficient access to polymorphism information is obtained through a basic structure comprising high-density arrays of oligonucleotide probes attached to a solid support (e.g., a chip) at selected positions. Each DNA chip can contain thousands to millions of individual synthetic DNA probes arranged in a grid-like pattern and miniaturized to the size of a dime, each corresponding to a particular SNP position or allelic variant. Preferably, probes are attached to a solid support in an ordered, addressable array.

[0137] The array/chip technology has already been applied with success in numerous cases. For example, the screening of mutations has been undertaken in the BRCA1 gene, in S. cerevisiae mutant strains, and in the protease gene of HIV-I virus (Hacia et al., 1996; Shoemaker et al., 1996 ; Kozal et al., 1996). Chips of various formats for use in detecting SNPs can be produced on a customized basis.

[0138] An array-based tiling strategy useful for detecting SNPs is described in EP 785280. Briefly, arrays may generally be “tiled” for a large number of specific polymorphisms. “Tiling” refers to the synthesis of a defined set of oligonucleotide probes that are made up of a sequence complementary to the target sequence of interest, as well as preselected variations of that sequence, e.g., substitution of one or more given positions with one or more members of the basis set of monomers, i.e. nucleotides. Tiling strategies are further described in PCT application No. WO 95/11995. In a particular aspect, arrays are tiled for a number of specific SNPs. In particular, the array is tiled to include a number of detection blocks, each detection block being specific for a specific SNP or a set of SNPs. For example, a detection block may be tiled to include a number of probes that span the sequence segment that includes a specific SNP. To ensure probes that are complementary to each allele, the probes are synthesized in pairs differing at the SNP position. In addition to the probes differing at the SNP position, monosubstituted probes are also generally tiled within the detection block. Such methods can readily be applied to the SNP information disclosed herein.

[0139] These monosubstituted probes have bases at and up to a certain number of bases in either direction from the polymorphism, substituted with the remaining nucleotides (selected from A, T, G, C and U). Typically the probes in a tiled detection block will include substitutions of the sequence positions up to and including those that are 5 bases away from the SNP. The monosubstituted probes provide internal controls for the tiled array, to distinguish actual hybridization from artefactual cross-hybridization. Upon completion of hybridization with the target sequence and washing of the array, the array is scanned to determine the position on the array to which the target sequence hybridizes. The hybridization data from the scanned array is then analyzed to identify which allele or alleles of the SNP are present in the sample. Hybridization and scanning may be carried out as described in PCT application No. WO 92/10092 and WO 95/11995 and U.S. Pat. No.5,424,186.

[0140] Thus, in some embodiments, the chips may comprise an array of nucleic acid sequences of fragments of about 15 nucleotides in length. In further embodiments, the chip may comprise an array including at least one of the sequences selected from the group consisting of those disclosed in Table 1 and the Sequence Listing, and the sequences complementary thereto, or a fragment thereof, said fragment comprising at least about 8 consecutive nucleotides, preferably 10, 15, 20, more preferably 25, 30, 40, 47, or 50 consecutive nucleotides and containing a polymorphic base. In some embodiments the polymorphic base is within 5, 4, 3, 2, or 1 nucleotides from the center of the polynucleotide, more preferably at the center of said polynucleotide. In other embodiments, the chip may comprise an array containing any number of polynucleotides of the present invention.

[0141] An oligonucleotide may be synthesized on the surface of the substrate by using a chemical coupling procedure and an ink jet application apparatus, as described in PCT application W095/251116 (Baldeschweiler et al.) which is incorporated herein in its entirety by reference. In another aspect, a “gridded” array analogous to a dot (or slot) blot may be used to arrange and link cDNA fragments or oligonucleotides to the surface of a substrate using a vacuum system, thermal, UV, mechanical or chemical bonding procedures. An array, such as those described above, may be produced by hand or by using available devices (slot blot or dot blot apparatus), materials (any suitable solid support), and machines (including robotic instruments), and may contain 8, 24, 96, 384, 1536, 6144 or more oligonucleotides, or any other number which lends itself to the efficient use of commercially available instrumentation.

[0142] Using such arrays, the present invention provides methods of identifying the SNPs of the present invention in a sample. Such methods comprise incubating a test sample with an array comprising one or more oligonucleotide probes corresponding to at least one SNP position of the present invention, and assaying for binding of a nucleic acid from the test sample with one or more of the oligonucleotide probes. Such assays will typically involve arrays comprising oligonucleotides probes corresponding to many SNP positions and/or allelic variants of those SNP positions, at least one of which is a SNP of the present invention.

[0143] Conditions for incubating a nucleic acid molecule with a test sample vary. Incubation conditions depend on the format employed in the assay, the detection methods employed, and the type and nature of the nucleic acid molecule used in the assay. One skilled in the art will recognize that any one of the commonly available hybridization, amplification or array assay formats can readily be adapted to employ the novel SNPs disclosed herein. Examples of such assays can be found in Chard, T, An Introduction to Radioimmunoassay and Related Techniques, Elsevier Science Publishers, Amsterdam, The Netherlands (1986); Bullock, G. R. et al., Techniques in Immunocytochemistry, Academic Press, Orlando, Fla. Vol. 1 (1 982), Vol. 2 (1983), Vol. 3 (1985); Tijssen, P., Practice and Theory of Enzyme Immunoassays: Laboratory Techniques in Biochemistry and Molecular Biology, Elsevier Science Publishers, Amsterdam, The Netherlands (1985).

[0144] The test samples of the present invention include, but are not limited to, nucleic acid extracts, cells, and protein or membrane extracts from cells, which may be obtained from any bodily fluids (such as blood, urine, saliva, phlegm, gastric juices, etc.), cultured cells, biopsies, or other tissue preparations. The test sample used in the above-described methods will vary based on the assay format, nature of the detection method and the tissues, cells or extracts used as the sample to be assayed. Methods of preparing nucleic acid, protein, or cell extracts are well known in the art and can be readily be adapted in order to obtain a sample that is compatible with the system utilized.

[0145] Multicomponent integrated systems, such as microfluidic-based systems or “lab on a chip” systems, are an exemplary type of kit provided by the present invention for analyzing SNPs. Such systems miniaturize and compartmentalize processes such as PCR and capillary electrophoresis reactions in a single functional device. An example of such technique is disclosed in U.S. Pat. No. 5,589,136, which describes the integration of PCR amplification and capillary electrophoresis in chips.

[0146] Integrated systems can be envisaged mainly when microfluidic systems are used. These systems comprise a pattern of microchannels designed onto a glass, silicon, quartz, or plastic wafer included on a microchip. The movements of the samples are controlled by electric, electroosmotic or hydrostatic forces applied across different areas of the microchip to create functional microscopic valves and pumps with no moving parts. Varying the voltage controls the liquid flow at intersections between the micro-machined channels and changes the liquid flow rate for pumping across different sections of the microchip. In such a system, the containers/compartments of the kit may be embodied as chambers and/or channels of the microfluidic system.

[0147] For genotyping SNPs, the microfluidic system may integrate, for example, nucleic acid amplification, minisequencing primer extension, capillary electrophoresis, and a detection method such as laser induced fluorescence detection.

[0148] In a first step, the DNA samples are amplified, preferably by PCR. Then, the amplification products are subjected to automated minisequencing reactions using ddNTPs (specific fluorescence for each ddNTP) and the appropriate oligonucleotide minisequencing primers which hybridize just upstream of the targeted polymorphic base. Once the extension at the 3′ end is completed, the primers are separated from the unincorporated fluorescent ddNTPs by capillary electrophoresis. The separation medium used in capillary electrophoresis can be, for example, polyacrylamide, polyethyleneglycol or dextran. The incorporated ddNTPs in the single nucleotide primer extension products are identified by laser-induced fluorescence detection. This microchip can be used to process at least 96 to 384 samples, or more, in parallel.

[0149] Vectors/Host Cells

[0150] The invention also provides vectors containing the SNP-containing nucleic acid molecules described herein. The term “vector” refers to a vehicle, preferably a nucleic acid molecule, that can transport the SNP-containing nucleic acid molecules. When the vector is a nucleic acid molecule, the SNP-containing nucleic acid molecules are covalently linked to the vector nucleic acid. With this aspect of the invention, the vector includes a plasmid, single or double stranded phage, a single or double stranded RNA or DNA viral vector, or artificial chromosome, such as a BAC, PAC, YAC, OR MAC.

[0151] A vector can be maintained in the host cell as an extrachromosomal element where it replicates and produces additional copies of the SNP-containing nucleic acid molecules. Alternatively, the vector may integrate into the host cell genome and produce additional copies of the SNP-containing nucleic acid molecules when the host cell replicates.

[0152] The invention provides vectors for the maintenance (cloning vectors) or vectors for expression (expression vectors) of the SNP-containing nucleic acid molecules. The vectors can function in procaryotic or eukaryotic cells or in both (shuttle vectors).

[0153] Expression vectors contain cis-acting regulatory regions that are operably linked in the vector to the SNP-containing nucleic acid molecules such that transcription of the SNP-containing nucleic acid molecules is allowed in a host cell. The SNP-containing nucleic acid molecules can be introduced into the host cell with a separate nucleic acid molecule capable of affecting transcription. Thus, the second nucleic acid molecule may provide a trans-acting factor interacting with the cis-regulatory control region to allow transcription of the SNP-containing nucleic acid molecules from the vector. Alternatively, a trans-acting factor may be supplied by the host cell. Finally, a trans-acting factor can be produced from the vector itself. It is understood, however, that in some embodiments, transcription and/or translation of the nucleic acid molecules can occur in a cell-free system.

[0154] The regulatory sequence to which the SNP-containing nucleic acid molecules described herein can be operably linked include promoters for directing mRNA transcription. These include, but are not limited to, the left promoter from bacteriophage λ, the lac, TRP, and TAC promoters from E. coli, the early and late promoters from SV40, the CMV immediate early promoter, the adenovirus early and late promoters, and retrovirus long-terminal repeats.

[0155] In addition to control regions that promote transcription, expression vectors may also include regions that modulate transcription, such as repressor binding sites and enhancers. Examples include the SV40 enhancer, the cytomegalovirus immediate early enhancer, polyoma enhancer, adenovirus enhancers, and retrovirus LTR enhancers.

[0156] In addition to containing sites for transcription initiation and control, expression vectors can also contain sequences necessary for transcription termination and, in the transcribed region a ribosome binding site for translation. Other regulatory control elements for expression include initiation and termination codons as well as polyadenylation signals. The person of ordinary skill in the art would be aware of the numerous regulatory sequences that are useful in expression vectors. Such regulatory sequences are described, for example, in Sambrook et al., Molecular Cloning: A Laboratory Manual. 2nd. ed., Cold Spring Harbor Laboratory Press, Cold Spring Harbor, N.Y., (1989).

[0157] A variety of expression vectors can be used to express a SNP-containing nucleic acid molecule. Such vectors include chromosomal, episomal, and virus-derived vectors, for example vectors derived from bacterial plasmids, from bacteriophage, from yeast episomes, from yeast chromosomal elements, including yeast artificial chromosomes, from viruses such as baculoviruses, papovaviruses such as SV40, Vaccinia viruses, adenoviruses, poxviruses, pseudorabies viruses, and retroviruses. Vectors may also be derived from combinations of these sources such as those derived from plasmid and bacteriophage genetic elements, eg. cosmids and phagemids. Appropriate cloning and expression vectors for prokaryotic and eukaryotic hosts are described in Sambrook et al., Molecular Cloning: A Laboratory Manual. 2nd. ed., Cold Spring Harbor Laboratory Press, Cold Spring Harbor, N.Y., (1989).

[0158] The regulatory sequence may provide constitutive expression in one or more host cells (i.e. tissue specific) or may provide for inducible expression in one or more cell types such as by temperature, nutrient additive, or exogenous factor such as a hormone or other ligand. A variety of vectors that provide constitutive and inducible expression in prokaryotic and eukaryotic hosts are well known to those of ordinary skill in the art.

[0159] The SNP-containing nucleic acid molecules can be inserted into the vector nucleic acid by well-known methodology. Generally, the DNA sequence containing the SNP position that will ultimately be expressed is joined to an expression vector by cleaving the DNA sequence and the expression vector with one or more restriction enzymes and then ligating the fragments together. Procedures for restriction enzyme digestion and ligation are well known to those of ordinary skill in the art.

[0160] The vector containing the appropriate nucleic acid molecule can be introduced into an appropriate host cell for propagation or expression using well-known techniques. Bacterial cells include, but are not limited to, E. coli, Streptomyces, and Salmonella typhimurium. Eukaryotic cells include, but are not limited to, yeast, insect cells such as Drosophila, animal cells such as COS and CHO cells, and plant cells.

[0161] As described herein, it may be desirable to express the variant peptide as a fusion protein. Accordingly, the invention provides fusion vectors that allow for the production of the variant peptides. Fusion vectors can increase the expression of a recombinant protein, increase the solubility of the recombinant protein, and aid in the purification of the protein by acting, for example, as a ligand for affinity purification. A proteolytic cleavage site may be introduced at the junction of the fusion moiety so that the desired variant peptide can ultimately be separated from the fusion moiety. Proteolytic enzymes include, but are not limited to, factor Xa, thrombin, and enterokinase. Typical fusion expression vectors include pGEX (Smith et al., Gene 67:31-40 (1988)), pMAL (New England Biolabs, Beverly, Mass.) and pRIT5 (Pharmacia, Piscataway, N.J.) which fuse glutathione S-transferase (GST), maltose E binding protein, or protein A, respectively, to the target recombinant protein. Examples of suitable inducible non-fusion E. coli expression vectors include pTrc (Amann et al., Gene 69:301-315 (1988)) and pET 11d (Studier et al., Gene Expression Technology: Methods in Enzymology 185:60-89 (1990)).

[0162] Recombinant protein expression can be maximized in a host bacteria by providing a genetic background wherein the host cell has an impaired capacity to proteolytically cleave the recombinant protein. (Gottesman, S., Gene Expression Technology: Methods in Enzymology 185, Academic Press, San Diego, Calif. (1990)119-128). Alternatively, the sequence of the SNP-containing nucleic acid molecule of interest can be altered to provide preferential codon usage for a specific host cell, for example E. coli. (Wada et al., Nucleic Acids Res. 20:2111-2118 (1992)).

[0163] The SNP-containing nucleic acid molecules can also be expressed by expression vectors that are operative in yeast. Examples of vectors for expression in yeast e.g., S. cerevisiae include pYepSec1 (Baldari, et al., EMBO J. 6:229-234 (1987)), pMFa (Kuijan et al., Cell 30:933-943(1982)), pJRY88 (Schultz et al., Gene 54:113-123 (1987)), and pYES2 (Invitrogen Corporation, San Diego, Calif.).

[0164] The SNP-containing nucleic acid molecules can also be expressed in insect cells using, for example, baculovirus expression vectors. Baculovirus vectors available for expression of proteins in cultured insect cells (e.g., Sf9 cells) include the pAc series (Smith et al., Mol. Cell Biol. 3:2156-2165 (1983)) and the pVL series (Lucklow et al., Virology 170:31-39 (1989)).

[0165] In certain embodiments of the invention, the SNP-containing nucleic acid molecules described herein are expressed in mammalian cells using mammalian expression vectors. Examples of mammalian expression vectors include pCDM8 (Seed, B. Nature 329:840(1987)) and pMT2PC (Kaufman et al., EMBO J. 6:187-195 (1987)).

[0166] The expression vectors listed herein are provided by way of example only of the well-known vectors available to those of ordinary skill in the art that would be useful to express the SNP-containing nucleic acid molecules. The person of ordinary skill in the art would be aware of other vectors suitable for maintenance propagation or expression of the SNP-containing nucleic acid molecules described herein. These are found for example in Sambrook, J., Fritsh, E. F., and Maniatis, T. Molecular Cloning: A Laboratory Manual. 2nd, ed., Cold Spring Harbor Laboratory, Cold Spring Harbor Laboratory Press, Cold Spring Harbor, N.Y., 1989.

[0167] The invention also encompasses vectors in which the SNP-containing nucleic acid sequences described herein are cloned into the vector in reverse orientation, but operably linked to a regulatory sequence that permits transcription of antisense RNA. Thus, an antisense transcript can be produced to the SNP-containing nucleic acid molecule sequences described herein, including both coding and non-coding regions. Expression of this antisense RNA is subject to each of the parameters described above in relation to expression of the sense RNA (regulatory sequences, constitutive or inducible expression, tissue-specific expression).

[0168] The invention also relates to recombinant host cells containing the vectors described herein. Host cells therefore include prokaryotic cells, lower eukaryotic cells such as yeast, other eukaryotic cells such as insect cells, and higher eukaryotic cells such as mammalian cells.

[0169] The recombinant host cells are prepared by introducing the vector constructs described herein into the cells by techniques readily available to the person of ordinary skill in the art. These include, but are not limited to, calcium phosphate transfection, DEAE-dextran-mediated transfection, cationic lipid-mediated transfection, electroporation, transduction, infection, lipofection, and other techniques such as those found in Sambrook, et al. (Molecular Cloning: A Laboratory Manual. 2nd, ed., Cold Spring Harbor Laboratory, Cold Spring Harbor Laboratory Press, Cold Spring Harbor, N.Y., 1989).

[0170] Host cells can contain more than one vector. Thus, different SNP-containing nucleotide sequences can be introduced on different vectors of the same cell. Similarly, the SNP-containing nucleic acid molecules can be introduced either alone or with other nucleic acid molecules that are not related to the SNP-containing nucleic acid molecules such as those providing trans-acting factors for expression vectors. When more than one vector is introduced into a cell, the vectors can be introduced independently, co-introduced or joined to the nucleic acid molecule vector.

[0171] In the case of bacteriophage and viral vectors, these can be introduced into cells as packaged or encapsulated virus by standard procedures for infection and transduction. Viral vectors can be replication-competent or replication-defective. In the case in which viral replication is defective, replication will occur in host cells providing functions that complement the defects.

[0172] Vectors generally include selectable markers that enable the selection of the subpopulation of cells that contain the recombinant vector constructs. The marker can be contained in the same vector that contains the SNP-containing nucleic acid molecules described herein or may be on a separate vector. Markers include tetracycline or ampicillin-resistance genes for prokaryotic host cells and dihydrofolate reductase or neomycin resistance for eukaryotic host cells. However, any marker that provides selection for a phenotypic trait will be effective.

[0173] While the mature variant proteins can be produced in bacteria, yeast, mammalian cells, and other cells under the control of the appropriate regulatory sequences, cell-free transcription and translation systems can also be used to produce these variant proteins using RNA derived from the DNA constructs described herein.

[0174] It is also understood that, depending upon the host cell in which recombinant production of the variant peptides described herein occurs, the variant peptides can have various glycosylation patterns, depending upon the cell, or maybe non-glycosylated as when produced in bacteria. In addition, the variant peptides may include an initial modified methionine in some cases as a result of a host-mediated process.

[0175] Uses of SNP Detection Reagents

[0176] SNP Genotyiping

[0177] The process of determining which nucleotide(s) is/are present at one or more of the SNP positions disclosed in Table 1 and the Sequence Listing is referred to by such terms as SNP genotyping, SNP haplotyping, SNP typing, SNP scoring, SNP assaying, SNP profiling, SNP identification, and SNP screening. The invention provides methods for detecting which nucleotide is present at the SNP positions provided by the present invention, such as for use in screening for or treating a type II diabetes and obesity condition, or susceptibility thereto, associated with the SNPs of the present invention, or in genome mapping.

[0178] After a SNP position has been identified in a specific DNA sequence (as shown in Table 1 and the Sequence Listing), DNA samples can be genotyped to determine which allele is present at that SNP position. The neighboring sequence can be used to design a SNP detection reagent/kit. Preferred SNP genotyping methods include, but are not limited to, TaqMan, oligonucleotide arrays, and mass spectrometry (Mass Spec). Further, various primer extension strategies are known in the art and can be utilized in combination with Mass Spec or other approaches.

[0179] The TaqMan assay, also known as the 5′ nuclease PCR assay, provides a sensitive and rapid means of genotyping SNPs. The TaqMan assay detects the accumulation of a specific amplified product during PCR. The TaqMan assay utilizes an oligonucleotide probe labeled with a fluorescent reporter dye at the 5′ end of the probe and a quencher dye at the 3′ end of the probe. The proximity of the quencher to the reporter in the intact probe maintains a reduced fluorescence for the reporter. During the PCR reaction, the 5′ nuclease activity of DNA polymerase cleaves the probe, thereby separating the reporter dye and the quencher dye and resulting in increased fluorescence of the reporter. Accumulation of PCR product is detected directly by monitoring the increase in fluorescence of the reporter dye. The 5′ nuclease activity of DNA polymerase cleaves the probe between the reporter and the quencher only if the probe hybridizes to the target and is amplified during PCR. The probe is designed to straddle a target SNP position and hybridize to the nucleic acid molecule only if a particular SNP allele is present.

[0180] Preferred TaqMan primer and probe sequences can readily be determined using the nucleic acid information provided herein. A number of computer programs, such as Primer-Express, can be readily used to obtain optimal primer/probe sets. It will be apparent to one of skill in the art that the primers and probes based on the nucleic acid information provided herein are useful as diagnostic probes or amplification primers for screening for SNPs of the present invention, and can be incorporated into a kit format.

[0181] Another method used for SNP typing is based on mass spectrometry. Mass spectrometry (“mass spec”) takes advantage of the unique mass of each of the four nucleotides of DNA. SNPs can be unambiguously genotyped by mass spectrometry by measuring the differences in the mass of nucleic acids having alternate SNP alleles. MALDI-TOF (Matrix Assisted Laser Desorption Ionization—Time of Flight) mass spectrometry technology is preferred for extremely precise determinations of molecular mass, such as SNPs. Numerous approaches to SNP analysis have been developed based on mass spectrometry. A preferred mass spectrometry based method of SNP analysis is mini-sequencing primer extension, which can also be utilized in combination with other approaches, such as traditional gel-based formats and microarrays.

[0182] The mini-sequencing primer extension reaction involves designing and annealing a primer to a template PCR amplicon downstream from a target SNP position. A mix of dideoxynucleotide triphosphates (ddNTPs) and/or deoxynucleotide triphosphates (dNTPSs) are added to a reaction mixture containing PCR template, primer, and DNA polymerase. Extension of the primer terminates at the first position in the PCR template where a nucleotide complementary to one of the ddNTPs in the mix occurs. The primer can be either immediately 3′ or several nucleotides removed from the SNP position. If the primer is several nucleotides removed from the target SNP, the only limitation is that the template sequence between the 3′ end of the primer and the SNP position can not contain a nucleotide of the same type as the one to be detected, or this will cause premature termination of the extension primer. Alternatively, if all four ddNTPs alone, with no dNTPs, are added to the reaction mixture, the primer will always be extended by only one nucleotide, corresponding to the target SNP position. In this instance, primers are designed to bind one nucleotide downstream from the SNP position. Extension by only one nucleotide is preferable, as it minimizes the overall mass of the extended primer, thereby increasing the resolution of mass differences between alternative SNP nucleotides. Furthermore, mass-tagged dideoxynucleoside triphosphates (ddNTPs) can be employed in the primer extension reactions in place of unmodified ddNTPs. This increases the mass difference between primers extended with these ddNTPs, thereby providing increased sensitivity and accuracy, and is particularly useful for typing heterozygous base positions. Mass-tagging also alleviates the need for intensive sample-preparation procedures and decreases the necessary resolving power of the mass spectrometer.

[0183] The extended primers are then purified and analyzed by MALDI-TOF mass spectrometry to determine the identity of the nucleotide present at the SNP position. In one method of analysis, the products from the primer extension reaction are combined with light absorbing crystals that form a matrix. The matrix is then hit with an energy source such as a laser to ionize and desorb the nucleic acid molecules into the gas-phase. The ionized molecules are then ejected into a flight tube and accelerated down the tube towards a detector. The time between the ionization event, such as a laser pulse, and collision of the molecule with the detector is the time of flight of that molecule. The time of flight is precisely correlated with the mass-to-charge ratio (m/z) of the ionized molecule. Ions with smaller mass-to-charge ratios travel down the tube faster than ions with larger m/z and therefore the lighter ions reach the detector before the heavier ions. The time-of-flight is then converted into a corresponding, and highly precise, m/z. In this manner, SNPs can be identified based on the slight differences in mass, and the corresponding time of flight differences, inherent in nucleic acid molecules having different nucleotides at a single base position.

[0184] SNPs can also be scored by direct DNA sequencing. A variety of automated sequencing procedures can be utilized when performing the diagnostic assays ((1995) Biotechniques 19:448), including sequencing by mass spectrometry (see, e.g., PCT International Publication No. WO 94/16101; Cohen et al., Adv. Chromatogr. 36:127-162 (1996); and Griffin et al., Appl. Biochem. Biotechnol. 38:147-159 (1993)).

[0185] Further examples of methods that can be used to screen for the SNPs of the present invention include single-strand conformational polymorphism (SSCP), and denaturing gradient gel electrophoresis (DGGE) (Myers et al., Nature 313:495 (1985)). SSCP identifies base differences by alteration in electrophoretic migration of single stranded PCR products, as described in Orita et al., Proc. Nat. Acad. Single stranded PCR products can be generated by heating or otherwise denaturing double stranded PCR products. Single-stranded nucleic acids may refold or form secondary structures that are partially dependent on the base sequence. The different electrophoretic mobilities of single-stranded amplification products are related to base-sequence differences at SNP positions. DGGE differentiates SNP alleles based on the different sequence-dependent stabilities and melting properties inherent in polymorphic DNA and the corresponding differences in electrophoretic migration patterns in a denaturing gradient gel. (Erlich, ed., PCR Technology, Principles and Applications for DNA Amplification, (W.H.

[0186] Freeman and Co, New York, 1992), Chapter 7).

[0187] Sequence-specific ribozymes (U.S. Pat. No. 5,498,531) can be used to score SNPs based on the development or loss of a ribozyme cleavage site. Perfectly matched sequences can be distinguished from mismatched sequences by nuclease cleavage digestion assays or by differences in melting temperature. If the SNP affects a restriction enzyme cleavage site, the SNP can be identified by alterations in restriction enzyme digestion patterns, and the corresponding changes in nucleic acid fragment lengths determined by gel electrophoresis

[0188] In scoring SNPs, genomic DNA can be analyzed directly or can be amplified using PCR prior to analysis. RNA or cDNA can be used in the same way. In some uses, detection of the SNP involves the use of a probe/primer in a polymerase chain reaction (PCR) (see, e.g. U.S. Pat. Nos. 4,683,195 and 4,683,202) or ligase chain reaction (LCR) (see, e.g., Landegran et al., Science 241:1077-1080 (1988); Nakazawa et al., PNAS 91:360-364 (1994); and Abravaya et al., Nucleic Acids Res. 23:675-682 (1995); Barany, F., Proc. Natl. Acad. Sci. (U.S.A.) 88, 189-193 (1991)). Southern and Northern blot analysis can also be utilized for nucleic acid analysis.

[0189] SNP genotyping can include the steps of collecting a sample of cells from a patient, isolating nucleic acid (e.g., genomic, mRNA or both) from the cells of the sample, contacting the nucleic acid sample with one or more primers which specifically hybridize to a region of the isolated nucleic acid containing a target SNP under conditions such that hybridization and amplification of the gene occurs, and determining the nucleotide present at the SNP position, or, in some instances, detecting the presence or absence of an amplification product.

[0190] SNP Genotyping and Association

[0191] Association, or correlation, of particular SNP genotypes with a particular phenotype is performed for a population of individuals who have been tested for the presence or absence of a phenotypic trait of interest and for SNP marker sets (e.g., one or more of the SNPs disclosed in Table 1 and the Sequence Listing). To perform such analysis, the presence or absence of a set of polymorphisms (i.e. a polymorphic set) is determined for a set of the individuals, some of whom exhibit a particular trait, and some of whom exhibit lack of the trait. The alleles of each polymorphism of the set are then reviewed to determine whether the presence or absence of a particular allele is associated with the trait of interest. Correlation can be performed by standard statistical methods such as a chi-squared test and statistically significant correlations between polymorphic form(s) and phenotypic characteristics are noted. For example, it might be found that the presence of allele A1 at SNP position A correlates with heart disease. As a further example, it might be found that the combined presence of allele A1 at SNP position A and allele B1 at SNP position B correlates with increased susceptibility to type II diabetes and obesity.

[0192] Such correlation can be exploited in several ways. For example, in the case of a strong correlation between a set of one or more polymorphic forms and a disease for which treatment is available, detection of the polymorphic form set in a patient may justify immediate administration of treatment, or at least the institution of regular monitoring of the patient. Detection of a polymorphic form correlated with serious disease in a couple contemplating a family may also be valuable to the couple in their reproductive decisions. For example, the female partner might elect to undergo in vitro fertilization to avoid the possibility of transmitting such a polymorphism from her husband to her offspring. In the case of a weaker, but still statistically significant correlation between a polymorphic set and human disease, immediate therapeutic intervention or monitoring may not be justified. Nevertheless, the patient can be motivated to begin simple life-style changes (e.g., diet, exercise) that can be accomplished at little cost to the patient but confer potential benefits in reducing the risk of conditions to which the patient may have increased susceptibility by virtue of variant alleles.

[0193] Uses of SNP Genotypes

[0194] After determining which alleles are present in an individual at one or more SNP positions, or which alleles are present at one or more SNP positions in many individuals of a population, this information can be used in a number of methods, as described below. Examples of such methods include disease susceptibility screening, disease diagnosis, individualizing drug therapy based on an individual's genotype (“pharmacogenomics”), developing drugs based on a greater understanding of SNPs associated with a disease, human identification applications such as forensics, and grouping SNPs into haplotype groups.

[0195] For example, the SNP information provided by the present invention, particularly the mapping of each SNP to a precise nucleotide position in the human genome, provides the basis for haplotyping projects. For example, the information provided herein enables the SNPs of the present invention to be readily genotyped in multiple individuals, who may optionally represent diverse racial/ethnic groups, in order to classify groups of SNPs that are generally inherited together into haplotypes. Such haplotypes can further be studied for correlations with diseases or other phenotypic effects. See, for example, Stephens et al. (Science 293, 489-493, 20 Jul. 2001) for further information regarding SNP haplotypes.

[0196] Disease Susceptibility Screening/Diagnosis

[0197] The polymorphisms of the invention may contribute to the phenotype, for example, a disease condition such as type II diabetes and obesity, of an individual in different ways. Some polymorphisms occur within a protein coding sequence and contribute to phenotype by affecting protein structure. Other polymorphisms occur in noncoding regions but may exert phenotypic effects indirectly via influence on replication, transcription, and translation. A single polymorphism may affect more than one phenotypic trait. Likewise, a single phenotypic trait may be affected by polymorphisms in different genes.

[0198] The contribution or association of particular SNPs with disease phenotypes, such as type II diabetes and obesity, enables the SNPs of the present invention to be used to develop superior diagnostic tests capable of identifying individuals who express a detectable trait, such as type II diabetes and obesity, as the result of a specific genotype or individuals whose genotype places them at risk of developing a detectable trait at a subsequent time. As described herein, the diagnostics may be based on a single SNP or a group of SNPs. Combined detection of a plurality of SNPs (for example, 2, 5, 10, 20 or more of the SNPs provided in Table 1 and the Sequence Listing) typically increases the probability of an accurate diagnosis. For example, the presence of a single polymorphic form known to correlate with type II diabetes and obesity might indicate a probability of 20% that an individual has or is susceptible to type II diabetes and obesity, whereas detection of five polymorphic forms, each of which correlates with type II diabetes and obesity, might indicate a probability of 80% that an individual has or is susceptible to type II diabetes and obesity. To further increase the accuracy of diagnosis or susceptibility screening, analysis of the SNPs of the present invention can be combined with that of other polymorphisms or other risk factors of type II diabetes and obesity, such as family history, diet, or lifestyle factors.

[0199] It will of course be understood by practitioners skilled in the treatment or diagnosis of type II diabetes and obesity that the present invention does not intend to provide an absolute identification of individuals who could be at risk of developing a particular disease such as type II diabetes and obesity and disorders related to type II diabetes and obesity but rather to indicate a certain degree or likelihood of developing a disease. However, this information is extremely valuable as it can, in certain circumstances, be used to initiate preventive treatments or to allow an individual carrying a significant haplotype to foresee warning signs such as minor symptoms. In diseases in which attacks may be extremely violent and sometimes fatal if not treated on time, the knowledge of a potential predisposition, even if this predisposition is not absolute, might contribute in a very significant manner to treatment efficacy.

[0200] The diagnostic techniques of the present invention may employ a variety of methodologies to determine whether a test subject has a SNP pattern associated with an increased risk of developing a detectable trait or whether the individual suffers from a detectable trait as a result of a particular mutation, including methods which enable the analysis of individual chromosomes for haplotyping, such as family studies, single sperm DNA analysis or somatic hybrids. The trait analyzed using the present diagnostics may be any detectable trait, including pathologies and disorders related to type II diabetes and obesity.

[0201] Another aspect of the present invention relates to a method of determining whether an individual is at risk of developing a trait or whether an individual expresses a trait as a consequence of possessing a particular trait-causing allele. The present invention relates to a method of determining whether an individual is at risk of developing a plurality of traits or whether an individual expresses a plurality of traits as a result of possessing a particular trait causing allele. These methods involve obtaining a nucleic acid sample from the individual and determining whether the nucleic acid sample contains one or more alleles of one or more SNPs indicative of a risk of developing the trait or indicative that the individual expresses the trait as a result of possessing a particular trait-causing allele.

[0202] In another embodiment, the agents of the present invention are used to determine whether an individual has a SNP affecting the level (i.e., the concentration of mRNA or protein in a sample, etc.) or pattern (i.e., the kinetics of expression, rate of decomposition, stability profile, Km, Vmax, etc.) of gene expression (collectively, the “gene response” of a cell or bodily fluid) (for example, a SNP in a gene, or in a regulatory region(s) or other gene(s) that control or affect the expression of the gene). Such an analysis of gene expression can be conducted by screening. for mRNA corresponding to the SNP-containing gene or variant peptides encoded thereby.

[0203] Therapies/Pharmacogenomics/Drug Development

[0204] The invention provides methods for assessing the pharmacogenomic susceptibility of a subject harboring a particular SNP, or SNP haplotype, of the present invention to a particular pharmaceutical compound, or to a class of such compounds. Pharmacogenomics deals with clinically significant hereditary variations, such as SNPs, in the response to drugs due to altered drug disposition and abnormal action in affected persons. See, e.g., Roses, Nature 405, 857-865 (2000); Gould Rothberg, Nature Biotechnology 19, 209-211 (2001); Eichelbaum, Clin. Exp. Pharmacol. Physiol. 23(10-11):983-985 (1996); and Linder, Clin. Chem. 43(2):254-266 (1997). The clinical outcomes of these variations result in severe toxicity of therapeutic drugs in certain individuals or therapeutic failure of drugs in certain individuals as a result of individual variation in metabolism. Thus, the SNP genotype of an individual can determine the way a therapeutic compound acts on the body or the way the body metabolizes the compound. Further, the activity of drug metabolizing enzymes affects both the intensity and duration of drug action.

[0205] The discovery of SNPs in drug metabolizing enzymes, drug transporters, proteins for pharmaceutical agents, and other drug targets has explained why some patients do not obtain the expected drug effects, show an exaggerated drug effect, or experience serious toxicity from standard drug dosages. SNPs can be expressed in the phenotype of the extensive metabolizer and in the phenotype of the poor metabolizer. Accordingly, SNPs may lead to allelic protein variants of a protein in which one or more of the protein functions in one population is different from those in another population. The SNPs and corresponding variant peptides thus provide a target to ascertain a genetic predisposition that can affect treatment modality. Thus, in a ligand-based treatment, SNPs may give rise to amino terminal extracellular domains and/or other ligand-binding regions that are more or less active in ligand binding, and protein activation. Accordingly, ligand dosage would necessarily be modified to maximize the therapeutic effect within a given population containing a SNP/haplotype. As an alternative to genotyping, specific variant peptides containing variant amino acids encoded by the SNPs could be identified. Thus, pharmacogenomic characterization of an individual permits the selection of effective compounds and effective dosages of such compounds for prophylactic or therapeutic treatment based on the individual's SNP genotype, thereby enhancing and optimizing the therapeutic effectiveness of the therapy. Furthermore, the production of recombinant cells and transgenic animals containing these SNPs/haplotypes allow effective clinical design of treatment compounds and dosage regimens. For example, transgenic animals can be produced that differ only in specific SNP alleles in a gene that is orthologous to a human disease susceptibility gene.

[0206] Pharmacogenomic uses of the SNPs of the present invention provide several significant advantages for patient care, particularly in treating type II diabetes and obesity. Pharmacogenomic characterization of an individual, based on an individual's SNP genotype, identifies those individuals unlikely to respond to treatment with a particular medication and thereby allows doctors to avoid prescribing the medication to those individuals. SNP genotyping of an individual thereby enables doctors to select the appropriate medication and dosage regimen that will be most effective based on an individual's SNP genotype. This increases doctor's confidence in prescribing medications and motivates patients to comply with their drug regimens. Furthermore, pharmacogenomics will identify patients predisposed to toxicity and adverse reactions to particular drugs or drug dosages. Adverse drug reactions lead to more than 100,000 avoidable deaths per year in the United States alone and therefore represent a significant cause of hospitalization and death, as well as a significant economic burden on the healthcare system (Pfost et. al., Trends in Biotechnology, August 2000.). Thus pharmacogenomics has the potential to both save lives and reduce costs substantially.

[0207] A subject suffering from a pathological condition, such as type II diabetes and obesity, ascribed to a SNP may be treated so as to correct the genetic defect. (See Kren et al., Proc. Natl. Acad. Sci. USA 96:10349-10354 (1999)). Such a subject is identified by any method that can detect the polymorphism in a sample drawn from the subject. Such a genetic defect may be permanently corrected by administering to such a subject a nucleic acid fragment incorporating a repair sequence that supplies the wild-type nucleotide at the position of the SNP. This site-specific repair sequence encompasses an RNA/DNA oligonucleotide which operates to promote endogenous repair of a subject's genomic DNA. The site-specific repair sequence is administered in an appropriate vehicle, such as a complex with polyethylenimine, encapsulated in anionic liposomes, a viral vector such as an adenovirus, or other pharmaceutical composition that promotes intracellular uptake of the administered nucleic acid. A genetic defect leading to an inborn pathology may then be overcome, as the chimeric oligonucleotides induces incorporation of the wild type sequence into the subject's genome. Upon incorporation, the wild type gene product is expressed, and the replacement is propagated, thereby engendering a permanent repair and therapeutic enhancement of the clinical condition of the subject.

[0208] In cases in which a cSNP leads to a variant protein that is ascribed to be the cause of, or a contributing factor to, a pathological condition, a method of treating such a condition includes administering to a subject experiencing the pathology the wild type cognate of the variant protein. Once administered in an effective dosing regimen, the wild type cognate provides complementation or remediation of the pathological condition.

[0209] The invention further provides a method for identifying a compound that can be used to treat a disorder associated with expression of a variant gene, such as type II diabetes and obesity. The method typically includes assaying the ability of the compound to modulate the activity and/or expression of the SNP-containing nucleic acid and thus identifying a compound that can be used to treat a disorder characterized by undesired activity or expression of the SNP-containing nucleic acid. The assays can be performed in cell-based and cell-free systems. Cell-based assays include cells naturally expressing the SNP-containing nucleic acid molecule or recombinant cells genetically engineered to express the SNP-containing nucleic acid sequences.

[0210] The assay for variant nucleic acid expression can involve direct assay of nucleic acid levels, such as mRNA levels, or on collateral compounds involved in the signal pathway. Further, the expression of genes that are up- or down regulated in response to the variant protein signal pathway can also be assayed. In this embodiment the regulatory regions of these genes can be operably linked to a reporter gene such as luciferase.

[0211] Thus, modulators of variant gene expression can be identified in a method wherein a cell is contacted with a candidate compound and the expression of mRNA determined. The level of expression of variant mRNA in the presence of the candidate compound is compared to the level of expression of variant mRNA in the absence of the candidate compound. The candidate compound can then be identified as a modulator of SNP-containing nucleic acid expression based on this comparison and be used, for example to treat a disorder characterized by expression of the SNP-containing nucleic acid, such as type II diabetes and obesity. When expression of mRNA is statistically significantly greater in the presence of the candidate compound than in its absence, the candidate compound is identified as a stimulator of nucleic acid expression. When nucleic acid expression is statistically significantly less in the presence of the candidate compound than in its absence, the candidate compound is identified as an inhibitor of nucleic acid expression.

[0212] The invention further provides methods of treatment, with the SNP as a target, using a compound identified through drug screening as a gene modulator to modulate variant nucleic acid expression. Modulation includes both up-regulation (i.e. activation or agonization) or down-regulation (suppression or antagonization) of nucleic acid expression. Alternatively, a modulator of variant nucleic acid expression can be a small molecule or drug identified using the screening assays described herein as long as the drug or small molecule modulates the expression of variant nucleic acid.

[0213] Expression of proteins, either wild type or variant, may be altered in individuals with a particular SNP allele in a control element, such as a promoter, that regulates expression. In this situation, methods of treatment and compounds are identified, as discussed herein, that regulate or overcome the variant control element, thereby generating normal, or healthy, expression levels of either the wild type or variant protein.

[0214] The SNP-containing nucleic acid molecules are useful for monitoring the effectiveness of modulating compounds on the expression or activity of the variant gene in clinical trials or in a treatment regimen. Thus, the gene expression pattern can serve as a barometer for the continuing effectiveness of treatment with the compound, particularly with compounds to which a patient can develop resistance. The gene expression pattern can also serve as a marker indicative of a physiological response of the affected cells to the compound. Accordingly, such monitoring would allow either increased administration of the compound or the administration of alternative compounds to which the patient has not become resistant. Similarly, if the level of nucleic acid expression falls below a desirable level, administration of the compound could be commensurately decreased.

[0215] According to another aspect of the present invention, there is provided a pharmaceutical pack comprising a drug and a set of instructions for administration of the drug to humans diagnostically tested for one or more SNPs provided by the present invention.

[0216] The SNPs of the present invention are useful for improving the process of drug development. Individuals can be selected for clinical trials based on their SNP genotype. Individuals with SNP genotypes that indicate that they are most likely to respond to the drug can be included in the trials and those individuals whose SNP genotypes indicate that they would not respond to the drug, or suffer adverse reactions, can be eliminated from the clinical trials. This not only improves the safety of clinical trials, but also will enhance the chances that the trial will demonstrate statistically significant efficacy. Furthermore, the SNPs of the present invention may help explain why certain, previously developed drugs performed poorly in clinical trials and may help identify a subset of the population that would benefit from a drug that had previously performed poorly in clinical trials, thereby “rescuing” previously developed drugs.

[0217] Human Identification

[0218] In addition to their value related to type II diabetes and obesity and associated pathologies, the SNPs provided by the present invention are also valuable as human identification markers for such applications as forensics and paternity testing. Genetic variations in the nucleic acid sequences between individuals can be used as genetic markers to identify individuals and to associate a biological sample with an individual. Determination of which nucleotides occupy a set of SNP positions in an individual identifies a set of SNP markers that distinguishes the individual. The more SNP positions that are analyzed, the lower the probability that the set of SNPs in one individual is the same as that in an unrelated individual. Preferably, if multiple sites are analyzed, the sites are unlinked. Thus, SNPs of the invention may be used in conjunction with polymorphisms in distal genomic regions.

[0219] SNPs have numerous advantages over other types of polymorphic markers, such as short tandem repeats (STRs), and therefore SNPs are the preferred markers for forensic and human identification applications. SNPs can be easily scored and are amenable to automation, making SNPs the markers of choice for large-scale forensic databases. SNPs are found in much greater abundance throughout the genome than repeat polymorphisms. Population frequencies of two polymorphic forms can usually be determined with greater accuracy than those of multiple polymorphic forms at multi-allelic loci. SNPs are mutationaly more stable than repeat polymorphisms. SNPs are not susceptible to artifacts such as stutter bands that can hinder analysis. Stutter bands are frequently encountered when analyzing repeat polymorphisms, and are particularly troublesome when analyzing samples such as crime scene samples that may contain mixtures of DNA from multiple sources. Another significant advantage of SNP markers over STR markers is the much shorter length of nucleic acid needed to score a SNP. For example, STR markers are generally several hundred base pairs in length. SNPs, on the other hand, comprise a single base pair, and generally a short conserved region on either side of the SNP position for primer and/or probe binding. This makes SNPs more amenable to typing in highly degraded or aged biological samples that are frequently encountered in forensic casework in which DNA may be fragmented into short pieces. SNPs also are not subject to microvariant and “off-ladder” alleles frequently encountered when analyzing STR loci. Microvariants are deletions or insertions within a repeat unit that change the size of the amplified DNA product so that the amplified product does not migrate at the same rate as reference alleles with normal sized repeat units. When separated by size, such as by electrophoresis on a polyacrylamide gel, microvariants do not align with a reference allelic ladder of standard sized repeat units, but rather migrate between the reference alleles. The reference allelic ladder is used for precise sizing of alleles for allele classification; therefore alleles that do not align with the reference allelic ladder lead to substantial analysis problems. Furthermore, when analyzing multi-allelic repeat polymorphisms, occasionally an allele is found that consists of more or less repeat units that has been previously seen in the population. These alleles will migrate outside the size range of known alleles in a reference allelic ladder, and therefore are referred to as “off-ladder” alleles. In extreme cases, the allele may contain so few or so many repeats that it migrates well out of the range of the reference allelic ladder. In this situation, the allele may not even be observed, or, with multiplex analysis, it may migrate within or close to the size range for another locus, further confounding analysis. SNP analysis avoids the problems of microvariants and off-ladder alleles encountered in STR analysis. Importantly, microvariants and off-ladder alleles may provide significant problems, and may be completely missed, when using analysis methods such as oligonucleotide hybridization arrays, which utilize oligonucleotide probes specific for certain known alleles. Furthermore, off-ladder alleles and microvariants encountered with STR analysis, even when correctly typed, may lead to improper statistical analysis, since their frequencies in the population are generally unknown or poorly characterized, thereby the statistical significance of a matching genotype may be questionable. All these advantages are considerable in light of the consequences of most DNA identification cases, which may lead to life imprisonment for an individual, or re-association of remains to the family of a deceased individual.

[0220] DNA can be isolated from biological samples such as blood, bone, hair, saliva, and semen and compared with the DNA from a reference source at particular SNP positions. Multiple SNP markers can be assayed simultaneously in order to increase the power of discrimination and the statistical significance of a matching genotype. For example, oligonucleotide arrays can be used to genotype a large number of SNPs simultaneously. The SNPs provided by the present invention can be assayed in combination with other polymorphic genetic markers, such as other SNPs or short tandem repeats (STRs), in order to identify an individual or to associate an individual with a particular biological sample.

[0221] Furthermore, the SNPs provided by the present invention can be typed for inclusion in a database of DNA genotypes, for example a criminal DNA databank. A genotype obtained from a biological sample of unknown source can then be queried against the database to find a matching genotype, with the SNPs of the present invention providing nucleotide positions at which to compare the known and unknown DNA sequences for identity.

[0222] SNPs of the present invention can also be assayed for use in paternity testing. The object of paternity testing is usually to determine whether a male is the father of a child. In most cases, the mother of the child is known and thus, the mother's contribution to the child's genotype can be traced. Paternity testing investigates whether the part of the child's genotype not attributable to the mother is consistent with that of the putative father. Paternity testing can be performed by analyzing sets of polymorphisms in the putative father and the child. If the set of polymorphisms in the child attributable to the father does not match the set of polymorphisms of the putative father, it can be concluded, barring experimental error, that the putative father is not the real father. If the set of polymorphisms in the child attributable to the father does match the set of polymorphisms of the putative father, a statistical calculation can be performed to determine the probability of coincidental match.

[0223] The uses of the SNPs of the present invention for human identification extends to various authentication systems, commonly referred to as biometric systems. Biometric systems convert physical characteristics of humans (or other organisms) into digital data for precise quantification. Biometric systems include various technological devices that measure such unique anatomical or physiological characteristics as finger, thumb, or palm prints; hand geometry; vein patterning on the back of the hand; blood vessel patterning of the retina and color and texture of the iris; facial characteristics; voice patterns; signature and typing dynamics; and DNA. Such physiological measurements can be used to verify identity and restrict or allow access based on the identification. Examples of applications for biometrics include physical area security, computer and network security, aircraft passenger check-in and boarding, financial transactions, medical records access, government benefit distribution, voting, law enforcement, passports, visas and immigration, prisons, various military applications, and for restricting access to expensive or dangerous items, such as automobiles or guns. For a further review of biometric systems, see O'Connor, Stanford Technology Law Review. For an exemplary biometric system, see U.S. Pat. No. 6,119,096, Mann et al., which covers iris recognition for aircraft passenger check-in and boarding security. Large collections of SNPs, particularly the SNPs provided by the present invention, can be typed to uniquely identify an individual for biometric applications such as those described above. Such SNP typing can readily be accomplished using DNA chips as described above. Preferably, a minimally invasive means for obtaining a DNA sample is utilized. For example, PCR amplification enables sufficient DNA for analysis to be obtained from fingerprints, which contain DNA-containing skin cells and oils that are naturally transferred during contact.

[0224] Variant Protein/Peptide Uses

[0225] The variant proteins of the present invention can be used in assays to determine the biological activity of the variant protein, including in a panel of multiple proteins for high-throughput screening; to raise antibodies or to elicit another immune response; as a reagent (including the labeled reagent) in assays designed to quantitatively determine levels of the variant protein (or its binding partner or protein) in biological fluids; and as markers for tissues in which the corresponding variant protein is preferentially expressed (either constitutively or at a particular stage of tissue differentiation or development or in a disease state). Any or all of these research utilities are capable of being developed into reagent grade or kit format for commercialization as research products. Methods for performing the uses listed above are well known to those skilled in the art. References disclosing such methods include “Molecular Cloning: A Laboratory Manual”, 2d ed., Cold Spring Harbor Laboratory Press, Sambrook, J., E. F. Fritsch and T. Maniatis eds., 1989, and “Methods in Enzymology: Guide to Molecular Cloning Techniques”, Academic Press, Berger, S. L. and A. R. Kimmel eds., 1987.

[0226] The variant proteins of the present invention provide a target for diagnosing a disease or predisposition to disease mediated by a variant type II diabetes and obesity associated gene/protein. Accordingly, the invention provides methods for detecting the presence, or levels of, the variants of the present invention (or encoding nucleic acid) in a cell, tissue, or organism. The method involves contacting a biological sample with a compound capable of interacting with the variant protein (or SNP-containing gene or mRNA encoding the variant protein) such that the interaction can be detected. The variant protein can be isolated from a biological sample and assayed for the presence of a variant amino acid encoded by a nucleic acid containing a SNP disclosed by the present invention that results in aberrant protein activity. SNPs and corresponding amino acid variations are provided in Table 1 and the Sequence Listing. The SNPs may result in changes to the protein and the corresponding protein activity, such as through non-synonymous substitutions in protein coding regions, formation of nonsense mutations, or by altering control elements such as promoters. Analytic methods of detecting amino acid variants include altered electrophoretic mobility, altered tryptic peptide digest, altered protein activity in cell-based or cell-free assay, alteration in ligand or antibody-binding pattern, altered isoelectric point, direct amino acid sequencing, and any other of the known assay techniques useful for detecting mutations in a protein.

[0227] One agent for detecting a variant protein in a sample is an antibody capable of selectively binding to a variant form of the protein. Such samples include tissues, cells, and biological fluids isolated from a subject, as well as tissues, cells and fluids present within a subject.

[0228] In vitro techniques for detection of the specific allelic variants of the type II diabetes and obesity associated protein, and fragments thereof, disclosed herein include enzyme linked immunosorbent assays (ELISAs), Western blots, immunoprecipitations and immunofluorescence. Alternatively, the variant peptide can be detected in vivo in a subject by introducing into the subject a labeled antibody to the variant peptide. For example, the antibody can be labeled with a radioactive marker whose presence and location in a subject can be detected by standard imaging techniques.

[0229] The variant proteins of the present invention are also useful for biological assays. Such assays involve any of the known functions or activities or properties useful for the diagnosis and treatment of type II diabetes and obesity and associated conditions.

[0230] The variant proteins of the present invention are also useful in drug screening assays, in cell-based or cell-free systems. Cell-based systems can be native, i.e., cells that normally express the protein, as a biopsy or expanded in cell culture. In one embodiment, however, cell-based assays involve recombinant host cells expressing the variant protein. Cell-free assays can be used to detect the ability of a compound to directly bind to a variant protein or the corresponding SNP-containing nucleic acid fragment.

[0231] The variant proteins of the present invention can be used to identify compounds that modulate protein activity. Both the variant protein of the present invention and appropriate fragments can be used in high-throughput screens to assay candidate compounds for the ability to bind and/or modulate the activity of the variant protein. These compounds can be further screened against a functional, or a non-variant, protein to determine the effect of the compound on the protein activity. Further, these compounds can be tested in animal or invertebrate systems to determine activity/effectiveness. Compounds can be identified that activate (agonist) or inactivate (antagonist) the variant protein to a desired degree.

[0232] Further, the variant protein polypeptides can be used to screen a compound for the ability to stimulate or inhibit interaction between the variant protein and a target molecule that normally interacts with the protein. The target can be a ligand or a binding partner that the protein normally interacts with (for example, epinephrine or norepinephrine). Such assays typically include the steps of combining the variant protein with a candidate compound under conditions that allow the variant protein, or fragment, to interact with the target molecule, and to detect the formation of a complex between the protein and the target or to detect the biochemical consequence of the interaction with the variant protein and the target, such as any of the associated effects of signal transduction.

[0233] Candidate compounds include, for example, 1) peptides such as soluble peptides, including Ig-tailed fusion peptides and members of random peptide libraries (see, e.g., Lam et al., Nature 354:82-84 (1991); Houghten et al., Nature 354:84-86 (1991)) and combinatorial chemistry-derived molecular libraries made of D- and/or L-configuration amino acids; 2) phosphopeptides (e.g., members of random and partially degenerate, directed phosphopeptide libraries, see, e.g., Songyang et al., Cell 72:767-778 (1993)); 3) antibodies (e.g., polyclonal, monoclonal, humanized, anti-idiotypic, chimeric, and single chain antibodies as well as Fab, F(ab′)₂, Fab expression library fragments, and epitope-binding fragments of antibodies); and 4) small organic and inorganic molecules (e.g., molecules obtained from combinatorial and natural product libraries).

[0234] One candidate compound is a soluble fragment of the variant protein that competes for ligand binding. Other candidate compounds include mutant proteins or appropriate fragments containing mutations that affect variant protein function and thus compete for ligand. Accordingly, a fragment that competes for ligand, for example with a higher affinity, or a fragment that binds ligand but does not allow release, is encompassed by the invention.

[0235] The invention further includes other end point assays to identify compounds that modulate (stimulate or inhibit) variant protein activity. The assays typically involve an assay of events in the signal transduction pathway that indicate protein activity. Thus, the expression of genes that are up or down-regulated in response to the variant protein dependent signal cascade can be assayed. In one embodiment, the regulatory region of such genes can be operably linked to a marker that is easily detectable, such as luciferase. Alternatively, phosphorylation of the variant protein, or a variant protein target, could also be measured. Any of the biological or biochemical functions mediated by the variant protein can be used as an endpoint assay. These include all of the biochemical or biological events described herein, in the references cited herein, incorporated by reference for these endpoint assay targets, and other functions known to those of ordinary skill in the art.

[0236] The variant protein polypeptides are also useful in competition binding assays in methods designed to discover compounds that interact with the variant protein. Thus, a compound is exposed to a variant protein polypeptide under conditions that allow the compound to bind or to otherwise interact with the variant polypeptide. Ligands to the variant protein are also added to the mixture. If the test compound interacts with the variant protein or ligand, it decreases the amount of complex formed or activity from the variant protein target. This type of assay is particularly useful in cases in which compounds are sought that interact with specific regions of the variant protein. See Hodgson, Bio/technology, Sep. 10, 1992(9), 973-80 for a review of competition binding assays and other receptor screening assays.

[0237] To perform cell free drug screening assays, it is sometimes desirable to immobilize either the variant protein, or fragment, or its target molecule to facilitate separation of complexes from uncomplexed forms of one or both of the proteins, as well as to accommodate automation of the assay.

[0238] Techniques for immobilizing variant proteins on matrices can be used in drug screening assays. In one embodiment, a fusion protein can be provided which adds a domain that allows the protein to be bound to a matrix. For example, glutathione-S-transferase/I125 fusion proteins can be adsorbed onto glutathione sepharose beads (Sigma Chemical, St. Louis, Mo.) or glutathione derivatized microtitre plates, which are then combined with the cell lysates (e.g., ³⁵S-labeled) and a candidate compound, such as a drug candidate, and the mixture incubated under conditions conducive to complex formation (e.g., at physiological conditions for salt and pH). Following incubation, the beads are washed to remove any unbound label, and the matrix immobilized and radiolabel determined directly, or in the supernatant after the complexes are dissociated. Alternatively, the complexes can be dissociated from the matrix, separated by SDS-PAGE, and the level of protein-binding protein found in the bead fraction quantitated from the gel using standard electrophoretic techniques. For example, either the variant polypeptide or its target molecule can be immobilized utilizing conjugation of biotin and streptavidin using techniques well known in the art. Alternatively, antibodies reactive with the variant protein but which do not interfere with binding of the variant protein to its target molecule can be derivatized to the wells of the plate, and the variant protein trapped in the wells by antibody conjugation. Preparations of a protein-binding protein and a candidate compound are incubated in the variant protein-presenting wells and the amount of complex trapped in the well can be quantitated. Methods for detecting such complexes, in addition to those described above for the GST-immobilized complexes, include immunodetection of complexes using antibodies reactive with the protein target molecule, or which are reactive with variant protein and compete with the target molecule, as well as enzyme-linked assays that rely on detecting an enzymatic activity associated with the target molecule.

[0239] Agents that modulate the variant protein of the present invention can be identified using one or more of the above assays, alone or in combination. It is generally preferable to use a cell-based or cell free system first and then confirm activity in an animal or other model system. Such model systems are well known in the art and can readily be employed in this context.

[0240] Modulators of variant protein activity identified according to these drug screening assays can be used to treat a subject with a disorder mediated by the protein pathway, such as type II diabetes and obesity, by treating cells that express the variant protein. These methods of treatment include the steps of administering the modulators of protein activity in a pharmaceutical composition as described herein, to a subject in need of such treatment.

[0241] This invention further pertains to novel agents identified by the above-described screening assays. Accordingly, it is within the scope of this invention to further use an agent identified as described herein in an appropriate animal model. For example, an agent identified as described herein (e.g., a variant modulating agent, a variant antisense nucleic acid molecule, a variant type II diabetes and obesity associated protein-specific antibody, or a variant type II diabetes and obesity associated protein-binding partner) can be used in an animal model to determine the efficacy, toxicity, or side effects of treatment with such an agent. Alternatively, an agent identified as described herein can be used in an animal model to determine the mechanism of action of such an agent. Furthermore, this invention pertains to uses of novel agents identified by the above-described screening assays for treatments as described herein.

[0242] Antibody Uses

[0243] The antibodies can be used to isolate the variant proteins of the present invention by standard techniques, such as affinity chromatography or immunoprecipitation. The antibodies can facilitate the purification of the natural variant protein from cells and recombinantly produced variant protein expressed in host cells. In addition, such antibodies are useful for detecting the presence of the variant protein of the present invention in cells or tissues to determine the pattern of expression of the variant protein among various tissues in an organism and over the course of normal development or disease progression. Further, such antibodies can be used to detect variant protein in situ, in vitro, or in a cell lysate or supernatant in order to evaluate the abundance and pattern of expression. Also, such antibodies can be used to assess abnormal tissue distribution, abnormal expression during development, or expression in an abnormal condition, such as type II diabetes and obesity. Antibody detection of circulating fragments of the full length variant protein can be used to identify turnover.

[0244] Antibodies to the variant proteins of the present invention are useful in pharmacogenomic analysis. Thus, antibodies prepared against variant proteins encoded by the SNPs of the present invention can be used to identify individuals that require modified treatment modalities.

[0245] Further, the antibodies can be used to assess expression of the variant protein in disease states such as in active stages of the disease or in an individual with a predisposition toward disease related to the protein's function, particularly type II diabetes and obesity. Antibodies specific for a variant protein, encoded by a SNP of the present invention, can be used to assay for the presence of the variant protein, such as to screen for susceptibility to a disease associated with the presence of the variant protein, such as type II diabetes and obesity.

[0246] The antibodies are also useful as an immunological marker for variant protein analyzed by electrophoretic mobility, isoelectric point, tryptic peptide digest, and other physical assays known to those in the art.

[0247] The antibodies can also be used to assess aberrant subcellular localization of the variant protein in cells in various tissues. The diagnostic uses can be applied, not only in genetic testing, but also in monitoring a treatment modality. Accordingly, where treatment is ultimately aimed at correcting the expression level or the presence of variant protein or aberrant tissue distribution or developmental expression of the variant protein, antibodies directed against the variant protein or relevant fragments can be used to monitor therapeutic efficacy.

[0248] The antibodies are also useful for inhibiting variant protein function, for example, blocking the binding of the variant protein to a binding partner such as epinephrine or norepinephrine. These uses can also be applied in a therapeutic context in which treatment involves inhibiting the variant protein's function. An antibody can be used, for example, to block binding, thus modulating (agonizing or antagonizing) the variant peptides activity. Antibodies can be prepared against specific fragments containing sites required for function or against intact variant protein that is associated with a cell or cell membrane.

[0249] The invention also encompasses kits for using antibodies to detect the presence of a variant protein in a biological sample. The kit can comprise antibodies such as a labeled or labelable antibody and a compound or agent for detecting variant protein in a biological sample; means for determining the amount of variant protein in the sample; means for comparing the amount of variant protein in the sample with a standard; and instructions for use.

[0250] Uses of Vectors and Host Cells

[0251] The recombinant host cells expressing the variant peptides described herein have a variety of uses. First, the cells are useful for producing a variant protein or peptide that can be further purified to produce desired amounts of variant protein or fragments. Thus, host cells containing expression vectors are useful for variant peptide production.

[0252] Host cells are also useful for conducting cell-based assays involving the variant protein or variant protein fragments, such as those described above as well as other formats known in the art. Thus, a recombinant host cell expressing a variant protein is useful for assaying compounds that stimulate or inhibit variant protein function which may not be apparent by their effect on the native variant protein. Recombinant host cells are also useful for assaying functional alterations in the variant proteins compared with normal function.

[0253] Genetically engineered host cells can be further used to produce non-human transgenic animals. A transgenic animal is preferably a mammal, for example a rodent, such as a rat or mouse, in which one or more of the cells of the animal include a transgene. A transgene is exogenous DNA containing a SNP of the present invention which is integrated into the genome of a cell from which a transgenic animal develops and which remains in the genome of the mature animal in one or more cell types or tissues of the transgenic animal. These animals are useful for studying the function of a variant protein and identifying and evaluating modulators of variant protein activity. Other examples of transgenic animals include non-human primates, sheep, dogs, cows, goats, chickens, and amphibians.

[0254] A transgenic animal can be produced by introducing SNP-containing nucleic acid into the male pronuclei of a fertilized oocyte, e.g., by microinjection, retroviral infection, and allowing the oocyte to develop in a pseudopregnant female foster animal. Any protein nucleotide sequences that contain a SNP of the present invention can be introduced as a transgene into the genome of a non-human animal, such as a mouse.

[0255] Any of the regulatory or other sequences useful in expression vectors can form part of the transgenic sequence. This includes intronic sequences and polyadenylation signals, if not already included. A tissue-specific regulatory sequence(s) can be operably linked to the transgene to direct expression of the variant protein to particular cells.

[0256] Methods for generating transgenic animals via embryo manipulation and microinjection, particularly animals such as mice, have become conventional in the art and are described, for example, in U.S. Pat. Nos. 4,736,866 and 4,870,009, both by Leder et al., U.S. Pat. No. 4,873,191 by Wagner et al. and in Hogan, B., Manipulating the Mouse Embryo, (Cold Spring Harbor Laboratory Press, Cold Spring Harbor, N.Y., 1986). Similar methods are used for production of other transgenic animals. A transgenic founder animal can be identified based upon the presence of the transgene in its genome and/or expression of transgenic mRNA in tissues or cells of the animals. A transgenic founder animal can then be used to breed additional animals carrying the transgene. Moreover, transgenic animals carrying a transgene can further be bred to other transgenic animals carrying other transgenes. A transgenic animal also includes animals in which the entire animal or tissues in the animal have been produced using the homologously recombinant host cells described herein.

[0257] In another embodiment, transgenic non-human animals can be produced which contain selected systems that allow for regulated expression of the transgene. One example of such a system is the cre/loxP recombinase system of bacteriophage P1. For a description of the cre/loxP recombinase system, see, e.g., Lakso et al. PNAS 89:6232-6236 (1992). Another example of a recombinase system is the FLP recombinase system of S. cerevisiae (O'Gorman et al. Science 251:1351-1355 (1991). If a cre/loxP recombinase system is used to regulate expression of the transgene, animals containing transgenes encoding both the Cre recombinase and a selected protein is required. Such animals can be provided through the construction of “double” transgenic animals, e.g., by mating two transgenic animals, one containing a transgene encoding a selected protein and the other containing a transgene encoding a recombinase.

[0258] Clones of the non-human transgenic animals described herein can also be produced according to the methods described in Wilmut, I. et al. Nature 385:810-813 (1997) and PCT International Publication Nos. WO 97/07668 and WO 97/07669. In brief, a cell, e.g., a somatic cell, from the transgenic animal can be isolated and induced to exit the growth cycle and enter Gₒ phase. The quiescent cell can then be fused, e.g., through the use of electrical pulses, to an enucleated oocyte from an animal of the same species from which the quiescent cell is isolated. The reconstructed oocyte is then cultured such that it develops to morula or blastocyst and then transferred to pseudopregnant female foster animal. The offspring born of this female foster animal will be a clone of the animal from which the cell, e.g., the somatic cell, is isolated.

[0259] Transgenic animals containing recombinant cells that express the variant peptides described herein are useful to conduct the assays described herein in an in vivo context. Accordingly, the various physiological factors that are present in vivo and that could effect ligand binding, variant protein activation, and signal transduction, may not be evident from in vitro cell-free or cell-based assays. Accordingly, it is useful to provide non-human transgenic animals to assay in vivo variant protein function, including ligand interaction, and the effect of chimeric variant protein. It is also possible to assess the effect of null mutations, that is mutations that substantially or completely eliminate one or more variant protein functions.

[0260] Computer Related Embodiments

[0261] The SNPs provided in the present invention may be “provided” in a variety of mediums to facilitate use thereof. As used herein, “provided” refers to a manufacture, other than an isolated nucleic acid molecule, that contains a SNP of the present invention. Such a manufacture provides the SNPs in a form that allows a skilled artisan to examine the manufacture using means not directly applicable to examining the SNPs or a subset thereof as they exists in nature or in purified form.

[0262] In one application of this embodiment, the SNPs of the present invention can be recorded on computer readable media. As used herein, “computer readable media” refers to any medium that can be read and accessed directly by a computer. Such media include, but are not limited to: magnetic storage media, such as floppy discs, hard disc storage medium, and magnetic tape; optical storage media such as CD-ROM; electrical storage media such as RAM and ROM; and hybrids of these categories such as magnetic/optical storage media. A skilled artisan can readily appreciate how any of the presently known computer readable media can be used to create a manufacture comprising computer readable medium having recorded thereon a nucleotide sequence of the present invention. One such medium is provided with the present application, namely, the present application contains computer readable medium (CD-R) that has the sequence fragments containing SNPs provided/recorded thereon in ASCII text format in a Sequence Listing.

[0263] As used herein, “recorded” refers to a process for storing information on computer readable medium. A skilled artisan can readily adopt any of the presently known methods for recording information on computer readable medium to generate manufactures comprising the SNP information of the present invention.

[0264] A variety of data storage structures are available to a skilled artisan for creating a computer readable medium having recorded thereon a nucleotide or amino acid sequence of the present invention. The choice of the data storage structure will generally be based on the means chosen to access the stored information. In addition, a variety of data processor programs and formats can be used to store the nucleotide sequence information of the present invention on computer readable medium. The sequence information can be represented in a word processing text file, formatted in commercially-available software such as WordPerfect and Microsoft Word, or represented in the form of an ASCII file, stored in a database application, such as OB2, Sybase, Oracle, or the like. A skilled artisan can readily adapt any number of data processor structuring formats (e.g. text file or database) in order to obtain computer readable medium having recorded thereon the SNP information of the present invention.

[0265] By providing the SNPs of the present invention in computer readable form, a skilled artisan can routinely access the SNP information for a variety of purposes. Computer software is publicly available which allows a skilled artisan to access sequence information provided in a computer readable medium. Examples of publicly available computer software include BLAST (Altschul et at, J. Mol. Biol. 215:403-410 (1990)) and BLAZE (Brutlag et at, Comp. Chem. 17:203-207 (1993)) search algorithms.

[0266] The present invention further provides systems, particularly computer-based systems, which contain the SNP information described herein. Such systems may be designed to store and/or analyze information on a large number of SNP positions, or information on SNP genotypes from a large number of individuals. The SNP information of the present invention represents a valuable information source. The SNP information of the present invention stored/analyzed in a computer-based system may be used for such computer-intensive applications as determining SNP allele frequencies in a population, for mapping disease genes, for genotype-phenotype association studies, for correlating SNP haplotypes with response to particular drugs, or for various other bioinformatic, pharmacogenomic, or forensic applications.

[0267] As used herein, “a computer-based system” refers to the hardware means, software means, and data storage means used to analyze the SNP information of the present invention. The minimum hardware means of the computer-based systems of the present invention comprises a central processing unit (CPU), input means, output means, and data storage means. A skilled artisan can readily appreciate that any one of the currently available computer-based systems are suitable for use in the present invention. Such a system can be changed into a system of the present invention by utilizing the SNP information provided on the CD-R, or a subset thereof without any experimentation.

[0268] As stated above, the computer-based systems of the present invention comprise a data storage means having stored therein SNPs of the present invention and the necessary hardware means and software means for supporting and implementing a search means. As used herein, “data storage means” refers to memory which can store SNP information of the present invention, or a memory access means which can access manufactures having recorded thereon the SNP information of the present invention.

[0269] As used herein, “search means” refers to one or more programs that are implemented on the computer-based system to score SNPs in a target sequence based on the SNP information stored within the data storage means. Search means are used to determine which nucleotide is present at a particular SNP position in the target sequence.

[0270] As used herein, a “target sequence” can be any DNA sequence containing the SNP position(s) to be scored.

[0271] As used herein, “a target structural motif,” or “target motif,” refers to any rationally selected sequence or combination of sequences containing the SNP position in which the sequence(s) is chosen based on a three-dimensional configuration which is formed upon the folding of the target motif. There are a variety of target motifs known in the art. Protein target motifs include, but are not limited to, enzymatic active sites and signal sequences. Nucleic acid target motifs include, but are not limited to, promoter sequences, hairpin structures, and inducible expression elements (protein binding sequences).

[0272] A variety of structural formats for the input and output means can be used to input and output the information in the computer-based systems of the present invention. A preferred format for an output means is presence or absence of specified nucleotides at particular polymorphic positions. Such presentation can provide a rapid scoring system for many SNPs simultaneously.

[0273] One application of this embodiment is provided in FIG. 1. FIG. 1 provides a block diagram of a computer system 102 that can be used to implement the present invention. The computer system 102 includes a processor 106 connected to a bus 104. Also connected to the bus 104 are a main memory 108 (preferably implemented as random access memory, RAM) and a variety of secondary storage devices 110, such as a hard drive 112 and a removable medium storage device 114. The removable medium storage device 114 may represent, for example, a floppy disk drive, a CD-ROM drive, a magnetic tape drive, etc. A removable storage medium 116 (such as a floppy disk, a compact disk, a magnetic tape, etc.) containing control logic and/or data recorded therein may be inserted into the removable medium storage device 114. The computer system 102 includes appropriate software for reading the control logic and/or the data from the removable storage medium 116 once inserted in the removable medium storage device 114.

[0274] The SNP information of the present invention may be stored in a well-known manner in the main memory 108, any of the secondary storage devices 110, and/or a removable storage medium 116. Software for accessing and processing the SNP information (such as SNP scoring tools, search tools, comparing tools, etc.) preferably resides in main memory 108 during execution.

[0275] All publications and patents mentioned in the above specification are herein incorporated by reference. Various modifications and variations of the described method and system of the invention will be apparent to those skilled in the art without departing from the scope and spirit of the invention. Although the invention has been described in connection with specific preferred embodiments, it should be understood that the invention as claimed should not be unduly limited to such specific embodiments. Indeed, various modifications of the above-described modes for carrying out the invention which are obvious to those skilled in the field of molecular biology or related fields are intended to be within the scope of the following claims.

The application's sequence listing, which the Patent Office published only in electronic form, follows.

SEQUENCE LISTING (2172 sequences)

SEQ ID NO: 1 - DNA, 450 bp, Human
gctgcatcagaagaggccatcaagcacatcactgtccttctgccatggccctgtggatgcgcctcctgcccctgctggcgctgctggccctctggggacctgacccagccgcagcctttgtgaaccaacacctgtgcggctcacacctggtggaagctctctacctagtgtgcggggaacgaggcttcttctacacacccaagacccgccgggaggcagaggacctgcaggtggggcaggtggagctgggcgggggccctggtgcaggcagcctgcagcccttggccctggaggggtccctgcagaagcgtggcattgtggaacaatgctgtaccagcatctgctccctctaccagctggagaactactgcaactagacgcagcccgcaggcagccccccacccgccgcctcctgcaccgagagagatggaataaagcccttgaaccagc

SEQ ID NO: 2 - DNA, 3426 bp, Human
gtaggaatcgcagcgccaacggttgcaaggcccaagaagccatcctgggaaggaaaatgcattggggaaccctgtgcggattcttgtggctttggccctatcttttctatgtccaagctgtgcccatccaaaaagtccaagatgacaccaaaaccctcatcaagacaattgtcaccaggatcaatgacatttcacacacgcagtcagtctcctccaaacagaaagtcaccggtttggacttcattcctgggctccaccccatcctgaccttatccaagatggaccagacactggcagtctaccaacagatcctcaccagtatgccttccagaaacgtgatccaaatatccaacgacctggagaacctccgggatcttcttcacgtgctggccttctctaagagctgccacttgccctgggccagtggcctggagaccttggacagcctggggggtgtcctggaagcttcaggctactccacagaggtggtggccctgagcaggctgcaggggtctctgcaggacatgctgtggcagctggacctcagccctgggtgctgaggccttgaaggtcactcttcctgcaaggactacgttaagggaaggaactctggcttccaggtatctccaggattgaagagcattgcatggacaccccttatccaggactctgtcaatttccctgactcctctaagccactcttccaaaggcataagaccctaagcctccttttgcttgaaaccaaagatatatacacaggatcctattctcaccaggaagggggtccacccagcaaagagtgggctgcatctgggattcccaccaaggtcttcagccatcaacaagagttgtcttgtcccctcttgacccatctccccctcactgaatgcctcaatgtgaccaggggtgatttcagagagggcagaggggtaggcagagcctttggatgaccagaacaaggttccctctgagaattccaaggagttccatgaagaccacatccacacacgcaggaactcccagcaacacaagctggaagcacatgtttatttattctgcattttattctggatggatttgaagcaaagcaccagcttctccaggctctttggggtcagccagggccaggggtctccctggagtgcagtttccaatcccatagatgggtctggctgagctgaacccattttgagtgactcgagggttgggttcatctgagcaagagctggcaaaggtggctctccagttagttctctcgtaactggtttcatttctactgtgactgatgttacatcacagtgtttgcaatggtgttgccctgagtggatctccaaggaccaggttattttaaaaagatttgttttgtcaagtgtcatatgtaggtgtctgcacccaggggtggggaatgtttgggcagaagggagaaggatctagaatgtgttttctgaataacatttgtgtggtgggttctttggaaggagtgagatcattttcttatcttctgcaattgcttaggatgtttttcatgaaaatagctctttcaggggggttgtgaggcctggccaggcaccccctggagagaagtttctggccctggctgaccccaaagagcctggagaagctgatgctttgcttcaaatccatccagaataaaacgcaaagggctgaaagccatttgttggggcagtggtaagctctggctttctccgactgctagggagtggtctttcctatcatggagtgacggtcccacactggtgactgcgatcttcagagcaggggtccttggtgtgaccctctgaatgggtccagggttgatcacactctgggtttattacatggcagtgttcctatttggggcttgcatgccaaattgtagttcttgtctgattggctcacccaagcaaggccaaaattaccaaaaatcttggggggtttttactccagtggtgaagaaaactcctttagcaggtggtcctgagacctgacaagcactgctaggcgagtgccaggactccccaggccaggccaccaggatgcccttcccactggaggtcacattcaggaagatgaaagaggaggtttggggtctgccaccatcctgctgctgtgtttttgctatcacacagtgggtggtggatctgtccaaggaaacttgaatcaaagcagttaactttaagactgagcacctgcttcatgctcagccctgactggtgctataggctggagaagctcacccaataaacattaagattgaggcctgccctcagggatcttgcgttcccagtggtcaaaccgcactcacccatgtgccaaggtggggtatttaccacagcagctgaacagccaaatgcatggtgcagttgacagcaggtgggaaatggtatgagctgaggggggccgtgcccaggggcccacagggaaccctgcttgcactttgtaacatgtttacttttcagggcatcttagcttctattatagccacatccctttgaaacaagataactgagaatttaaaaataagaaaatacataagaccataacagccaacaggtggcaggaccaggactatagcccaggtcctctgatacccagagcattacgtgagccaggtaatgagggactggaaccagggagaccgagcgctttctggaaaagaggagtttcgaggtagagtttgaaggaggtgagggatgtgaattgcctgcagagagaagcctgttttgttggaaggtttggtgtgtggagatgcagaggtaaaagtgtgagcagtgagttacagcgagaggcagagaaagaagagacaggagggcaagggccatgctgaagggaccttgaagggtaaagaagtttgatattaaaggagttaagagtagcaagttctagagaagaggctggtgctgtggccagggtgagagctgctctggaaaatgtgacccagatcctcacaaccacctaatcaggctgaggtgtcttaagccttttgctcacaaaacctggcacaatggctaattcccagagtgtgaaacttcctaagtataaatggttgtctgtttttgtaacttaaaaaaaaaaaaaaaagtttggccgggtgcggtggctcacgcctgtaatcccagcactttgggaggccaaggtggggggatcacaaggtcactagatggcgagcatcctggccaacatggtgaaaccccgtctctactaaaaacacaaaagttagctgagcgtggtggcgggcgcctgtagtcccagccactcgggaggctgagacaggagaatcgcttaaacctgggaggcggagagtacagtgagccaagatcgcgccactgcactccggcctgatgacagagcgagattccgtcttaaaaaaaaaaaaaaaaaaagtttgtttttaaaaaaatctaaataaaataactttgccccctg

SEQ ID NO: 3 - DNA, 3439 bp, Human
tctggtttgtaacttatgcctaagggacctgctcccattttctttcctagtggaacaaaggtattgaagccacaggttgctgaggcaaagcacttattgattagattcccatcaatattcagctgccgctgagaagattagacttggactctcaggtctgggtagcccaactcctccctctccttgctcctcctcctgcaatgcataactaggcctaggcagagctgcgaataaacaggcaggagctagtcaggtgcatgtgccacactcacacaagacctggaattgacaggactcccaactagtacaatgacagaagataaggtcactgggaccctggttttcactgtcatcactgctgtgctgggttccttccagtttggatatgacattggtgtgatcaatgcacctcaacaggtaataatatctcactatagacatgttttgggtgttccactggatgaccgaaaagctatcaacaactatgttatcaacagtacagatgaactgcccacaatctcatactcaatgaacccaaaaccaaccccttgggctgaggaagagactgtggcagctgctcaactaatcaccatgctctggtccctgtctgtatccagctttgcagttggtggaatgactgcatcattctttggtgggtggcttggggacacacttggaagaatcaaagccatgttagtagcaaacattctgtcattagttggagctctcttgatggggttttcaaaattgggaccatctcatatacttataattgctggaagaagcatatcaggactatattgtgggctaatttcaggcctggttcctatgtatatcggtgaaattgctccaaccgctctcaggggagcacttggcacttttcatcagctggccatcgtcacgggcattcttattagtcagattattggtcttgaatttatcttgggcaattatgatctgtggcacatcctgcttggcctgtctggtgtgcgagccatccttcagtctctgctactctttttctgtccagaaagccccagatacctttacatcaagttagatgaggaagtcaaagcaaaacaaagcttgaaaagactcagaggatatgatgatgtcaccaaagatattaatgaaatgagaaaagaaagagaagaagcatcgagtgagcagaaagtctctataattcagctcttcaccaattccagctaccgacagcctattctagtggcactgatgctgcatgtggctcagcaattttccggaatcaatggcattttttactactcaaccagcatttttcagacggctggtatcagcaaacctgtttatgcaaccattggagttggcgctgtaaacatggttttcactgctgtctctgtattccttgtggagaaggcagggcgacgttctctctttctaattggaatgagtgggatgtttgtttgtgccatcttcatgtcagtgggacttgtgctgctgaataagttctcttggatgagttatgtgagcatgatagccatcttcctctttgtcagcttctttgaaattgggccaggcccgatcccctggttcatggtggctgagtttttcagtcaaggaccacgtcctgctgctttagcaatagctgcattcagcaattggacctgcaatttcattgtagctctgtgtttccagtacattgcggacttctgtggaccttatgtgtttttcctctttgctggagtgctcctggcctttaccctgttcacattttttaaagttccagaaaccaaaggaaagtcttttgaggaaattgctgcagaattccaaaagaagagtggctcagcccacaggccaaaagctgctgtagaaatgaaattcctaggagctacagagactgtgtaaaaaaaaaaccctgctttttgacatgaacagaaacaataagggaaccgtctgtttttaaatgatgattccttgagcattttatatccacatctttaagtattgttttatttttatgtgctctcatcagaaatgtcatcaaatattaccaaaaaagtatttttttaagttagagaatatatttttgatggtaagactgtaattaagtaaaccaaaaaggctagtttattttgttacactaaagggcaggtggttctaatatttttagctctgttctttataacaaggttcttctaaaattgaagagatttcaacatatcatttttttaacacataactagaaacctgaggatgcaacaaatatttatatatttgaatatcattaaattggaattttcttacccatatatcttatgttaaaggagatatggctagtggcaataagttccatgttaaaatagacaactcttccatttattgcactcagcttttttcttgagtactagaatttgtattttgcttaaaattttacttttgttctgtattttcatgtggaatggattatagagtatactaaaaaatgtctatagagaaaaactttcatttttggtaggcttatcaaaatctttcagcactcagaaaagaaaaccattttagttcctttatttaatggccaaatggtttttgcaagatttaacactaaaaaggtttcacctgatcatatagcgtgggttatcagttaacattaacatctattataaaaccatgttgattcccttctggtacaatcctttgagttatagtttgctttgctttttaattgaggacagcctggttttcacatacactcaaacaatcatgagtcagacatttggtatattacctcaaattcctaataagtttgatcaaatctaatgtaagaaaatttgaagtaaaggattgatcactttgttaaaaatattttctgaattattatgtctcaaaataagttgaaaaggtagggtttgaggattcctgagtgtgggcttctgaaacttcataaatgttcagcttcagacttttatcaaaatccctatttaattttcctggaaagactgattgttttatggtgtgttcctaacataaaataatcgtctcctttgacatttccttctttgtcttagctgtatacagattctagccaaactattctatggccattactaacacgcattgtacactatctatctgcctttacctacataggcaaattggaaatacacagatgattaaacagactttagcttacagtcaattttacaattatggaaatatagttctgatgggtcccaaaagcttagcagggtgctaacgtatctctaggctgttttctccaccaactggagcactgatcaatccttcttatgtttgctttaatgtgtattgaagaaaagcactttttaaaaagtactctttaagagtgaaataattaaaaaccactgaacatttgctttgttttctaaagttgttcacatatatgtaatttagcagtccaaagaacaagaaattgtttcttttc

SEQ ID NO: 4 - DNA, 1514 bp, Human
atcggccaccgccatcccatccagcgagcatctgccgccgcgccgccgccaccctcccagagagcactggccaccgctccaccatcacttgcccagagtttgggccaccgcccgccgccaccagcccagagagcatcggcccctgtctgctgctcgcgcctggagatgtcagaggtccccgttgctcgcgtctggctggtactgctcctgctgactgtccaggtcggcgtgacagccggcgctccgtggcagtgcgcgccctgctccgccgagaagctcgcgctctgcccgccggtgtccgcctcgtgctcggaggtcacccggtccgccggctgcggctgttgcccgatgtgcgccctgcctctgggcgccgcgtgcggcgtggcgactgcacgctgcgcccggggactcagttgccgcgcgctgccgggggagcagcaacctctgcacgccctcacccgcggccaaggcgcctgcgtgcaggagtctgacgcctccgctccccatgctgcagaggcagggagccctgaaagcccagagagcacggagataactgaggaggagctcctggataatttccatctgatggccccttctgaagaggatcattccatcctttgggacgccatcagtacctatgatggctcgaaggctctccatgtcaccaacatcaaaaaatggaaggagccctgccgaatagaactctacagagtcgtagagagtttagccaaggcacaggagacatcaggagaagaaatttccaaattttacctgccaaactgcaacaagaatggattttatcacagcagacagtgtgagacatccatggatggagaggcgggactctgctggtgcgtctacccttggaatgggaagaggatccctgggtctccagagatcaggggagaccccaactgccagatatattttaatgtacaaaactgaaaccagatgaaataatgttctgtcacgtgaaatatttaagtatatagtatatttatactctagaacatgcacatttatatatatatgtatatgtatatatatatagtaactactttttatactccatacataacttgatatagaaagctgtttatttattcactgtaagtttattttttctacacagtaaaaacttgtactatgttaataacttgtcctatgtcaatttgtatatcatgaaacacttctcatcatattgtatgtaagtaattgcatttctgctcttccaaagctcctgcgtctgtttttaaagagcatggaaaaatactgcctagaaaatgcaaaatgaaataagagagagtagtttttcagctagtttgaaggaggacggttaacttgtatattccaccattcacatttgatgtacatgtgtagggaaagttaaaagtgttgattacataatcaaagctacctgtggtgatgttgccacctgttaaaatgtacactggatatgttgttaaacacgtgtcgataatggaaacatttacaataaatattctgcatggaaa

SEQ ID NO: 5 - DNA, 2290 bp, Human
gaattccgaatcatgtgcagaatgctgaatcttcccccagccaggacgaataagacagcgcggaaaagcagattctcgtaattctggaattgcatgttgcaaggagtctcctggatcttcgcacccagcttcgggtagggagggagtccgggtcccgggctaggccagcccggcaggtggagagggtccccggcagccccgcgcgcccctggccatgtctttaatgccctgccccttcatgtggccttctgagggttcccagggctggccagggttgtttcccacccgcgcgcgcgctctcacccccagccaaacccacctggcagggctccctccagccgagaccttttgattcccggctcccgcgctcccgcctccgcgccagcccgggaggtggccctggacagccggacctcgcccggccccggctgggaccatggtgtttctctcgggaaatgcttccgacagctccaactgcacccaaccgccggcaccggtgaacatttccaaggccattctgctcggggtgatcttggggggcctcattcttttcggggtgctgggtaacatcctagtgatcctctccgtagcctgtcaccgacacctgcactcagtcacgcactactacatcgtcaacctggcggtggccgacctcctgctcacctccacggtgctgcccttctccgccatcttcgaggtcctaggctactgggccttcggcagggtcttctgcaacatctgggcggcagtggatgtgctgtgctgcaccgcgtccatcatgggcctctgcatcatctccatcgaccgctacatcggcgtgagctacccgctgcgctacccaaccatcgtcacccagaggaggggtctcatggctctgctctgcgtctgggcactctccctggtcatatccattggacccctgttcggctggaggcagccggcccccgaggacgagaccatctgccagatcaacgaggagccgggctacgtgctcttctcagcgctgggctccttctacctgcctctggccatcatcctggtcatgtactgccgcgtctacgtggtggccaagagggagagccggggcctcaagtctggcctcaagaccgacaagtcggactcggagcaagtgacgctccgcatccatcggaaaaacgccccggcaggaggcagcgggatggccagcgccaagaccaagacgcacttctcagtgaggctcctcaagttctcccgggagaagaaagcggccaaaacgctgggcatcgtggtcggctgcttcgtcctctgctggctgccttttttcttagtcatgcccattgggtctttcttccctgatttcaagccctctgaaacagtttttaaaatagtattttggctcggatatctaaacagctgcatcaaccccatcatatacccatgctccagccaagagttcaaaaaggcctttcagaatgtcttgagaatccagtgtctccgcagaaagcagtcttccaaacatgccctgggctacaccctgcacccgcccagccaggccgtggaagggcaacacaaggacatggtgcgcatccccgtgggatcaagagagaccttctacaggatctccaagacggatggcgtttgtgaatggaaatttttctcttccatgccccgtggatctgccaggattacagtgtccaaagaccaatcctcctgtaccacagcccgggtgagaagtaaaagctttttggaggtctgctgctgtgtagggccctcaacccccagccttgacaagaaccatcaagttccaaccattaaggtccacaccatctccctcagtgagaacggggaggaagtctaggacaggaaagatgcagaggaaaggggaataatcttaggtacccaccccacttccttctcggaaggccagctcttcttggaggacaagacaggaccaatcaaagaggggacctgctgggaatggggtgggtggtagacccaactcatcaggcagcgggtagggcacagggaagagggagggtgtctcacaaccaaccagttcagaatgatacggaacagcatttccctgcagctaatgctttcttggtcactctgtgcccacttcaacgaaaaccaccatgggaaacagaatttcatgcacaatccaaaagactataaatataggattatgatttcatcatgaatattttgagcacacactctaagtttggagctatttcttgatggaagtgaggggattttattttcaggctcaacctactgacagccacatttgacatttatgccggaattc

SEQ ID NO: 6 - DNA, 4989 bp, Human
ttttttttttttttgagaaagggaatttcatcccaaataaaaggaatgaagtctggctccggaggagggtccccgacctcgctgtgggggctcctgtttctctccgccgcgctctcgctctggccgacgagtggagaaatctgcgggccaggcatcgacatccgcaacgactatcagcagctgaagcgcctggagaactgcacggtgatcgagggctacctccacatcctgctcatctccaaggccgaggactaccgcagctaccgcttccccaagctcacggtcattaccgagtacttgctgctgttccgagtggctggcctcgagagcctcggagacctcttccccaacctcacggtcatccgcggctggaaactcttctacaactacgccctggtcatcttcgagatgaccaatctcaaggatattgggctttacaacctgaggaacattactcggggggccatcaggattgagaaaaatgctgacctctgttacctctccactgtggactggtccctgatcctggatgcggtgtccaataactacattgtggggaataagcccccaaaggaatgtggggacctgtgtccagggaccatggaggagaagccgatgtgtgagaagaccaccatcaacaatgagtacaactaccgctgctggaccacaaaccgctgccagaaaatgtgcccaagcacgtgtgggaagcgggcgtgcaccgagaacaatgagtgctgccaccccgagtgcctgggcagctgcagcgcgcctgacaacgacacggcctgtgtagcttgccgccactactactatgccggtgtctgtgtgcctgcctgcccgcccaacacctacaggtttgagggctggcgctgtgtggaccgtgacttctgcgccaacatcctcagcgccgagagcagcgactccgaggggtttgtgatccacgacggcgagtgcatgcaggagtgcccctcgggcttcatccgcaacggcagccagagcatgtactgcatcccttgtgaaggtccttgcccgaaggtctgtgaggaagaaaagaaaacaaagaccattgattctgttacttctgctcagatgctccaaggatgcaccatcttcaagggcaatttgctcattaacatccgacgggggaataacattgcttcagagctggagaacttcatggggctcatcgaggtggtgacgggctacgtgaagatccgccattctcatgccttggtctccttgtccttcctaaaaaaccttcgcctcatcctaggagaggagcagctagaagggaattactccttctacgtcctcgacaaccagaacttgcagcaactgtgggactgggaccaccgcaacctgaccatcaaagcagggaaaatgtactttgctttcaatcccaaattatgtgtttccgaaatttaccgcatggaggaagtgacggggactaaagggcgccaaagcaaaggggacataaacaccaggaacaacggggagagagcctcctgtgaaagtgacgtcctgcatttcacctccaccaccacgtcgaagaatcgcatcatcataacctggcaccggtaccggccccctgactacagggatctcatcagcttcaccgtttactacaaggaagcaccctttaagaatgtcacagagtatgatgggcaggatgcctgcggctccaacagctggaacatggtggacgtggacctcccgcccaacaaggacgtggagcccggcatcttactacatgggctgaagccctggactcagtacgccgtttacgtcaaggctgtgaccctcaccatggtggagaacgaccatatccgtggggccaagagtgagatcttgtacattcgcaccaatgcttcagttccttccattcccttggacgttctttcagcatcgaactcctcttctcagttaatcgtgaagtggaaccctccctctctgcccaacggcaacctgagttactacattgtgcgctggcagcggcagcctcaggacggctacctttaccggcacaattactgctccaaagacaaaatccccatcaggaagtatgccgacggcaccatcgacattgaggaggtcacagagaaccccaagactgaggtgtgtggtggggagaaagggccttgctgcgcctgccccaaaactgaagccgagaagcaggccgagaaggaggaggctgaataccgcaaagtctttgagaatttcctgcacaactccatcttcgtgcccagacctgaaaggaagcggagagatgtcatgcaagtggccaacaccaccatgtccagccgaagcaggaacaccacggccgcagacacctacaacatcaccgacccggaagagctggagacagagtaccctttctttgagagcagagtggataacaaggagagaactgtcatttctaaccttcggcctttcacattgtaccgcatcgatatccacagctgcaaccacgaggctgagaagctgggctgcagcgcctccaacttcgtctttgcaaggactatgcccgcagaaggagcagatgacattcctgggccagtgacctgggagccaaggcctgaaaactccatctttttaaagtggccggaacctgagaatcccaatggattgattctaatgtatgaaataaaatacggatcacaagttgaggatcagcgagaatgtgtgtccagacaggaatacaggaagtatggaggggccaagctaaaccggctaaacccggggaactacacagcccggattcaggccacatctctctctgggaatgggtcgtggacagatcctgtgttcttctatgtccaggccaaaacaggatatgaaaacttcatccatctgatcatcgctctgcccgtcgctgtcctgttgatcgtgggagggttggtgattatgctgtacgtcttccatagaaagagaaataacagcaggctggggaatggagtgctgtatgcctctgtgaacccggagtacttcagcgctgctgatgtgtacgttcctgatgagtgggaggtggctcgggagaagatcaccatgagccgggaacttgggcaggggtcgtttgggatggtctatgaaggagttgccaagggtgtggtgaaagatgaacctgaaaccagagtggccattaaaacagtgaacgaggccgcaagcatgcgtgagaggattgagtttctcaacgaagcttctgtgatgaaggagttcaattgtcaccatgtggtgcgattgctgggtgtggtgtcccaaggccagccaacactggtcatcatggaactgatgacacggggcgatctcaaaagttatctccggtctctgaggccagaaatggagaataatccagtcctagcacctccaagcctgagcaagatgattcagatggccggagagattgcagacggcatggcatacctcaacgccaataagttcgtccacagagaccttgctgcccggaattgcatggtagccgaagatttcacagtcaaaatcggagattttggtatgacgcgagatatctatgagacagactattaccggaaaggaggcaaagggctgctgcccgtgcgctggatgtctcctgagtccctcaaggatggagtcttcaccacttactcggacgtctggtccttcggggtcgtcctctgggagatcgccacactggccgagcagccctaccagggcttgtccaacgagcaagtccttcgcttcgtcatggagggcggccttctggacaagccagacaactgtcctgacatgctgtttgaactgatgcgcatgtgctggcagtataaccccaagatgaggccttccttcctggagatcatcagcagcatcaaagaggagatggagcctggcttccgggaggtctccttctactacagcgaggagaacaagctgcccgagccggaggagctggacctggagccagagaacatggagagcgtccccctggacccctcggcctcctcgtcctccctgccactgcccgacagacactcaggacacaaggccgagaacggccccggccctggggtgctggtcctccgcgccagcttcgacgagagacagccttacgcccacatgaacgggggccgcaagaacgagcgggccttgccgctgccccagtcttcgacctgctgatccttggatcctgaatctgtgcaaacagtaacgtgtgcgcacgcgcagcggggtggggggggagagagagttttaacaatccattcacaagcctcctgtacctcagtggatcttcagttctgcccttgctgcccgcgggagacagcttctctgcagtaaaacacatttgggatgttccttttttcaatatgcaagcagctttttattccctgcccaaacccttaactgacatgggcctttaagaaccttaatgacaacacttaatagcaacagagcacttgagaaccagtctcctcactctgtccctgtccttccctgttctccctttctctctcctctctgcttcataacggaaaaataattgccacaagtccagctgggaagccctttttatcagtttgaggaagtggctgtccctgtggccccatccaaccactgtacacacccgcctgacaccgtgggtcattacaaaaaaacacgtggagatggaaatttttacctttatctttcacctttctagggacatgaaatttacaaagggccatcgttcatccaaggctgttaccattttaacgctgcctaattttgccaaaatcctgaactttctccctcatcggcccggcgctgattcctcgtgtccggaggcatgggtgagcatggcagctggttgctccatttgagagacacgctggcgacacactccgtccatccgactgcccctgctgtgctgctcaaggccacaggcacacaggtctcattgcttctgactagattattatttgggggaactggacacaataggtctttctctcagtgaaggtggggagaagctgaaccggc

SEQ ID NO: 7 - DNA, 9090 bp, Human
cgagcccagtcgagccgcgctcacctcgggctcccgctccgtctccacctccgcctttgccctggcggcgcgaccccgtcccggcgcggcccccagcagtcgcgcgccgttagcctcgcgcccgccgcgcagtccgggcccggcgcgatgggggccgccgccggccggagcccccacctggggcccgcgcccgcccgccgcccgcagcgctctctgctcctgctgcagctgctgctgctcgtcgctgccccggggtccacgcaggcccaggccgccccgttccccgagctgtgcagttatacatgggaagctgttgataccaaaaataatgtactttataaaatcaacatctgtggaagtgtggatattgtccagtgcgggccatcaagtgctgtttgtatgcacgacttgaagacacgcacttatcattcagtgggtgactctgttttgagaagtgcaaccagatctctcctggaattcaacacaacagtgagctgtgaccagcaaggcacaaatcacagagtccagagcagcattgccttcctgtgtgggaaaaccctgggaactcctgaatttgtaactgcaacagaatgtgtgcactactttgagtggaggaccactgcagcctgcaagaaagacatatttaaagcaaataaggaggtgccatgctatgtgtttgatgaagagttgaggaagcatgatctcaatcctctgatcaagcttagtggtgcctacttggtggatgactccgatccggacacttctctattcatcaatgtttgtagagacatagacacactacgagacccaggttcacagctgcgggcctgtccccccggcactgccgcctgcctggtaagaggacaccaggcgtttgatgttggccagccccgggacggactgaagctggtgcgcaaggacaggcttgtcctgagttacgtgagggaagaggcaggaaagctagacttttgtgatggtcacagccctgcggtgactattacatttgtttgcccgtcggagcggagagagggcaccattcccaaactcacagctaaatccaactgccgctatgaaattgagtggattactgagtatgcctgccacagagattacctggaaagtaaaacttgttctctgagcggcgagcagcaggatgtctccatagacctcacaccacttgcccagagcggaggttcatcctatatttcagatggaaaagaatatttgttttatttgaatgtctgtggagaaactgaaatacagttctgtaataaaaaacaagctgcagtttgccaagtgaaaaagagcgatacctctcaagtcaaagcagcaggaagataccacaatcagaccctccgatattcggatggagacctcaccttgatatattttggaggtgatgaatgcagctcagggtttcagcggatgagcgtcataaactttgagtgcaataaaaccgcaggtaacgatgggaaaggaactcctgtattcacaggggaggttgactgcacctacttcttcacatgggacacggaatacgcctgtgttaaggagaaggaagacctcctctgcggtgccaccgacgggaagaagcgctatgacctgtccgcgctggtccgccatgcagaaccagagcagaattgggaagctgtggatggcagtcagacggaaacagagaagaagcattttttcattaatatttgtcacagagtgctgcaggaaggcaaggcacgagggtgtcccgaggacgcggcagtgtgtgcagtggataaaaatggaagtaaaaatctgggaaaatttatttcctctcccatgaaagagaaaggaaacattcaactctcttattcagatggtgatgattgtggtcatggcaagaaaattaaaactaatatcacacttgtatgcaagccaggtgatctggaaagtgcaccagtgttgagaacttctggggaaggcggttgcttttatgagtttgagtggcgcacagctgcggcctgtgtgctgtctaagacagaaggggagaactgcacggtctttgactcccaggcagggttttcttttgacttatcacctctcacaaagaaaaatggtgcctataaagttgagacaaagaagtatgacttttatataaatgtgtgtggcccggtgtctgtgagcccctgtcagccagactcaggagcctgccaggtggcaaaaagtgatgagaagacttggaacttgggtctgagtaatgcgaagctttcatattatgatgggatgatccaactgaactacagaggcggcacaccctataacaatgaaagacacacaccgagagctacgctcatcacctttctctgtgatcgagacgcgggagtgggcttccctgaatatcaggaagaggataactccacctacaacttccggtggtacaccagctatgcctgcccggaggagcccctggaatgcgtagtgaccgacccctccacgctggagcagtacgacctctccagtctggcaaaatctgaaggtggccttggaggaaactggtatgccatggacaactcaggggaacatgtcacgtggaggaaatactacattaacgtgtgtcggcctctgaatccagtgccgggctgcaaccgatatgcatcggcttgccagatgaagtatgaaaaagatcagggctccttcactgaagtggtttccatcagtaacttgggaatggcaaagaccggcccggtggttgaggacagcggcagcctccttctggaatacgtgaatgggtcggcctgcaccaccagcgatggcagacagaccacatataccacgaggatccatctcgtctgctccaggggcaggctgaacagccaccccatcttttctctcaactgggagtgtgtggtcagtttcctgtggaacacagaggctgcctgtcccattcagacaacgacggatacagaccaggcttgctctataagggatcccaacagtggatttgtgtttaatcttaatccgctaaacagttcgcaaggatataacgtctctggcattgggaagatttttatgtttaatgtctgcggcacaatgcctgtctgtgggaccatcctgggaaaacctgcttctggctgtgaggcagaaacccaaactgaagagctcaagaattggaagccagcaaggccagtcggaattgagaaaagcctccagctgtccacagagggcttcatcactctgacctacaaagggcctctctctgccaaaggtaccgctgatgcttttatcgtccgctttgtttgcaatgatgatgtttactcagggcccctcaaattcctgcatcaagatatcgactctgggcaagggatccgaaacacttactttgagtttgaaaccgcgttggcctgtgttccttctccagtggactgccaagtcaccgacctggctggaaatgagtacgacctgactggcctaagcacagtcaggaaaccttggacggctgttgacacctctgtcgatgggagaaagaggactttctatttgagcgtttgcaatcctctcccttacattcctggatgccagggcagcgcagtggggtcttgcttagtgtcagaaggcaatagctggaatctgggtgtggtgcagatgagtccccaagccgcggcgaatggatctttgagcatcatgtatgtcaacggtgacaagtgtgggaaccagcgcttctccaccaggatcacgtttgagtgtgctcagatatcgggctcaccagcatttcagcttcaggatggttgtgagtacgtgtttatctggagaactgtggaagcctgtcccgttgtcagagtggaaggggacaactgtgaggtgaaagacccaaggcatggcaacttgtatgacctgaagcccctgggcctcaacgacaccatcgtgagcgctggcgaatacacttattacttccgggtctgtgggaagctttcctcagacgtctgccccacaagtgacaagtccaaggtggtctcctcatgtcaggaaaagcgggaaccgcagggatttcacaaagtggcaggtctcctgactcagaagctaacttatgaaaatggcttgttaaaaatgaacttcacggggggggacacttgccataaggtttatcagcgctccacagccatcttcttctactgtgaccgcggcacccagcggccagtatttctaaaggagacttcagattgttcctacttgtttgagtggcgaacgcagtatgcctgcccacctttcgatctgactgaatgttcattcaaagatggggctggcaactccttcgacctctcgtccctgtcaaggtacagtgacaactgggaagccatcactgggacgggggacccggagcactacctcatcaatgtctgcaagtctctggccccgcaggctggcactgagccgtgccctccagaagcagccgcgtgtctgctgggtggctccaagcccgtgaacctcggcagggtaagggacggacctcagtggagagatggcataattgtcctgaaatacgttgatggcgacttatgtccagatgggattcggaaaaagtcaaccaccatccgattcacctgcagcgagagccaagtgaactccaggcccatgttcatcagcgccgtggaggactgtgagtacacctttgcctggcccacagccacagcctgtcccatgaagagcaacgagcatgatgactgccaggtcaccaacccaagcacaggacacctgtttgatctgagctccttaagtggcagggcgggattcacagctgcttacagcgagaaggggttggtttacatgagcatctgtggggagaatgaaaactgccctcctggcgtgggggcctgctttggacagaccaggattagcgtgggcaaggccaacaagaggctgagatacgtggaccaggtcctgcagctggtgtacaaggatgggtccccttgtccctccaaatccggcctgagctataagagtgtgatcagtttcgtgtgcaggcctgaggccgggccaaccaataggcccatgctcatctccctggacaagcagacatgcactctcttcttctcctggcacacgccgctggcctgcgagcaagcgaccgaatgttccgtgaggaatggaagctctattgttgacttgtctccccttattcatcgcactggtggttatgaggcttatgatgagagtgaggatgatgcctccgataccaaccctgatttctacatcaatatttgtcagccactaaatcccatgcacgcagtgccctgtcctgccggagccgctgtgtgcaaagttcctattgatggtccccccatagatatcggccgggtagcaggaccaccaatactcaatccaatagcaaatgagatttacttgaattttgaaagcagtactccttgcttagcggacaagcatttcaactacacctcgctcatcgcgtttcactgtaagagaggtgtgagcatgggaacgcctaagctgttaaggaccagcgagtgcgactttgtgttcgaatgggagactcctgtcgtctgtcctgatgaagtgaggatggatggctgtaccctgacagatgagcagctcctctacagcttcaacttgtccagcctttccacgagcacctttaaggtgactcgcgactcgcgcacctacagcgttggggtgtgcacctttgcagtcgggccagaacaaggaggctgtaaggacggaggagtctgtctgctctcaggcaccaagggggcatcctttggacggctgcaatcaatgaaactggattacaggcaccaggatgaagcggtcgttttaagttacgtgaatggtgatcgttgccctccagaaaccgatgacggcgtcccctgtgtcttccccttcatattcaatgggaagagctacgaggagtgcatcatagagagcagggcgaagctgtggtgtagcacaactgcggactacgacagagaccacgagtggggcttctgcagacactcaaacagctaccggacatccagcatcatatttaagtgtgatgaagatgaggacattgggaggccacaagtcttcagtgaagtgcgtgggtgtgatgtgacatttgagtggaaaacaaaagttgtctgccctccaaagaagttggagtgcaaattcgtccagaaacacaaaacctacgacctgcggctgctctcctctctcaccgggtcctggtccctggtccacaacggagtctcgtactatataaatctgtgccagaaaatatataaagggcccctgggctgctctgaaagggccagcatttgcagaaggaccacaactggtgacgtccaggtcctgggactcgttcacacgcagaagctgggtgtcataggtgacaaagttgttgtcacgtactccaaaggttatccgtgtggtggaaataagaccgcatcctccgtgatagaattgacctgtacaaagacggtgggcagacctgcattcaagaggtttgatatcgacagctgcacttactacttcagctgggactcccgggctgcctgcgccgtgaagcctcaggaggtgcagatggtgaatgggaccatcaccaaccctataaatggcaagagcttcagcctcggagatatttattttaagctgttcagagcctctggggacatgaggaccaatggggacaactacctgtatgagatccaactttcctccatcacaagctccagaaacccggcgtgctctggagccaacatatgccaggtgaagcccaacgatcagcacttcagtcggaaagttggaacctctgacaagaccaagtactaccttcaagacggcgatctcgatgtcgtgtttgcctcttcctctaagtgcggaaaggataagaccaagtctgtttcttccaccatcttcttccactgtgaccctctggtggaggacgggatccccgagttcagtcacgagactgccgactgccagtacctcttctcttggtacacctcagccgtgtgtcctctgggggtgggctttgacagcgagaatcccggggacgacgggcagatgcacaaggggctgtcagaacggagccaggcagtcggcgcggtgctcagcctgctgctggtggcgctcacctgctgcctgctggccctgttgctctacaagaaggagaggagggaaacagtgataagtaagctgaccacttgctgtaggagaagttccaacgtgtcctacaaatactcaaaggtgaataaggaagaagagacagatgagaatgaaacagagtggctgatggaagagatccagctgcctcctccacggcagggaaaggaagggcaggagaacggccatattaccaccaagtcagtgaaagccctcagctccctgcatggggatgaccaggacagtgaggatgaggttctgaccatcccagaggtgaaagttcactcgggcaggggagctggggcagagagctcccacccagtgagaaacgcacagagcaatgcccttcaggagcgtgaggacgatagggtggggctggtcaggggtgagaaggcgaggaaagggaagtccagctctgcacagcagaagacagtgagctccaccaagctggtgtccttccatgacgacagcgacgaggacctcttacacatctgactccgcagtgcctgcaggggagcacggagccgcgggacagccaagcacctccaaccaaataagacttccactcgatgatgcttctataattttgcctttaacagaaactttcaaaagggaagagtttttgtgatgggggagagggtgaaggaggtcaggccccactccttcctgattgtttacagtcattggaataaggcatggctcagatcggccacagggcggtaccttgtgcccagggttttgccccaagtcctcatttaaaagcataaggccggacgcatctcaaaacagagggctgcattcgaagaaacccttgctgctttagtcccgatagggtatttgaccccgatatattttagcattttaattctctccccctatttattgactttgacaattactcaggtttgagaaaaaggaaaaaaaaacagccaccgtttcttcctgccagcaggggtgtgatgtaccagtttgtccatcttgagatggtgaggctgtcagtgtatggggcagcttccggcgggatgttgaactggtcattaatgtgtcccctgagttggagctcattctgtctcttttctcttttgctttctgtttcttaagggcacacacacgtgcgtgcgagcacacacacacatacgtgcacagggtccccgagtgcctaggttttggagagtttgcctgttctatgcctttagtcaggaatggctgcacctttttgcatgatatcttcaagcctgggcgtacagagcacatttgtcagtatttttgccggctggtgaattcaaacaacctgcccaaagattgatttgtgtgtttgtgtgtgtgtgtgtgtgtgtgtgtgtgtgtgagtggagttgaggtgtcagagaaaatgaattttttccagatttggggtataggtctcatctcttcaggttctcatgataccacctttactgtgcttatttttttaagaaaaaagtgttgatcaaccattcgacctataagaagccttaatttgcacagtgtgtgacttacagaaactgcatgaaaaatcatgggccagagcctcggccctagcattgcacttggcctcatgctggagggaggctgggcgggtacagcgcggaggaggagggaggccaggcgggcatggcgtggaggaggagggaggccgggcggtcacagcatggaggaggagggaggcgctgctggtgttcttattctggcggcagcgcctttcctgccatgtttagtgaatgacttttctcgcattgtagaattgtatatagactctggtgttctattgctgagaagcaaaccgccctgcagcatccctcagcctgtaccggtttggctggcttgtttgatttcaacatgagtgtattttttaaaattgatttttctcttcatttttttttcaatcaactttactgtaatataaagtattcaacaatttcaataaaagataaattattaaaa

SEQ ID NO: 8 - DNA, 6628 bp, Human
cgaaattgaaccggagccatcttgggcccggcgcgcagacccgcggagtttcccgtgccgacgccccggggccacttccagtgcggagtagcggaggcgtgggggcctcgaggggctggcgcggtccagcggtcgggccagggtcgtgccgccggcgggtcgggccgggcaatgcctcgcgggcgcaatgaatccgcggcaggggtattccctcagcggatactacacccatccatttcaaggctatgagcacagacagctcagataccagcagcctgggccaggatcttcccccagtagtttcctgcttaagcaaatagaatttctcaaggggcagctcccagaagcaccggtgattggaaagcagacaccgtcactgccaccttccctcccaggactccggccaaggtttccagtactacttgcctccagtaccagaggcaggcaagtggacatcaggggtgtccccaggggcgtgcatctcggaagtcaggggctccagagagggttccagcatccttcaccacgtggcaggagtctgccacagagaggtgttgattgcctttcctcacatttccaggaactgagtatctaccaagatcaggaacaaaggatcttaaagttcctggaagagcttggggaagggaaggccaccacagcacatgatctgtctgggaaacttgggactccgaagaaagaaatcaatcgagttttatactccctggcaaagaagggcaagctacagaaagaggcaggaacaccccctttgtggaaaatcgcggtctccactcaggcttggaaccagcacagcggagtggtaagaccagacggtcatagccaaggagccccaaactcagacccgagtttggaaccggaagacagaaactccacatctgtctcagaagatcttcttgagccttttattgcagtctcagctcaggcttggaaccagcacagcggagtggtaagaccagacagtcatagccaaggatccccaaactcagacccaggtttggaacctgaagacagcaactccacatctgccttggaagatcctcttgagtttttagacatggccgagatcaaggagaaaatctgcgactatctcttcaatgtgtctgactcctctgccctgaatttggctaaaaatattggccttaccaaggcccgagatataaatgctgtgctaattgacatggaaaggcagggggatgtctatagacaagggacaacccctcccatatggcatttgacagacaagaagcgagagaggatgcaaatcaagagaaatacgaacagtgttcctgaaaccgctccagctgcaatccctgagaccagaagaaacgcagagttcctcacctgtaatatacccacatcaaatgcctcaaataacatggtaaccacagaaaaagtggagaatgggcaggaacctgtcataaagttagaaaacaggcaagaggccagaccagaaccagcaagactgaaaccacctgttcattacaatggcccctcaaaagcagggtatgttgactttgaaaatggccagtgggccacagatgacatcccagatgacttgaatagtatccgcgcagcaccaggtgagtttcgagccatcatggagatgccctccttctacagtcatggcttgccacggtgttcaccctacaagaaactgacagagtgccagctgaagaaccccatcagcgggctgttagaatatgcccagttcgctagtcaaacctgtgagttcaacatgatagagcagagtggaccaccccatgaacctcgatttaaattccaggttgtcatcaatggccgagagtttcccccagctgaagctggaagcaagaaagtggccaagcaggatgcagctatgaaagccatgacaattctgctagaggaagccaaagccaaggacagtggaaaatcagaagaatcatcccactattccacagagaaagaatcagagaagactgcagagtcccagacccccaccccttcagccacatccttcttttctgggaagagccccgtcaccacactgcttgagtgtatgcacaaattggggaactcctgcgaattccgtctcctgtccaaagaaggccctgcccatgaacccaagttccaatactgtgttgcagtgggagcccaaactttccccagtgtgagtgctcccagcaagaaagtggcaaagcagatggccgcagaggaagccatgaaggccctgcatggggaggcgaccaactccatggcttctgataaccagcctgaaggtatgatctcagagtcacttgataacttggaatccatgatgcccaacaaggtcaggaagattggcgagctcgtgagatacctgaacaccaaccctgtgggtggccttttggagtacgcccgctcccatggctttgctgctgaattcaagttggtcgaccagtccggacctcctcacgagcccaagttcgtttaccaagcaaaagttgggggtcgctggttcccagccgtctgcgcacacagcaagaagcaaggcaagcaggaagcagcagatgcggctctccgtgtcttgattggggagaacgagaaggcagaacgcatgggtttcacagaggtaaccccagtgacaggggccagtctcagaagaactatgctcctcctctcaaggtccccagaagcacagccaaagacactccctctcactggcagcaccttccatgaccagatagccatgctgagccaccggtgcttcaacactctgactaacagcttccagccctccttgctcggccgcaagattctggccgccatcattatgaaaaaagactctgaggacatgggtgtcgtcgtcagcttgggaacagggaatcgctgtgttaaaggagattctctcagcctaaaaggagaaactgtcaatgactgccatgcagaaataatctcccggagaggcttcatcaggtttctctacagtgagttaatgaaatacaactcccagactgcgaaggatagtatatttgaacctgctaagggaggagaaaagctccaaataaaaaagactgtgtcattccatctgtatatcagcactgctccgtgtggagatggcgccctctttgacaagtcctgcagcgaccgtgctatggaaagcacagaatcccgccactaccctgtcttcgagaatcccaaacaaggaaagctccgcaccaaggtggagaacggagaaggcacaatccctgtggaatccagtgacattgtgcctacgtgggatggcattcggctcggggagagactccgtaccatgtcctgtagtgacaaaatcctacgctggaacgtgctgggcctgcaaggggcactgttgacccacttcctgcagcccatttatctcaaatctgtcacattgggttaccttttcagccaagggcatctgacccgtgctatttgctgtcgtgtgacaagagatgggagtgcatttgaggatggactacgacatccctttattgtcaaccaccccaaggttggcagagtcagcatatatgattccaaaaggcaatccgggaagactaaggagacaagcgtcaactggtgtctggctgatggctatgacctggagatcctggacggtaccagaggcactgtggatgggccacggaatgaattgtcccgggtctccaaaaagaacatttttcttctatttaagaagctctgctccttccgttaccgcagggatctactgagactctcctatggtgaggccaagaaagctgcccgtgactacgagacggccaagaactacttcaaaaaaggcctgaaggatatgggctatgggaactggattagcaaaccccaggaggaaaagaacttttatctctgcccagtatagtatgctccagtgacagatggattagggtgtgtcatactagggtgtgagagaggtaggtcgtagcattcctcatcacatggtcaggggatttttttttctccttttttttttctttttaagccataattggtgatactgaaaactttgggttcccatttatcctgctttctttgggattgctaggcaaggtctggccaggccccccttttttcccccaagtgaagaggcagaaacctaagaagttatcttttctttctacccaaagcatacatagtcactgagcacctgcggtccatttcctcttaaaagttttgttttgatttgtttccatttcctttccctttgtgtttgctacactgacctcttgcggtcttgattaggtttcagtcaactctggatcatgtcagggactgataatttcatttgtggattacgcagacccctctacttcccctctttcccttctgagattctttccttgtgatctgaatgtctccttttccccctcagagggcaaagaggtgaacataaaggatttggtgaaacatttgtaagggtaggagttgaaaactgcagttcccagtgccacggaagtgtgattggagcctgcagataatgcccagccatcctcccatcctgcactttagccagctgcagggcgggcaaggcaaggaaagctgcttccctggaagtgtatcactttctccggcagctgggaagtctagaaccagccagactgggttaagggagctgctcaagcaatagcagaggtttcacccggcaggatgacacagaccacttcccagggagcacgggcatgccttggaatattgccaagcttccagctgcctcttctcctaaagcattcctaggaatattttccccgccaatgctgggcgtacaccctagccaacgggacaaatcctagagggtataaaatcatctctgctcagataatcatgacttagcaagaataagggcaaaaaatcctgttggcttaacgtcactgttccacccggtgtaatatctctcatgacagtgacaccaagggaagttgactaagtcacatgtaaattaggagtgttttaaagaatgccatagatgttgattcttaactgctacagataacctgtaattgagcagatttaaaattcaggcatacttttccatttatccaagtgctttcatttttccagatggcttcagaagtaggctcgtgggcagggcgcagacctgatctttctagggttgacatagaaagcagtagttgtgggtgaaagggcaggttgtcttcaaactctgtgaggtagaatcctttgtctatacctccatgaacattgactcgtgtgttcagagcctttggcctctctgtggagtctggctctctggctcctgtgcattctttgaatagtcactcgtaaaaactgtcagtgcttgaaactgtttcctttactcatgttgaagggactttgttggcttttagagtgttggtcatgactccaagagcagagcagggaagagcccaagcatagacttggtgccgtggtgatggctgcagtccagttttgtgatgctgcttttacgtgtccctcgataacagtcagctagacacactcaggaggactactgaggctctgcgaccttcaggagctgagcctgcctctctcctttagatgacagaccttcatctgggaacgtgctgagccagcaccctcagatgatttccctccaaactgctgactaggtcatcctctgtctggtagagacattcacatctttgcttttattctatgctctctgtacttttgaccaaaaattgaccaaagtaagaaaatgcaagttctaaaaatagactaaggatgcctttgcagaacaccaaagcatcccaaggaactggtagggaagtggcgcctgtctcctggagtggaagaggcctgctccctggctctgggtctgctgggggcacagtaaatcagtcttggcacccacatccagggcagagaggtctgtggttctcagcatcagaaggcagcgcagcccctctcctcttcaggctacagggttgtcacctgctgagtcctcaggttgtttggcctctctggtccatcttgggcattaggttctccagcagagctctggccagctgcctcttctttaactgggaacacaggctctcacaagatcagaacccccactcacccccaagatcttatctagcaagcctgtagtattcagtttctgttgtaggaagagagcgaggcatccctgaattccacgcatctgctggaaacgagccgtgtcagatcgcacatccctgcgcccccatgcccccatgcccctctgagtcacacaggacagaggaggcagagcttctgcccactgttatcttcactttctttgtccagtcttttgtttttaataagcagtgaccctccctactcttctttttaatgatttttgtagttgatttgtctgaactgtggctactgtgcattccttgaataatcacttgtaaaaattgtcagtgcttgaagctgtttcctttactcacattgaagggacttcgttggttttttggagtcttggttgtgactccaagagcagagtgaggaagacccccaagcatagactcgggtactgtgatgatggctgcagtccagttttatgattctgcttttatgtgtcccttgataacagtgacttaacaatatacattcctcataaataaaaaaaaaacaagaatctgaattcctgcagccc

SEQ ID NO: 9 - DNA, 2197 bp, Human
attgtgaccagaggggtttgtgtggctgaagaggcaggaggaacagtgtatccacagcgtgggaccatgccaggcacaaaacggtttcaacatgtcattgagaccccggagcctggcaagtgggagttgtctgggtacgaggcagctgtgccaatcacggagaagtcaaacccactgacccaggatctagacaaagcagatgctgagaacattgttcgactgctagggcaatgtgatgctgagatcttccaggaggaggggcaagccctgtccacataccagagactctacagcgaatccattctgaccaccatggtacaggtggctgggaaagttcaggaagtgctgaaggagccagatggggggctggttgtgctgagtggagggggcacctctggccggatggcattcctcatgtcggtgtcctttaatcagctgatgaaaggtctgggacagaaacctctttacacctacctcattgcaggtggtgacaggtctgtggtggcctctagggaggggacagaagatagtgccttgcacgggattgaggaactgaagaaggtggctgccgggaagaagagagtgattgtcattggcatttctgtgggactctctgctccctttgtggcaggccagatggactgctgcatgaacaacacagctgtcttcttgccagtcctggttggcttcaatccagtgagcatggccagaaatgaccccattgaagactggagttcaacattccgacaagtagcagagcggatgcagaaaatgcaggagaaacagaaagcttttgtgctcaatcctgccatcgggcccgagggtctcagcggctcctcccggatgaaaggtggaagtgccaccaagattctgctggaaaccctgttattagcagcccataagactgtggaccagggcattgcagcatctcaaagatgcctcctggaaatcttgcggacatttgagcgagctcatcaggtgacctacagccaaagccccaagattgccaccctgatgaagagtgtcagcaccagtctggagaagaaaggccacgtgtacctggttggctggcagaccctgggtatcattgccatcatggatggagtagagtgcatccacacctttggtgctgatttccgagatgtccgtggctttctcattggtgatcacagtgacatgtttaaccagaaggctgagctcaccaaccagggtccccagttcaccttctcccaggaggacttcctgacttccatccttccctctctcacggaaatcgatactgtggtcttcattttcaccctggatgacaacctcacggaggtgcagactatagtggagcaggtgaaagagaagaccaaccacatccaggccctggcacacagcaccgtgggtcagaccttgccgatccctctgaagaagctctttccctccatcatcagcatcacatggccactgcttttctttgaatatgaagggaacttcatccagaagttccagcgtgagctaagcaccaaatgggtgctgaatacagtgagtacaggtgctcatgtgcttcttggtaagatcctacaaaaccacatgttggaccttcggattagcaactccaagctcttctggcgggcgctggccatgctgcagcggttctctggacagtccaaggctcgatgcatcgagagcctcctccgagcgatccactttccccagccactgtcagatgatattcgggctgctcccatctcctgccatgtccaggttgcacatgagaaggaacaggtgatacccatcgccttgctgagcctcctattccggtgctcgatcactgaggctcaggcacacctggctgcagctccttctgtctgtgaggctgtcaggagtgctcttgctgggccaggtcagaagcgcactgcggaccccctcgagatcctagagcctgacgttcagtgaacccatgtttctgggtgggtgaaaggggcccaaccctgcccacttcagcccagcccgcccaaggggacttgtgccagcagaacatgtgggaggaagaagccccgtttccagggcatccgcagcccagggtagggagaaatattctctccactttgggggagagttcttgctctcgacctagtggtttctactctcaccgacttattctgatttcagaaataaaatgaaatgtcttattttggaaaaaaaaaaa

SEQ ID NO: 10 - DNA, 1538 bp, Human
cctccaaccacctgcacgcctgcctgccagggcctctctggggcagccatgaagtccctcgtcctgctcctttgtcttgctcagctctggggctgccactcagccccacatggcccagggctgatttatagacaaccgaactgcgatgatccagaaactgaggaagcagctctggtggctatagactacatcaatcaaaaccttccttggggatacaaacacaccttgaaccagattgatgaagtaaaggtgtggcctcagcagccctccggagagctgtttgagattgaaatagacaccctggaaaccacctgccatgtgctggaccccacccctgtggcaagatgcagcgtgaggcagctgaaggagcatgctgtcgaaggagactgtgatttccagctgttgaaactagatggcaagttttccgtggtatacgcaaaatgtgattccagtccagactcagccgaggacgtgcgcaaggtgtgccaagactgccccctgctggccccgctgaacgacaccagggtggtgcacgccgcgaaagctgccctggccgccttcaacgctcagaacaacggctccaattttcagctggaggaaatttcccgggctcagcttgtgcccctcccaccttctacctatgtggagtttacagtgtctggcactgactgtgttgctaaagaggccacagaggcagccaagtgtaacctgctggcagaaaagcaatatggcttttgtaaggcaacactcagtgagaagcttggtggggcagaggttgcagtgacctgcacggtgttccaaacacagcccgtgacctcacagccccaaccagaaggtgccaatgaagcagtccccacccccgtggtggacccagatgcacctccgtcccctccacttggcgcacctggactccctccagctggctcacccccagactcccatgtgttactggcagctcctccaggacaccagttgcaccgggcgcactacgacctgcgccacaccttcatgggtgtggtctcattggggtcaccctcaggagaagtgtcgcacccccggaaaacacgcacagtggtgcagcctagtgttggtgctgctgctgggccagtggttcctccatgtccggggaggatcagacacttcaaggtctaggctagacatggcagagatgaggaggtttggcacagaaaacatagccaccattttgtccaagcctgggcatgggtggggggccttgtctgctggccacgcaagtgtcacatgcgatctacattaatatcaagtcttgactccctacttcccgtcattcctcacaggacagaagcagagtgggtggtggttatgtttgacagaaggcattaggttgacaacttgtcatgattttgacggtaagccaccatgattgtgttctctgcctctggttgaccttacaaaaaccattggaactgtgactttgaaaggtgctcttgctaagcttatatgtgcctgttaatgaaagtgcctgaaagaccttccttaataaagaaggttctaagctg

SEQ ID NO: 11 - DNA, 1590 bp, Human
gaattccgggtttgtgcatccactctggaaccgctcgtgtgtggcctgtcggaatgacatcgccctcatcagtctccgcacgcgttcccgaggtggcagcgatggcccagtcctgaactccccgccatggccggcgcccccggcccgctgcgccttgcgctgctgctgctcgggatggtgggcagggccggcccccgcccccagggtgccactgtgtccctctgggagacggtgcagaaatggcgagaataccgacgccagtgccagcgctccctgactgaggatccacctcctgccacagacttgttctgcaaccggaccttcgatgaatacgcctgctggccagatggggagccaggctcgttcgtgaatgtcagctgcccctggtacctgccctgggccagcagtgtgccgcagggccacgtgtaccggttctgcacagctgaaggcctctggctgcagaaggacaactccagcctgccctggagggacttgtcggagtgcgaggagtccaagcgaggggagagaagctccccggaggagcagctcctgttcctctacatcatctacacggtgggctacgcactctccttctctgctctggttatcgcctctgcgatcctcctcggcttcagacacctgcactgcaccaggaactacatccacctgaacctgtttgcatccttcatcctgcgagcattgtccgtcttcatcaaggacgcagccctgaagtggatgtatagcacagccgcccagcagcaccagtgggatgggctcctctcctacctggactctctgagctgccgcctggtgtttctgctcatgcagtactgtgtggcggccaattactactggctcttggtggagggcgtgtacctgtacacactgctggccttctcggtcttatctgagcaatggatcttcaggctctacgtgagcataggctggggtgttcccctgctgtttgttgtcccctggggcattgtcaagtacctctatgaggacgagggctgctggaccaggaactccaacatgaactactggctcattatccggctgcccattctctttgccattggggtgaacttcctcatctttgttcgggtcatctgcatcgtggtatccaaactgaaggccaatctcatgtgcaagacagacatcaaatgcagacttgccaagtccacgctgacactcatccccctgctggggactcatgaggtcatctttgcctttgtgatggacgagcacgcccgggggaccctgcgcttcatcaagctgtttacagagctctccttcacctccttccaggggctgatggtggccatattatactgctttgtcaacaatgaggtccagctggaatttcggaagagctgggagcgctggcggcttgagcacttgcacatccagagggacagcagcatgaagcccctcaagtgtcccaccagcagcctgagcagtggagccacggcgggcagcagcatgtacacagccacttgccaggcctcctgcagctgagactccagcgcctgccctccctggggtccttgctgcagccgggtggccaatccagcctcccccacaaatacc

SEQ ID NO: 12 - DNA, 3800 bp, Human
ggcacgagccggtctggcttgggcaggctgcccgggccgtggcaggaagccggaagcagccgcggccccagttcgggagacatggcgggcgttaaagctctcgtggcattatccttcagtggggctattggactgacttttcttatgctgggatgtgccttagaggattatgggtgtacttctctgaagtaagatgatttgtcaaaaattctgtgtggttttgttacattgggaatttatttatgtgataactgcgtttaacttgtcatatccaattactccttggagatttaagttgtcttgcatgccaccaaattcaacctatgactacttccttttgcctgctggactctcaaagaatacttcaaattcgaatggacattatgagacagctgttgaacctaagtttaattcaagtggtactcacttttctaacttatccaaaacaactttccactgttgctttcggagtgagcaagatagaaactgctccttatgtgcagacaacattgaaggaaagacatttgtttcaacagtaaattctttagtttttcaacaaatagatgcaaactggaacatacagtgctggctaaaaggagacttaaaattattcatctgttatgtggagtcattatttaagaatctattcaggaattataactataaggtccatcttttatatgttctgcctgaagtgttagaagattcacctctggttccccaaaaaggcagttttcagatggttcactgcaattgcagtgttcatgaatgttgtgaatgtcttgtgcctgtgccaacagccaaactcaacgacactctccttatgtgtttgaaaatcacatctggtggagtaattttccagtcacctctaatgtcagttcagcccataaatatggtgaagcctgatccaccattaggtttgcatatggaaatcacagatgatggtaatttaaagatttcttggtccagcccaccattggtaccatttccacttcaatatcaagtgaaatattcagagaattctacaacagttatcagagaagctgacaagattgtctcagctacatccctgctagtagacagtatacttcctgggtcttcgtatgaggttcaggtgaggggcaagagactggatggcccaggaatctggagtgactggagtactcctcgtgtctttaccacacaagatgtcatatactttccacctaaaattctgacaagtgttgggtctaatgtttcttttcactgcatctataagaaggaaaacaagattgttccctcaaaagagattgtttggtggatgaatttagctgagaaaattcctcaaagccagtatgatgttgtgagtgatcatgttagcaaagttacttttttcaatctgaatgaaaccaaacctcgaggaaagtttacctatgatgcagtgtactgctgcaatgaacatgaatgccatcatcgctatgctgaattatatgtgattgatgtcaatatcaatatctcatgtgaaactgatgggtacttaactaaaatgacttgcagatggtcaaccagtacaatccagtcacttgcggaaagcactttgcaattgaggtatcataggagcagcctttactgttctgatattccatctattcatcccatatctgagcccaaagattgctatttgcagagtgatggtttttatgaatgcattttccagccaatcttcctattatctggctacacaatgtggattaggatcaatcactctctaggttcacttgactctccaccaacatgtgtccttcctgattctgtggtgaagccactgcctccatccagtgtgaaagcagaaattactataaacattggattattgaaaatatcttgggaaaagccagtctttccagagaataaccttcaattccagattcgctatggtttaagtggaaaagaagtacaatggaagatgtatgaggtttatgatgcaaaatcaaaatctgtcagtctcccagttccagacttgtgtgcagtctatgctgttcaggtgcgctgtaagaggctagatggactgggatattggagtaattggagcaatccagcctacacagttgtcatggatataaaagttcctatgagaggacctgaattttggagaataattaatggagatactatgaaaaaggagaaaaatgtcactttactttggaagcccctgatgaaaaatgactcattgtgcagtgttcagagatatgtgataaaccatcatacttcctgcaatggaacatggtcagaagatgtgggaaatcacacgaaattcactttcctgtggacagagcaagcacatactgttacggttctggccatcaattcaattggtgcttctgttgcaaattttaatttaaccttttcatggcctatgagcaaagtaaatatcgtgcagtcactcagtgcttatcctttaaacagcagttgtgtgattgtttcctggatactatcacccagtgattacaagctaatgtattttattattgagtggaaaaatcttaatgaagatggtgaaataaaatggcttagaatctcttcatctgttaagaagtattatatccatgatcattttatccccattgagaagtaccagttcagtctttacccaatatttatggaaggagtgggaaaaccaaagataattaatagtttcactcaagatgatattgaaaaacaccagagtgatgcaggtttatatgtaattgtgccagtaattatttcctcttccatcttattgcttggaacattattaatatcacaccaaagaatgaaaaagctattttgggaagatgttccgaaccccaagaattgttcctgggcacaaggacttaattttcagaagccagaaacgtttgagcatctttttatcaagcatacagcatcagtgacatgtggtcctcttcttttggagcctgaaacaatttcagaagatatcagtgttgatacatcatggaaaaataaagatgagatgatgccaacaactgtggtctctctactttcaacaacagatcttgaaaagggttctgtttgtattagtgaccagttcaacagtgttaacttctctgaggctgagggtactgaggtaacctatgaggccgaaagccagagacaaccctttgttaaatacgccacgctgatcagcaactctaaaccaagtgaaactggtgaagaacaagggcttataaatagttcagtcaccaagtgcttctctagcaaaaattctccgttgaaggattctttctctaatagctcatgggagatagaggcccaggcattttttatattatcagatcagcatcccaacataatttcaccacacctcacattctcagaaggattggatgaacttttgaaattggagggaaatttccctgaagaaaataatgataaaaagtctatctattatttaggggtcacctcaatcaaaaagagagagagtggtgtgcttttgactgacaagtcaagggtatcgtgcccattcccagccccctgtttattcacggacatcagagttctccaggacagttgctcacactttgtagaaaataatatcaacttaggaacttctagtaagaagacttttgcatcttacatgcctcaattccaaacttgttctactcagactcataagatcatggaaaacaagatgtgtgacctaactgtgtaatttcactgaagaaaccttcagatttgtgttataatgggtaatataaagtgtaatagattatagttgtgggtgggagagagaaaagaaaccagagtccaaatttgaaaat

SEQ ID NO: 13 - DNA, 5397 bp, Human
gaattcggcacgagcacttccttctcggctagattatctgaaactgttgtcggttcttgagatgatactaccaccgaatgtctgtgtttcattgtctagtccaacctgtattgtggatatctacaacgttccggcaatagttttgcaggtgcatcacatttttgtttttgttttgggaggaaaagggagggcacggcagccaggcttcatattcctacaagtgcatgcttcaagattactgtacttacagtgtttccaacatcttctcataaaaggggaaagcttcatagcctcaaccatgaaggaaaccagtcgcatagggcatggagctggagaactataaacagcccgtggtgctgagagaggacaactgccgaaggcgccggaggatgaagccgcgcagtgctgccagcctgtcctccatggagctcatccccatcgagttcgtgctgcccaccagccagcgcaaatgcaagagccccgaaacggcgctgctgcacgtggccggccacggcaacgtggagcagatgaaggcccaggtgtggctgcgagcgctggagaccagcgtggcggcggacttctaccaccggctgggaccgcatcacttcctcctgctctatcagaagaaggggcagtggtacgagatctacgacaagtaccaggtggtgcagactctggactgcctgcgctactggaaggccacgcaccggagcccgggccagatccacctggtgcagcggcacccgccctccgaggagtcccaagccttccagcggcagctcacggcgctgattggctatgacgtcactgacgtcagcaacgtgcacgacgatgagctggagttcacgcgccgtggcttggtgaccccgcgcatggcggaggtggccagccgcgaccccaagctctacgccatgcacccgtgggtgacgtccaagcccctcccggagtacctgtggaagaagattgccaacaactgcatcttcatcgtcattcaccgcagcaccaccagccagaccattaaggtctcacccgacgacacccccggcgccatcctgcagagcttcttcaccaagatggccaagaagaaatctctgatggatattcccgaaagccaaagcgaacaggattttgtgctgcgcgtctgtggccgggatgagtacctggtgggcgaaacgcccatcaaaaacttccagtgggtgaggcactgcctcaagaacggagaagagattcacgtggtactggacacgcctccagacccggccctagacgaggtgaggaaggaagagtggccgctggtggacgactgcacgggagtcaccggctaccatgagcagcttaccatccacggcaaggaccacgagagtgtgttcaccgtgtccctgtgggactgcgaccgcaagttcagggtcaagatcagaggcattgatatccccgtcctgcctcggaacaccgacctcacagtttttgtagaggcaaacatccagcatgggcaacaagtcctttgccaaaggagaaccagccccaaacccttcacagaggaggtgctgtggaatgtgtggcttgagttcagtatcaaaatcaaagacttgcccaaaggggctctactgaacctccagatctactgcggtaaagctccagcactgtccagcaaggcctctgcagagtcccccagttctgagtccaagggcaaagttcggcttctctattatgtgaacctgctgctgatagaccaccgtttcctcctgcgccgtggagaatacgtcctccacatgtggcagatatctgggaagggagaagaccaaggaagcttcaatgctgacaaactcacgtctgcaactaacccagacaaggagaactcaatgtccatctccattcttctggacaattactgccacccgatagccctgcctaagcatcagcccacccctgacccggaaggggaccgggttcgagcagaaatgcccaaccagcttcgcaagcaattggaggcgatcatagccactgatccacttaaccctctcacagcagaggacaaagaattgctctggcattttagatacgaaagccttaagcacccaaaagcatatcctaagctatttagttcagtgaaatggggacagcaagaaattgtggccaaaacataccaattgttggccagaagggaagtctgggatcaaagtgctttggatgttgggttaacaatgcagctcctggactgcaacttctcagatgaaaatgtaagagccattgcagttcagaaactggagagcttggaggacgatgatgttctgcattaccttctacaattggtccaggctgtgaaatttgaaccataccatgatagcgcccttgccagatttctgctgaagcgtggtttaagaaacaaaagaattggtcactttttgttttggttcttgagaagtgagatagcccagtccagacactatcagcagaggttcgctgtgattctggaagcctatctgaggggctgtggcacagccatgctgcacgactttacccaacaagtccaagtaatcgagatgttacaaaaagtcacccttgatattaaatcgctctctgctgaaaagtatgacgtcagttcccaagttatttcacaacttaaacaaaagcttgaaaacctgcagaattctcaactccccgaaagctttagagttccatatgatcctggactgaaagcaggagcgctggcaattgaaaaatgtaaagtaatggcctccaagaaaaaaccactatggcttgagtttaaatgtgccgatcctacagccctatcaaatgaaacaattggaattatctttaaacatggtgatgatctgcgccaagacatgcttattttacagattctacgaatcatggagtctatttgggagactgaatctttggatctatgcctcctgccatatggttgcatttcaactggtgacaaaataggaatgatcgagattgtgaaagacgccacgacaattgccaaaattcagcaaagcacagtgggcaacacgggagcatttaaagatgaagtcctgaatcactggctcaaagaaaaatcccctactgaagaaaagtttcaggcagcagtggagagatttgtttattcctgtgcaggctactgtgtggcaacctttgttcttggaataggcgacagacacaatgacaatattatgatcaccgagacaggaaacctatttcatattgacttcgggcacattcttgggaattacaaaagtttcctgggcattaataaagagagagtgccatttgtgctaacccctgacttcctctttgtgatgggaacttctggaaagaagacaagcccacacttccagaaatttcaggacatctgtgttaaggcttatctagcccttcgtcatcacacaaacctactgatcatcctgttctccatgatgctgatgacaggaatgccccagttaacaagcaaagaagacattgaatatatccgggatgccctcacagtggggaaaaatgaggaggatgctaaaaagtattttcttgatcagatcgaagtttgcagagacaaaggatggactgtgcagtttaattggtttctacatcttgttcttggcatcaaacaaggagagaaacattcagcctaatactttaggctagaatcaaaaacaagttagtgttctatggtttaaattagcatagcaatcatcgaacttggatttcaaatgcaatagacattgtgaaagctggcatttcagaagtatagctcttttcctacctgaactcttccctggagaaaagatgttggcattgctgattgtttggttaagcaatgtccagtgctaggattatttgcaggtttggttttttctcatttgtctgtggcattggagaatattctcggtttaaacagactaatgacttccttattgtccctgatattttgactatcttactattgagtgcttctggaaattctttggaataattgatgacatctattttcatctgggtttagtctcaattttggttatctttgtgttcctcaagctctttaaagaaaaagatgtaatcgttgtaacctttgtctcattccttaaatgatgcttccaaacatctccttagtgtctgcaggtgttagtggtgtgctaaaagcaaggaaagcgagttagtcttttcagtgtcttttgcaattcaattcttttgtcatgtataactgagacacacaaacacagcaggagaaatctaaaccgttgtgccttgaccttcctctgctggtcttgttccagggttatgaatatgaaaaaatagagatgagactttttgtgtcaactctgtccacaagagtgagttatctagtatgattagtatagctttctccagcatggcagcaggaagtaactacagggcctcttttatgcctgacatttcttcccttcctttttccctgcctccctttttcatcaattgcaatgctcccacaactctttacagacttgtgaaatcttcaagaacacctttactctataactcaaaaattagttgaaaaataattacttctcaaggattattagaatcttaggtacttatttgtaaagatgtttagtgacttttttttcaagtatctataaaggaggcagattctagaaaatatgaattagtttccaaatgccttaattttaaactttggcctgaacagttttttctttttcttaatggaagaagatatttaatatcttaaaaatattccaagttaggaagaacactacttgccttatccatttcccatttaaaggacttttaaactttgacacagtccttcagatttcctgaaaatccttgaaatatcttactttaaaaatattttcatctctgaaatatctcgttatttattggaggtattgtttaaccttagatagaccattaaattatttataaaatattttgtaattactgtagctaatacattacatagaaaaaactatgttaacagtgtctctgtttaagtataatcagatataaatatataacttaattttttaattttaaaaaatagatacctgtttgactttgaggtagtccaggcctttttctttttttttttttttaatgtgtgcaaaagcccaaaggttcctaagcctggctgcaaagaagaatcaacagggacactttttaaaaacactcttatcagcctggggcaacacagtgagactccatctcttaaaaaaaaaattagctgggtatagtggtatgtgcctgtagtcccaggtactcaggaggctgaggcaggaggattgcctgagcccaggaggtggaaactgcagagagtcatgatcatgtccttacactccagcctggataacagagcgagaccctgtctcaaaaaaaaaaaaaaaaaaaaaaaaaaaactcgag

SEQ ID NO: 14 - DNA, 2218 bp, Human
cttctctctccattcagtgcacgcgttactttggctaaaaggaggtgagcggcactctgcccttccagagcaagcatggagcaacaggatcagagcatgaaggaagggaggctgacgcttgtgcttgccctggcaaccctgatagctgcctttgggtcatccttccagtatgggtacaacgtggctgctgtcaactccccagcactgctcatgcaacaattttacaatgagacttactatggtaggaccggtgaattcatggaagacttccccttgacgttgctgtggtctgtaaccgtgtccatgtttccatttggagggtttatcggatccctcctggtcggccccttggtgaataaatttggcagaaaaggggccttgctgttcaacaacatattttctatcgtgcctgcgatcttaatgggatgcagcagagtcgccacatcatttgagcttatcattatttccagacttttggtgggaatatgtgcaggtgtatcttccaacgtggtccccatgtacttaggggagctggcccctaaaaacctgcggggggctctcggggtggtgccccagctcttcatcactgttggcatccttgtggcccagatctttggtcttcggaatctccttgcaaacgtagatggctggccgatcctgctggggctgaccggggtccccgcggcgctgcagctccttctgctgcccttcttccccgagagccccaggtacctgctgattcagaagaaagacgaagcggccgccaagaaagccctacagacgctgcgcggctgggactctgtggacagggaggtggccgagatccggcaggaggatgaggcagagaaggccgcgggcttcatctccgtgctgaagctgttccggatgcgctcgctgcgctggcagctgctgtccatcatcgtcctcatgggcggccagcagctgtcgggcgtcaacgctatctactactacgcggaccagatctacctgagcgccggcgtgccggaggagcacgtgcagtacgtgacggccggcaccggggccgtgaacgtggtcatgaccttctgcgccgtgttcgtggtggagctcctgggtcggaggctgctgctgctgctgggcttctccatctgcctcatagcctgctgcgtgctcactgcagctctggcactgcaggacacagtgtcctggatgccatacatcagcatcgtctgtgtcatctcctacgtcataggacatgccctcgggcccagtcccatacccgcgctgctcatcactgagatcttcctgcagtcctctcggccatctgccttcatggtggggggcagtgtgcactggctctccaacttcaccgtgggcttgatcttcccgttcatccaggagggcctcggcccgtacagcttcattgtcttcgccgtgatctgcctcctcaccaccatctacatcttcttgattgtcccggagaccaaggccaagacgttcatagagatcaaccagattttcaccaagatgaataaggtgtctgaagtgtacccggaaaaggaggaactgaaagagcttccacctgtcacttcggaacagtgactctggagaggaagccagtggagctggtctgccaggggcttcccactttggcttatttttctgacttctagctgtctgtgaatatccagaaataaaacaactctgatgtggaatgcagtcctcatctccagcctccccaccccagtgggaactgtgcaaagggctgccttgctgttcttgaagctgggctgtctctctccatgttggcctgtcaccagacccgagtcaattaaacagctggtcctccactttgctggttcagccttcgtgtggctcctggtaacgtggctccaccttgatgggtcaacctttgtgtggctcctggtaacataacaacaacagttactatagtggtgagatggaaggaatcaaattttgccagagaaactaactcggtggccccaacaggtcttccggggccatgggcatttgtttagagccaaattcatcctcttaccagatccttttccagaaatacctgtctaggaaggtgtgatgtcagaaacaatgacatccagaaagctgaggaacaggttcctgtggagacactgagtcagaattcttcatccaaattattttgttagtggaaaatggaattgcttctgtgtagtcaataaaatgaacctgatcacttttc

SEQ ID NO: 15 - DNA, 2090 bp, Human
caaaggcaccatgcctctgcgggatgaaaccctccgagaggtgtgggcctctgacagtgggcatgaagaagaaagcctgagcccggaggccccgcggcgccccaaacagcgacccgccccggcacagaggctaaggaagaagaggacggaggcccccgaatccccctgccccacgggatccaagccccggaagcccggagctgggcggagggggaggccgcgggaggagccttccccagacccagcccaggcccgggcgccgcagacggtctacgccaggttcctcagggaccccgaggccaagaagcgcgacccccgggaaacctttctggtagcccgtgccccagacgcggaggacgaggaggaggaggaagaggaggacgaggaggacgaggaagaggaggcagaggaaaagaaagagaaaatccttctgcctcccaagaagcccctgagagagaagagctccgcagacctgaaggagaggagggccaaggcccagggcccaaggggagacctgggaagccctgaccccccaccgaaacctctgcgtgttaggaataaggaagctccagcaggggaggggaccaagatgagaaagaccaagaagaaagggtctggggaggccgacaaggacccctcagggagcccagccagtgcgaggaagagcccagcagccatgtttctggttggggaaggcagtcctgacaagaaagccctgaagaagaaaggcactcccaaaggcgcgaggaaggaggaagaagaggaggaggaggcagctacggtgataaagaacagcaatcaaaagggcaaagccaaaggaaaaggcaaaaagaaagcgaaggaggagagggccccgtctccccccgtggaggtggacgaaccccgggagtttgtgctccggcctgccccccagggccgcacggtgcgctgccggctgacccgggacaaaaagggcatggatcgaggcatgtatccctcctacttcctgcacctggacacggagaagaaggtgttcctcttggctggcaggaaacgaaaacggagcaagacagccaattacctcatctccatcgaccctaccaatctgtcccgaggaggggagaatttcatcgggaagctgaggtccaacctcctggggaaccgcttcacggtctttgacaacgggcagaacccacagcgtgggtacagcactaatgtggcaagccttcggcaggagctggcagctgtgatctatgaaaccaacgtgctgggcttccgtggcccccggcgcatgaccgtcatcattcctggcatgagtgcggagaacgagagggtccccatccggccccgaaatgctagtgacggcctgctggtgcgctggcagaacaagacgctggagagcctcatagaactgcacaacaagccacctgtctggaacgatgacagtggctcctacaccctcaacttccaaggccgggtcacccaggcctcagtcaagaacttccagattgtccacgctgatgaccccgactatatcgtgctgcagttcggccgcgtggcggaggacgccttcaccctagactaccggtacccgctgtgcgccctgcaggccttcgccatcgccctctccagtttcgacgggaagctggcttgcgagtgaccccagcagcccctcagcgcccccagagcccgtcagcgtgggggaaaggattcagtggaggctggcagggtccctccagcaaagctcccgcggaaaactgctcctgtgtcggggctgacctctcactgcctctcggtgacctccgtcctctccccagcctggcacaggccgaggcaggaggagcccggacggcgggtaggacggagatgaagaacatctggagttggagccgcacatctggtttcggagttcgcctgcgccgctgtgcccccctcctccccgcgccccagtcaattcctgtccgggagcagtagtcattgttgttttaacctcccctctccccgggaccgcgctagggctccgaggagctggggcgggctaggaggagggggtaggtgatgggggacgagggccaggcacccacatccccaataaagccgcgtccttggca

SEQ ID NO: 16 - DNA, 3939 bp, Human
ggtcagggtagttccccaaccctccctttcgtgaattccccctcgtcctcgctcaccttaaaaccatcgtgcatcaccatggcgagttgctccttcactcgcgaccaagcgacaagaagactaagaggtgcagcagcggcggcagcggcagctctagcagcagtggtgaccaccccgcttctttcctcgggaaccccgaccgcactcattgggaccgggtcgtcttgtccgggagccatgtggctctccacggccactggctcccggtcagactccgagtccgaagaggaggacctgcccgtcggggaggaagtctgcaaacgcggctacctgcggaaacagaagcatgggcacaggcgctacttcgtgctcaaactcgagactgctgacgccccagctcggctggaatactacgaaaatgccaggaagttccggcacagtgtccgcgccgcggcggctgcagcagcggcggccgcctctggcgccgcgatccccccgctcattccaccgcggcgcgtgatcaccctataccagtgcttttccgtgagccagcgagcagatgcaaggtaccgacacctcattgctcttttcacccaagacgaatacttcgcgatggtggccgagaacgagtcggagcaggaaagctggtacttgctgctcagccgcctcatcctcgagagcaagcgccgccgctgcggcacgctcggcgcgcagccggacggagagccggccgcgctggcggcggcagcggcggcggagccacccttctataaagatgtgtggcaggtaatagtcaaacccagggggctggggcacagaaaagagctgagcggcgtgttccggctgtgtctaaccgacgaggaggtcgtgtttgtgaggctgaacaccgaagtggccagcgtggtcgtccagctcctgagcatccgtcgctgtggacactcggagcagtatttcttcttggaagtaggcaggtccactgtcatcggtccgggagagctctggatgcaggtcgatgactgtgtggttgcccaaaacatgcatgagctgtttttggagaagatgagagccttgtgtgcagacgaatacagagcccgctgccgcagctacagcatcagcatcggcgcccacctgttaaccctgctgtccgctaggaggcacctgggcttggtgccgctcgagccgggaggctggctcagaaggtcccgctttgagcagttttgccacctcagggccatcggcgacggggaagacgagatgcttttcaccaggcgcttcgtaacacccagcgagcctgtggcccactccaggcgaggaagactgcacctgcccagagggcgcaggtcaaggagagcggtttcagtgccggccagcttttttcgccgcttagcacccagcccagcacgtccccggcaccctgcagaagccccgaacaatggagctcgcctgtcttctgaagtgtctggttctggctctggcaactttggggaggaaggcaatccccagggcaaagaagatcaggaaggaagcggaggtgactacatgcctatgaacaattggggctcaggaaatggccggggctcaggaggtggccagggctcaaatggccaaggctccagtagccatagctcgggaggaaaccagtgttcaggcgagggacagggatcccgaggtggtcagggctcaaatggccagggctcaggaggaaaccagtgctctagagatggccagggcaccgcaggtgggcacggttcaggtggtggccagagacctggaggtgggcatggctcaggtggtggccagggacctggagatggccatggctcaggtggtggcaagaactctggggggggcaaaggctcaggaagtgggaaaggatccgatggtgatggtgaacgtggaaaatctctgaagaaaagatcctattttggcaaattaactcaaagcaagcaacagcaaatgccaccacctccaccacctcctcctccacccccaccagctggaggaactggtggaaaagggaagtctgggggaagattcagactttatttttgtgttgacagaggagccacgaaagaatgcaaagaagccaaagaagtgaaagatgcagagatcccagaaggtgcagctcgaggtccccacagagccagagcttttgatgaagatgaggatgacccatacgtgccaatgaggccaggggtggccacccctcttgtaagctccagtgattatatgccaatggctcctcaaaatgtctctgcttcaaaaaagcgccactctcgatccccttttgaagattcaagagggtacatgatgatgtttcccagagtgagcccaccacctgctccgagtcctccaaaagcacctgatactaataaagaggatgactcaaaggacaatgacagtgagagtgactacatgtttatggctcctggagccggtgcaattccaaaaaaccccagaaatcctcagggtggctcttcctccaaaagttggagctcctacttctctctaccaaacccttttcggagctcacctttgggacagaatgacaacagtgagtatgtgccaatgttacctggaaagttcctggggaggggcctagacaaagaagtctcctataactgggaccccaaagatgcagcttcaaagccttcaggtgagggatcattctcaaagcctggagatgggggatcaccttcaaagccttcagatcatgagcccccaaagaataaagctaagagacctaaccgactttcttttattacaaaaggatataaaatcaagccaaaaccacaaaagcccacacatgagcagagagaagctgacagctctagtgactacgtcaacatggacttcactaaaagagagagcaatacaccagctccctctactcaaggactaccagattcgtggggcataattgctgaacccagacagtcagccttttctaattatgtgaatgttgagtttggagtgccatttccaaatccagcaaacgacctctcagatcttttaagagctataccacgtgccaaccccttatctctggacagtgctaggtggccacttcctccccttcccctcagtgctacaggtagcaatgctattgaggaagagggtgactacattgaagtaattttcaactcagcaatgacaccagccatggctcttgctgacagtgccattcgctatgatgctgaaacaggtcgaatctatgtggtcgacccattttctgagtgctgtatggatatttctctctcccccagccgatgttctgaaccaccacctgtagctaggctgctgcaggaagaagagcaggagagaagacgcccacaaagccgttctcaaagtttctttgcagcagccagagccgctgtctctgcttttccaacagacagcctcgagagagacctttccccatcctcagccccggctgtcgcttcggctgcagagccgactttagccctcagccaagttgtagctgcggcctccgcgctcgccgcagccccgggcatcggcgcagcagccgcagctgctggatttgactccgcctctgcccgctggtttcaacctgttgctaatgctgctgatgccgaagcagtaaggggagcccaagacgttgccggtggctcgaaccctggagcccacaacccatctgcaaaccttgccagaggtgataaccaggctggcggggctgccgctgcagctgccgctccggaaccaccacctcgcagtcgccgggtgccaagacccccggagagagaagattctgacaacgacgacgacactcacgtgagaatggattttgccagacgtgataatcagttcgactctcccaaaagaggtcggtaattttagaattaatttccctaaagtgaatggtcattgtctaatgattcgatgcgctacagtctacagtgttagggtatatttcattaa

SEQ ID NO: 17 - DNA, 3975 bp, Human
atggcgagcccgccgcggcacgggccgcccgggccggcgagcggagacggccccaacctcaacaacaacaacaacaacaacaaccacagcgtgcgcaagtgcggctacctgcgcaagcagaagcatggccacaagcgcttcttcgtgctgcgcggacccggcgcgggcggcgacaaggccacggcgggcggggggtcggcgccgcaaccgccgcggctcgagtactacgaaagcgaaaaaaattggcggagcaaggcaggcgcgccgaaacgggtgatcgctctcgactgctgcctgaacatcaacaagcgcgccgaccccaagcacaagtacctgatcgccctctacaccaaggacgagtacttcgccgtggccgccgagaacgagcaggagcaggagggctggtaccgcgcgctcaccgacctggtcagcgagggccgcgcggccgccggagacgcgccccccgccgccgcgcccgccgcgtcctgcagcgcctccctgcccggcgccgtgggcggttctgccggcgccgccggggccgaggacagctacgggctggtggctcccgccacggccgcctaccgtgaggtgtggcaggtgaacctgaagcccaagggtctgggccagagcaagaacctgacgggggtgtaccgtctgtgcctgtctgcgcgcaccatcggcttcgtgaagctcaactgcgagcagccgtcggtgacgctgcagctcatgaacatccgccgctgcggccactcggacagcttcttcttcatcgaggtgggccgctcggccgtcacaggccccggcgagctgtggatgcaggcggacgactcggtggtggcgcagaacatccacgagaccatcctggaggccatgaaggcgctcaaggagctcttcgagttccggccgcgcagtaagagccaatcgtcggggtcgtcggccacgcaccccatcagcgtccccggcgcgcgccgccaccaccacctggtcaacctgccccccagccagacgggcctggtgcgccgctcgcgcaccgacagcctggccgccaccccgccggcggccaagtgcagctcgtgccgggtgcgcaccgccagcgagggcgacggcggcgcggcggcgggagcggcggccgcgggcgccaggccggtgtcggtggctgggagccccctgagccccgggccggtgcgcgcgcccctgagccgctcgcacaccctgatcggcggctgccgggccgcgggaacaaagtggcattgcttcccggcagggggcggattgcaacacagccgttcgatgtccatgcccgtggagcatttgccgccagccgccaccagcccgggttccttgtcttccagcagcgaccacggttggggttcttacccgccgccgcccggcccgcacccgcttttgccgcatccgttgcaccacggccccggccagcggccttccagcggcagcgcttccgcttcgggctcccccagcgaccccggtttcatgtccctggacgagtacggctccagcccaggcgacctgcgcgccttctgcagccaccgaagcaacacgcccgagtccatcgcggagacgcccccggcccgagacggcggcggcggcggtgagttttacgggtacatgaccatggacaggcccctgagccactgtggccgctcctaccgccgggtctcgggggacgcggcccaggacctggaccgagggctgcgcaagaggacctactccctgaccacgccagcccggcagcggccggtgccccagccctcctctgcctcgctggatgaatacaccctgatgcgggccaccttctcgggcagcgcgggccgcctctgcccgtcctgccccgcgtcctctcccaaggtggcctaccacccctacccagaggactacggagacatcgagatcggctcccacaggagctccagcagcaacctgggggcagacgacggctacatgcccatgacgcccggcgcggcccttgcgggcagtgggagcggcagctgcaggagcgacgactacatgcccatgagccccgccagcgtgtccgcccccaagcagattttgcagcccagggccgccgccgccgccgccgccgccgtgccttttgcggggcctgcggggccagcacccacctttgcggcgggcaggacattcccggcgagtgggggcggctacaaggccagctcgcccgccgagagctcccccgaggacagtgggtacatgcgcatgtggtgcggttccaagctgtccatggagcatgcagatggcaagctgctgcccaacggggactacctcaacgtgtcccccagcgacgcggtcaccacgggcaccccgcccgacttcttctccgcagccctgcaccccggcggggagccgctcaggggcgttcccggctgctgctacagctccttgccccgctcctacaaggccccctacacctgtggcggggacagcgaccagtacgtgctcatgagctcccccgtggggcgcatcctggaggaggagcgtctggagcctcaggccaccccagggcccacccaggcggccagcgccttcggggccggccccacgcagccccctcaccctgtagtgccttcgcccgtgcggcctagcggcggccgcccggagggcttcttgggccagcgcggccgggcggtgaggcccacgcgcctgtccctggaggggctgcccagcctgcccagcatgcacgagtacccactgccaccggagcccaagagccccggcgagtacatcaacatcgactttggcgagcccggggcccgcctgtcgccgcccgcgcctcccctgctggcgtcggcggcctcgtcctcatcgctattgtccgccagcagcccggccttgtcgttgggctcaggcaccccgggcaccagcagcgacagccggcagcggtctccgctctccgactacatgaacctcgacttcagctcccccaagtctcctaagccgggcgccccgagcggccaccccgtgggctccttggacggcctcctgtcccccgaggcctcctccccgtatccgccgttgcccccgcgtccgtccgcgtccccgtcgtcgtctctgcagccgccgccaccgccgccggccccgggggagctgtaccgcctgccccccgcctcggccgttgccaccgcccagggcccgggcgccgcctcatcgttgtcctcggacaccggggacaatggtgactacaccgagatggcttttggtgtggccgccaccccgccgcaacctatcgcggcccccccgaagccagaagctgcccgcgtggccagcccgacgtcgggcgtgaagaggctgagcctcatggagcaggtgtcgggagtcgaggccttcctgcaggccagccagcccccggacccccaccgcggcgccaaggtcatccgcgcagacccgcaggggggccgccgccgccacagttccgagaccttctcctccaccacgacggtcacccccgtgtccccgtccttcgcccacaaccccaagcgccacaactcggcctccgtggaaaatgtctctctcaggaaaagcagcgagggcggcgtgggtgtcggccctggagggggcgacgagccgcccacctccccacgacagttgcagccggcgccccctttggcaccgcagggccggccgtggaccccgggtcagcccgggggcttggtcggttgtcctgggagcggtggatcgcccatgcgcagagagacctctgccggtttccagaatggtctcaagtacatcgccatcgacgtgagggaggagcccgggctgccaccccagccgcagccgccgccgccgccgcttcctcagccgggagacaagagctcctggggccggacccgaagcctcgggggtctcatcagcgctgtgggcgtcggcagcacccgcggcgggtgcggggggccgggtcccggtgcccctgccccctgcccaacaacctacgcccagcattga

SEQ ID NO: 18 - DNA, 1731 bp, Human
ggagcctcggttcccctcgggcggctgaaggaggggctgagcctcaggacccctaggccaggccgtgttgaaagcagataccccgaggcctcgcccagcctgcgctggagggaagaaggcgctggaggagcaccagcgaaagcagccagtctgagatattgacactacagaaaaaactgacagcttactccttgtattgatgctactcttctctacaaatatagactccgttccctaccacagccttatagttctgccccagagacaagtatgaataccacagacaacggtgtcaactgtctgtgtgctatctgtggggacagagcaacaggaaaacactatggggcatccacctgtgatgggtgcaagggtttcttcagacgcagcattcgtaagagtcacatttattcttgcaggttcagtcggcaatgtgttgttgacaaggacaaaaggaatcaatgtagatattgtcgattaagaaagtgttttagagcgggaatgaaaaaagaagctgtacaaaatgaacgtgacagaataagcaccagaagaagcacatttgatggcagcaacatcccctccattaacacactggcacaagctgaagttcggtctcgccagatctcagtctcaagccctgggtcaagcactgacataaacgttaagaaaattgcaagtattggtgatgtctgtgaatctatgaaacagcagctcttagtcttggtggaatgggctaaatatattcctgccttctgtgaattaccattggatgatcaggtggcactgttgagagctcacgcaggggagcacttactgcttggagctacaaagagatccatgatgtataaagatattttgcttttgggaaacaactatgttattcaccgcaacagctgtgaagttgagattagccgtgtggccaatcgtgttctagatgagctggttagaccatttcaagaaatccagattgatgacaatgagtatgcttgtttaaaggcaattgtattttttgatccagatgcaaaagggctaagcgatccagtaaaaattaagaacatgaggttccaagtgcagatcggtttggaggactacatcaatgatcggcagtatgactcccgggggaggtttggagagttgcttctgctcctgcccacactgcagagcatcacgtggcaaatgattgagcaaatacagtttgttaaactttttgggatggttaaaattgacaatctacttcaggaaatgctattaggtggggcttccaatgatggcagtcatctccatcatccaatgcatccacatttgtctcaagacccattaactggacaaactatacttttaggtcccatgtcaacactggttcatgcagaccagatctcaactcctgaaaccccactcccttccccaccacaaggctctgggcaagaacagtacaaaatagctgcaaaccaagcatcagtcatttcacaccagcatctctccaaacaaaagcaattgtgaaaatgtgtttacttcagaacggcactacataaatgtgaaaagttgttgatcttgaaatatctcaagatagcacttttggcaaactcttagccaaggcttcttcattggtgctgttataagatggtatcctattttcttgtttatacgttcattctatttgttattgctactatgtgaaactttcacatgcaaccaatgtatatctgagtttgaaggatgtttatatagggtagg

SEQ ID NO: 19 - DNA, 1277 bp, Human
aagctgcttccctggagacgggcggggaggccaaacttcctgctgaagctctgtggcctcttttggggtgggggcgggggtccaggcagaaagaaactgtctgctgctcaagacccacaggacgcccggaagactaaatgatcactgcccccagtgaatatggtgaagaagctggtgatggcccagaagcggggagagacacgagccctttgcctgggtgtaaccatggtggtgtgtgccgtcatcacctactacatcctggtcacgactgtgctgcccctctaccagaaaagcgtgtggacccaggaatccaagtgccacctgattgagaccaacatcagggaccaggaggagctgaagggcaagaaggtgccccagtacccatgcctgtgggtcaacgtgtcagctgccggcaggtgggctgtgctgtaccacacggaggacactcgggaccagaaccagcagtgctcctacatcccaggcagcgtggacaattaccagacggcccgggccgacgtggagaaggtcagagccaaattccaagagcagcaggtcttctactgcttctccgcacctcgggggaacgaaaccagcgtcctattccagcgcctctacgggccccaggccctcctcttctccctcttctggcccaccttcctgctgaccggtggcctcctcattatcgccatggtgaagagcaaccagtacctgtccatcctggcggcccagaagtagagccatccatccatgccataccacttgtcagggcacaggggactggctgggcccccagggctgctccccacttgcagcacaatgccttctccacctgccctcccactcttccagtccaatccacgctgtcttctgttgcaggactaacctttgagaaatccttttgtgaagtcattgcctgctcaagaatgtacagtggctccccaatgccttggaggccataaggccagccagttctagctctctattacctgtccccactcaactgactcatacctgtttccggctgcatcactatgtgccccacagagaacgatgatcgtcacctctgtgcctgagttctccctgttgtctcaaagcggtacccatcctcccccagaagctgtccccagcgagcctcccttctttgtttgaattctctaataagagcaacagcagctcccatttctagaacacatttacagtattactattttctaggatataaagtgccatatatatttttaattccaatattaataaatgtatgccaaacaacaata

SEQ ID NO: 20 - DNA, 1365 bp, Human
agaaacagaatcctaactatttctgaggaaactgcaggtccaaaatgtggctgcttttaacaatggcaagtttgatatctgtactggggactacacatggtttgtttggaaaattacatcctggaagccctgaagtgactatgaacattagtcagatgattacttattggggatacccaaatgaagaatatgaagttgtgactgaagatggttatattcttgaagtcaatagaattccttatgggaagaaaaattcagggaatacaggccagagacctgttgtgtttttgcagcatggtttgcttgcatcagccacaaactggatttccaacctgccgaacaacagccttgccttcattctggcagatgctggttatgatgtgtggctgggcaacagcagaggaaacacctgggccagaagaaacttgtactattcaccagattcagttgaattctgggctttcagctttgatgaaatggctaaatatgaccttccagccacaatcgacttcattgtaaagaaaactggacagaagcagctacactatgttggccattcccagggcaccaccattggttttattgccttttccaccaatcccagcctggctaaaagaatcaaaaccttctatgctctagctcctgttgccactgtgaagtatacaaaaagccttataaacaaacttagatttgttcctcaatccctcttcaagtttatatttggtgacaaaatattctacccacacaacttctttgatcaatttcttgctactgaagtgtgctcccgtgagatgctgaatctcctttgcagcaatgccttatttataatttgtggatttgacagtaagaactttaacacgagtcgcttggatgtgtatctatcacataatccagcaggaacttctgttcaaaacatgttccattggacccaggctgttaagtctgggaaattccaagcttatgactggggaagcccagttcagaataggatgcactatgatcagtcccaacctccctactacaatgtgacagccatgaatgtaccaattgcagtgtggaacggtggcaaggacctgttggctgacccccaagatgttggccttttgcttccaaaactccccaatcttatttaccacaaggagattcctttttacaatcacttggactttatctgggcaatggatgcccctcaagaagtttacaatgacattgtttctatgatatcagaagataaaaagtagttctggatttaaagaattatccgtttgtttttccaaaatactttattctctcatacatagtattttcataatgtttgacatgcagtgcttctttctgtaattttgactttagaaatatattggc

SEQ ID NO: 21 - DNA, 1450 bp, Human
atgctgcccccttggaccctcggccttctcctgctggccacagtcagaggaaaagaggtctgctacggacaacttggctgcttttctgatgaaaaaccatgggcaggaacccttcagcgacctgtaaaattacttccctggtcccccgaggacattgacacccgctttcttctgtacacaaatgaaaatccaaacaacttccaactaatcactggcacggaaccagacaccattgaggcttcaaacttccaactggaccgcaagacacgcttcatcatccatggcttcttagacaaggcggaggacagctggccatcggacatgtgcaagaaaatgtttgaagtggagaaggtgaactgcatctgtgtggactggaggcacgggtcccgggcaatgtacacccaagccgtgcaaaacattcgggttgttggggcggagacagctttcttaatacaagcactgtcgacgcagctagggtacagccttgaggacgtgcatgtcatcggccacagcctgggcgcgcacacggccgcggaggcgggcaggaggctggggggccgcgtgggcaggatcacagggctggatccagcagggccgtgcttccaggatgaacctgaggaggttcggttggatccatctgacgccgtgtttgtggatgtgattcacacagattcttctcccatagttccttccctaggtttcggaatgagccaaaaggtgggccatctggatttctttccaaatggaggaaaggaaatgcccggatgtaagaaaaatgtcctttcaaccattactgatattgatggaatatgggaaggaattggtggctttgtgtcttgcaatcacctaagaagcttcgagtattactcaagcagcgtcctcaaccctgatggcttcctgggctatccctgtgcctcctacgatgagtttcaggagagtaagtgtttcccttgtccagctgaaggatgccccaaaatggggcactatgctgaccaatttaaggggaaaacaagtgctgtggaacaaacctttttcctgaacacaggagagagtggtaactttactagttggagatataaggtatcagtcacactttctggaaaagagaaagtgaatgggtacatcaggattgctttgtatggaagtaatgaaaactcgaaacaatatgagattttcaaaggatccctcaaaccagatgcaagtcacacgtgtgctattgatgtggattttaatgttggaaaaatacagaaagttaaattcctctggaacaaacgtgggataaatctatctgagcccaaactgggggcttcccaaatcacagtgcaaagtggtgaagatgggactgagtataatttttgtagcagcgacactgtggaagaaaacgtcttgcaatctctttacccttgttaaaaacgtggtgcggctattgcggtaataaaatctttaatgc

SEQ ID NO: 22 - DNA, 1481 bp, Human
ctctggaacattagacaggatgctgatcttctggacaatcacacttttcctgctgggagcagccaaaggaaaagaagtttgctatgaggacctcgggtgcttttctgacactgagccctggggcgggacagcaatcaggcccctgaaaattctcccctggagccctgagaagatcggcacccgcttcctgctgtacaccaatgaaaacccaaacaactttcaaattctcctcctctctgatccatcaacaattgaggcatcaaattttcaaatggacagaaagacccggttcatcatccatggcttcatagacaaaggagatgagagctgggtgacagacatgtgcaagaaactgttcgaggtggaggaggtgaactgcatctgcgtggactggaagaagggctcccaagccacctacacacaggctgccaacaacgtgcgagtggtgggcgcccaggtggcccagatgctcgacatcctcttgacagagtatagctaccccccttccaaagttcacctcattggccacagcctgggagcccacgtggctggagaggcaggaagcaagactccaggcctgagcaggattacagggttggatcctgtagaagcaagtttcgagagtactcctgaagaggtgcgacttgatccctctgatgctgactttgttgatgtgattcacacggatgcagctcccctgatcccattcttgggttttggaacgaaccaacagatgggtcatcttgacttcttccccaatggaggagagagcatgccgggatgcaagaagaatgccctgtctcagatcgtggatctagatggcatctgggcgggaacccgggactttgtggcttgcaatcacctaagaagctacaagtattacttggaaagcatcctcaatcccgatgggtttgctgcatatccctgcacttcctacaagtcctttgagtctgacaagtgcttcccgtgtccagatcaaggatgcccacagatgggtcactatgctgataaatttgctggcaggacaagtgaagagcagcagaaattcttcttgaacacaggagaggctagcaatttcgctcgctggagatatggggtttccatcacactgtctggaagaacagccactggtcagatcaaagttgctttgtttggaaataagggaaacactcaccagtacagcatcttcagggggattctcaaaccaggctcaacccattcctatgagtttgatgcaaagctggatgttggaacaattgagaaagtcaagtttctttggaataacaatgtgataaatccaaccctccccaaagtgggtgccaccaagatcactgtgcaaaagggagaagagaagacagtgtacaacttctgtagcgaagacacagtgcgggaagacacgctgctcaccctcacgccctgctaagctcccggggcgacgaggctgctgcgttcacactaataaaatccactggtgcatctgt

SEQ ID NO: 23 - DNA, 2856 bp, Human
tagtcgcgggtccccgagtgagcacgccagggagcaggagaccaaacgacgggggtcggagtcagagtcgcagtgggagtccccggaccggagcacgagcctgagcgggagagcgccgctcgcacgcccgtcgccacccgcgtacccggcgcagccagagccaccagcgcagcgctgccatggagcccagcagcaagaagctgacgggtcgcctcatgctggctgtgggaggagcagtgcttggctccctgcagtttggctacaacactggagtcatcaatgccccccagaaggtgatcgaggagttctacaaccagacatgggtccaccgctatggggagagcatcctgcccaccacgctcaccacgctctggtccctctcagtggccatcttttctgttgggggcatgattggctccttctctgtgggccttttcgttaaccgctttggccggcggaattcaatgctgatgatgaacctgctggccttcgtgtccgccgtgctcatgggcttctcgaaactgggcaagtcctttgagatgctgatcctgggccgcttcatcatcggtgtgtactgcggcctgaccacaggcttcgtgcccatgtatgtgggtgaagtgtcacccacagcctttcgtggggccctgggcaccctgcaccagctgggcatcgtcgtcggcatcctcatcgcccaggtgttcggcctggactccatcatgggcaacaaggacctgtggcccctgctgctgagcatcatcttcatcccggccctgctgcagtgcatcgtgctgcccttctgccccgagagtccccgcttcctgctcatcaaccgcaacgaggagaaccgggccaagagtgtgctaaagaagctgcgcgggacagctgacgtgacccatgacctgcaggagatgaaggaagagagtcggcagatgatgcgggagaagaaggtcaccatcctggagctgttccgctcccccgcctaccgccagcccatcctcatcgctgtggtgctgcagctgtcccagcagctgtctggcatcaacgctgtcttctattactccacgagcatcttcgagaaggcgggggtgcagcagcctgtgtatgccaccattggctccggtatcgtcaacacggccttcactgtcgtgtcgctgtttgtggtggagcgagcaggccggcggaccctgcacctcataggcctcgctggcatggcgggttgtgccatactcatgaccatcgcgctagcactgctggagcagctaccctggatgtcctatctgagcatcgtggccatctttggctttgtggccttctttgaagtgggtcctggccccatcccatggttcatcgtggctgaactcttcagccagggtccacgtccagctgccattgccgttgcaggcttctccaactggacctcaaatttcattgtgggcatgtgcttccagtatgtggagcaactgtgtggtccctacgtcttcatcatcttcactgtgctcctggttctgttcttcatcttcacctacttcaaagttcctgagactaaaggccggaccttcgatgagatcgcttccggcttccggcaggggggagccagccaaagtgataagacacccgaggagctgttccatcccctgggggctgattcccaagtgtgagtcgccccagatcaccagcccggcctgctcccagcagccctaaggatctctcaggagcacaggcagctggatgagacttccaaacctgacagatgtcagccgagccgggcctggggctcctttctccagccagcaatgatgtccagaagaatattcaggacttaacggctccaggattttaacaaaagcaagactgttgctcaaatctattcagacaagcaacaggttttataatttttttattactgattttgttatttttatatcagcctgagtctcctgtgcccacatcccaggcttcaccctgaatggttccatgcctgagggtggagactaagccctgtcgagacacttgccttcttcacccagctaatctgtagggctggacctatgtcctaaggacacactaatcgaactatgaactacaaagcttctatcccaggaggtggctatggccacccgttctgctggcctggatctccccactctaggggtcaggctccattaggatttgccccttcccatctcttcctacccaaccactcaaattaatctttctttacctgagaccagttgggagcactggagtgcagggaggagaggggaagggccagtctgggctgccgggttctagtctcctttgcactgagggccacactattaccatgagaagagggcctgtgggagcctgcaaactcactgctcaagaagacatggagactcctgccctgttgtgtatagatgcaagatatttatatatatttttggttgtcaatattaaatacagacactaagttatagtatatctggacaagccaacttgtaaatacaccacctcactcctgttacttacctaaacagatataaatggctggtttttagaaacatggttttgaaatgcttgtggattgagggtaggaggtttggatgggagtgagacagaagtaagtggggttgcaaccactgcaacggcttagacttcgactcaggatccagtcccttacacgtacctctcatcagtgtcctcttgctcaaaaatctgtttgatccctgttacccagagaatatatacattctttatcttgacattcaaggcatttctatcacatatttgatagttggtgttcaaaaaaacactagttttgtgccagccgtgatgctcaggcttgaaatcgcattattttgaatgtgaagggaa

SEQ ID NO: 24 - DNA, 3915 bp, Human
gtggggtggggtggggctgggggcttgtcgccctttcaggctccaccctttgcggagattataaatagtcatgatcccagcgagacccagagatgcctgtaatggtgagactttggatccttcctgaggacgtggagaaaactttctgctgagaaggacattttgaaggttttgttggctgaaaaagctgtttctggaatcacccctagatctttcttgaagacttgaattagattacagcgatggggacacagaaggtcaccccagctctgatatttgccatcacagttgctacaatcggctctttccaatttggctacaacactggggtcatcaatgctcctgagaagatcataaaggaatttatcaataaaactttgacggacaagggaaatgccccaccctctgaggtgctgctcacgtctctctggtccttgtctgtggccatattttccgtcgggggtatgatcggctccttttccgtcggactcttcgtcaaccgctttggcaggcgcaattcaatgctgattgtcaacctgttggctgtcactggtggctgctttatgggactgtgtaaagtagctaagtcggttgaaatgctgatcctgggtcgcttggttattggcctcttctgcggactctgcacaggttttgtgcccatgtacattggagagatctcgcctactgccctgcggggtgcctttggcactctcaaccagctgggcatcgttgttggaattctggtggcccagatctttggtctggaattcatccttgggtctgaagagctatggccgctgctactgggttttaccatccttcctgctatcctacaaagtgcagcccttccattttgccctgaaagtcccagatttttgctcattaacagaaaagaagaggagaatgctaagcagatcctccagcggttgtggggcacccaggatgtatcccaagacatccaggagatgaaagatgagagtgcaaggatgtcacaagaaaagcaagtcaccgtgctagagctctttagagtgtccagctaccgacagcccatcatcatttccattgtgctccagctctctcagcagctctctgggatcaatgctgtgttctattactcaacaggaatcttcaaggatgcaggtgttcaagagcccatctatgccaccatcggcgcgggtgtggttaatactatcttcactgtagtttctctatttctggtggaaagggcaggaagaaggactctgcatatgataggccttggagggatggctttttgttccacgctcatgactgtttctttgttattaaaggataactataatgggatgagctttgtctgtattggggctatcttggtctttgtagccttctttgaaattggaccaggccccattccctggtttattgtggccgaactcttcagccagggcccccgcccagctgcgatggcagtggccggctgctccaactggacctccaacttcctagtcggattgctcttcccctccgctgctcactatttaggagcctacgtttttattatcttcaccggcttcctcattaccttcttggcttttaccttcttcaaagtccctgagacccgtggcaggacttttgaggatatcacacgggcctttgaagggcaggcacacggtgcagatagatctggaaaggacggcgtcatggagatgaacagcatcgagcctgctaaggagaccaccaccaatgtctaagtcgtgcctccttccacctccctcccggcatgggaaagccacctctccctcaacaagggagagacctcatcaggatgaacccaggacgcttctgaatgctgctacttaattcctttctcatcccacgcactccatgagcaccccaaggctgcggtttgttggatcttcaatggctttttaaattttatttcctggacatcctcttctgcttaggagagaccgagtgaacctaccttcatttcaggagggattggccgcttggcacatgacaactttgccagcttttcctcccttgggttctgatattgccgcactaggggatataggagaggaaaagtaaggtgcagttcccccaacctcagacttaccaggaagcagatacatatgagtgtggaagccggagggtgtttatgtaagagcaccttcctcacttccatacagctctacgtggcaaattaacttgagttttatttattttatcctctggtttaattacataatttttttttttttactttaagtttcaggatacatgtgccgaatgtgcaggtttgttacataggtatatatatgccatgatggaaatatttatttttttaagcgtaattttgccaaataataaaaacagaaggaaattgagattagagggaggtgtttaaagagaggttatagagtagaagatttgatgctggagaggttaaggtgcaataagaatttagggagaaatgttgttcattattggagggtaaatgatgtggtgcctgaggtctgtacgttacctcttaacaatttctgtccttcagatggaaactctttaacttctcgtaaaagtcatatacctatataataaagctactgatttccttggagcttttttctttaagataatagtttacatgtagtagtacttgaaatctaggattattaactaatatgggcattgtagttaatgatggttgatgggttctaattttggatggagtccagggaagagaaagtgatttctagaaagcctgttcccctcactggatgaaataactccttcttgtagtagtctcattacttttgaagtaatcccgccacctatctcgtgggagagccatccaaataagaaacctaaaataattggttcttggtagagattcattatttttccactttgttctttaggagattttaggtgttgattttctgttgtattttaactcatacctttaaaggaattccccaaagaatgtttatagcaaacttggaatttgtaacctcagctctgggagaggatttttttctgagcgattattatctaaagtgtgttgttgctttaggctcacggcacgcttgcgtatgtctgttaccatgtcactgtggtcctatgccgaatgccctcaggggacttgaatctttccaataaaccaggtttagacagtatgagtcaatgtgcagtgtagcccacacttgagaggatgaatgtatgtgcactgtcactttgctctgggtggaagtacgttattgttgacttattttctctgtgtttgttcctacagcccctttttcatatgttgctcagtctccctttcccttcttggtgcttacacatctcagaccctttagccaaacccttgtcagtgacagtattttggttcttagttctcactgttccctctgctcctggagcctttgaataaaaatgcacgtagctgaggccggatgcggtggctcacgcctgtaatcccagcactttgggaggcctaggcgggcggtcaggggttcgagaccagtctggccaacatcgtgaaaccctgtctctactaaaaatgcaaaaattagccgggcgtggtggcgggcgcctgtaatcccagctacttgggaagctgaggcgggagaatcatgtgaacccgggacgcaggggttgcagtgagcggagatcgcatcattgcactctagcctgggccacagggcgagactccgtctcaaaaaaaaaaaaatgcacatagctatcgagtgtgctttagcttgaaaaggtgaccttgcaacttcatgtcaactttctggctcctcaaacagtaggttggcagtaaggcagggtcccatttctcactgagaagattgtgaatatttccatatggattttctattgttactctggttctttgttttaaaataaaaattctgaatgtacacg

SEQ ID NO: 25 - DNA, 6303 bp, Human
tagtaagacaggtgccttcagttcactctcagtaaggggctggttgcctgcatgagtgtgtgctctgtgtcactgtggattggagttgaaaaagcttgactggcgtcattcaggagctggatggcgtgggacatgtgcaaccaggactctgagtctgtatggagtgacatcgagtgtgctgctctggttggtgaagaccagcctctttgcccagatcttcctgaacttgatctttctgaactagatgtgaacgacttggatacagacagctttctgggtggactcaagtggtgcagtgaccaatcagaaataatatccaatcagtacaacaatgagccttcaaacatatttgagaagatagatgaagagaatgaggcaaacttgctagcagtcctcacagagacactagacagtctccctgtggatgaagacggattgccctcatttgatgcgctgacagatggagacgtgaccactgacaatgaggctagtccttcctccatgcctgacggcacccctccaccccaggaggcagaagagccgtctctacttaagaagctcttactggcaccagccaacactcagctaagttataatgaatgcagtggtctcagtacccagaaccatgcaaatcacaatcacaggatcagaacaaaccctgcaattgttaagactgagaattcatggagcaataaagcgaagagtatttgtcaacagcaaaagccacaaagacgtccctgctcggagcttctcaaatatctgaccacaaacgatgaccctcctcacaccaaacccacagagaacagaaacagcagcagagacaaatgcacctccaaaaagaagtcccacacacagtcgcagtcacaacacttacaagccaaaccaacaactttatctcttcctctgaccccagagtcaccaaatgaccccaagggttccccatttgagaacaagactattgaacgcaccttaagtgtggaactctctggaactgcaggcctaactccacccaccactcctcctcataaagccaaccaagataacccttttagggcttctccaaagctgaagtcctcttgcaagactgtggtgccaccaccatcaaagaagcccaggtacagtgagtcttctggtacacaaggcaataactccaccaagaaagggccggagcaatccgagttgtatgcacaactcagcaagtcctcagtcctcactggtggacacgaggaaaggaagaccaagcggcccagtctgcggctgtttggtgaccatgactattgccagtcaattaattccaaaacggaaatactcattaatatatcacaggagctccaagactctagacaactagaaaataaagatgtctcctctgattggcaggggcagatttgttcttccacagattcagaccagtgctacctgagagagactttggaggcaagcaagcaggtctctccttgcagcacaagaaaacagctccaagaccaggaaatccgagccgagctgaacaagcacttcggtcatcccagtcaagctgtttttgacgacgaagcagacaagaccggtgaactgagggacagtgatttcagtaatgaacaattctccaaactacctatgtttataaattcaggactagccatggatggcctgtttgatgacagcgaagatgaaagtgataaactgagctacccttgggatggcacacaatcctattcattgttcaatgtgtctccttcttgttcttcttttaactctccatgtagagattctgtgtcaccacccaaatccttattttctcaaagaccccaaaggatgcgctctcgttcaaggtccttttctcgacacaggtcgtgttcccgatcaccatattccaggtcaagatcaaggtctccaggcagtagatcctcttcaagatcctgctattactatgagtcaagccactacagacaccgcacgcaccgaaattctcccttgtatgtgagatcacgttcaagatcgccctacagccgtcggcccaggtatgacagctacgaggaatatcagcacgagaggctgaagagggaagaatatcgcagagagtatgagaagcgagagtctgagagggccaagcaaagggagaggcagaggcagaaggcaattgaagagcgccgtgtgatttatgtcggtaaaatcagacctgacacaacacggacagaactgagggaccgttttgaagtttttggtgaaattgaggagtgcacagtaaatctgcgggatgatggagacagctatggtttcattacctaccgttatacctgtgatgcttttgctgctcttgaaaatggatacactttgcgcaggtcaaacgaaactgactttgagctgtacttttgtggacgcaagcaatttttcaagtctaactatgcagacctagattcaaactcagatgactttgaccctgcttccaccaagagcaagtatgactctctggattttgatagtttactgaaagaagctcagagaagcttgcgcaggtaacatgttccctagctgaggatgacagagggatggcgaatacctcatgggacagcgcgtccttccctaaagactattgcaagtcatacttaggaatttctcctactttacactctctgtacaaaaacaaaacaaaacaacaacaatacaacaagaacaacaacaacaataacaacaatggtttacatgaacacagctgctgaagaggcaagagacagaatgatatccagtaagcacatgtttattcatgggtgtcagctttgcttttcctggagtctcttggtgatggagtgtgcgtgtgtgcatgtatgtgtgtgtgtatgtatgtgtgtggtgtgtgtgcttggtttaggggaagtatgtgtgggtacatgtgaggactgggggcacctgaccagaatgcgcaagggcaaaccatttcaaatggcagcagttccatgaagacacacttaaaacctagaacttcaaaatgttcgtattctattcaaaaggaaaaatatatatatatatatatatatataaattaaaaaggaaagaaaactaacaaccaaccaaccaaccaaccaaccacaaaccaccctaaaatgacagccgctgatgtctgggcatcagcctttgtactctgtttttttaagaaagtgcagaatcaacttgaagcaagctttctctcataacgtaatgattatatgacaatcctgaagaaaccacaggttccatagaactaatatcctgtctctctctctctctctctctctctcttttttttttctttttccttttgccatggaatctgggtgggagaggatactgcgggcaccagaatgctaaagtttcctaacattttgaagtttctgtagttcatccttaatcctgacacccatgtaaatgtccaaaatgttgatcttccactgcaaatttcaaaagccttgtcaatggtcaagcgtgcagcttgttcagcggttctttctgaggagcggacaccgggttacattactaatgagagttgggtagaactctctgagatgtgttcagatagtgtaattgctacattctctgatgtagttaagtatttacagatgttaaatggagtatttttattttatgtatatactatacaacaatgttcttttttgttacagctatgcactgtaaatgcagccttcttttcaaaactgctaaatttttcttaatcaagaatattcaaatgtaattatgaggtgaaacaattattgtacactaacatatttagaagctgaacttactgcttatatatatttgattgtaaaaacaaaaagacagtgtgtgtgtctgttgagtgcaacaagagcaaaatgatgctttccgcacatccatcccttaggtgagcttcaatctaagcatcttgtcaagaaatatcctagtcccctaaaggtattaaccacttctgcgatatttttccacattttcttgtcgcttgtttttctttgaagttttatacactggatttgttaggggaatgaaattttctcatctaaaatttttctagaagatatcatgattttatgtaaagtctctcaatgggtaaccattaagaaatgtttttattttctctatcaacagtagttttgaaactagaagtcaaaaatctttttaaaatgctgttttgttttaatttttgtgattttaatttgatacaaaatgctgaggtaataattatagtatgatttttacaataattaatgtgtgtctgaagactatctttgaagccagtatttctttcccttggcagagtatgacgatggtatttatctgtattttttacagttatgcatcctgtataaatactgatatttcattcctttgtttactaaagagacatatttatcagttgcagatagcctatttattataaattatgagatgatgaaaataataaagccagtggaaattttctacctaggatgcatgacaattgtcaggttggagtgtaagtgcttcatttgggaaattcagcttttgcagaagcagtgtttctacttgcactagcatggcctctgacgtgaccatggtgttgttcttgatgacattgcttctgctaaatttaataaaaacttcagaaaaacctccattttgatcatcaggatttcatctgagtgtggagtccctggaatggaattcagtaacatttggagtgtgtattcaagtttctaaattgagattcgattactgtttggctgacatgacttttctggaagacatgatacacctactactcaattgttcttttcctttctctcgcccaacacgatcttgtaagatggatttcacccccaggccaatgcagctaattttgatagctgcattcatttatcaccagcatattgtgttctgagtgaatccactgtttgtcctgtcggatgcttgcttgattttttggcttcttatttctaagtagatagaaagcaataaaaatactatgaaatgaaagaacttgttcacaggttctgcgttacaacagtaacacatctttaatccgcctaattcttgttgttctgtaggttaaatgcaggtattttaactgtgtgaacgccaaactaaagtttacagtctttctttctgaattttgagtatcttctgttgtagaataataataaaaagactattaagagcaataaattattttaagaaatcgagatttagtaaatcctattatgtgttcaaggaccacatgtgttctctattttgcctttaaatttttgtgaaccaattttaaatacattctcctttttgccctggattgttgacatgagtggaatacttggtttcttttcttacttatcaaaagacagcactacagatatcatattgaggattaatttatcccccctacccccagcctgacaaatattgttaccatgaagatagttttcctcaatggacttcaaattgcatctagaattagtggagcttttgtatcttctgcagacactgtgggtagcccatcaaaatgtaagctgtgctcctctcatttttatttttatttttttgggagagaatatttcaaatgaacacgtgcaccccatcatcactggaggcaaatttcagcatagatctgtaggatttttagaagaccgtgggccattgccttcatgccgtggtaagtaccacatctacaattttggtaaccgaactggtgctttagtaatgtggatttttttcttttttaaaagagatgtagcaaaataattcttccagtgcaacaaaatcaattttttgctaaacgactccaagaacaacagttgggctgtcaacattcaaagcagcagagagggaactttgcactattggggtatgatgtttgggtcagttgataaaaggaaaccttttcatgcctttagatgtgagcttccagtaggtaatgattatgtgtcctttcttgatggctgtaatgagaacttcaatcactgtagtctaagacctgatctatagatacctagaatagccatgtactataatgtgatgattctaaatttgtacctatgtgacagacattttcaataatgtgaactgctgatttgatggagctactttaagatttgtaggtgaaagtgtaatactgttggttgaactatgctgaagagggaaagtgagcgattagttgagcccttgccgggccttttttccacctgccaattctacatgtattgttgtggttttattcattgtatgaaaattcctgtgattttttttaaatgtgcagtacacatcagcctcactgagctaataaagggaaacgaatgtttcaaatct

SEQ ID NO: 26 - DNA, 3784 bp, Human
ggcgactcccggtctggcttgggcaggctgcccgggccgtggcaggaagccggaagcagccgcggccccagttcgggagacatggcgggcgttaaagctctcgtggcattatccttcagtggggctattggactgacttttcttatgctgggatgtgccttagaggattatgggtgtacttctctgaagtaagatgatttgtcaaaaattctgtgtggttttgttacattgggaatttatttatgtgataactgcgtttaacttgtcatatccaattactccttggagatttaagttgtcttgcatgccaccaaattcaacctatgactacttccttttgcctgctggactctcaaagaatacttcaaattcgaatggacattatgagacagctgttgaacctaagtttaattcaagtggtactcacttttctaacttatccaaaacaactttccactgttgctttcggagtgagcaagatagaaactgctccttatgtgcagacaacattgaaggaaggacatttgtttcaacagtaaattctttagtttttcaacaaatagatgcaaactggaacatacagtgctggctaaaaggagacttaaaattattcatctgttatgtggagtcattatttaagaatctattcaggaattataactataaggtccatcttttatatgttctgcctgaagtgttagaagattcacctctggttccccaaaaaggcagttttcagatggttcactgcaattgcagtgttcatgaatgttgtgaatgtcttgtgcctgtgccaacagccaaactcaacgacactctccttatgtgtttgaaaatcacatctggtggagtaattttccggtcacctctaatgtcagttcagcccataaatatggtgaagcctgatccaccattaggtttgcatatggaaatcacagatgatggtaatttaaagatttcttggtccagcccaccattggtaccatttccacttcaatatcaagtgaaatattcagagaattctacaacagttatcagagaagctgacaagattgtctcagctacatccctgctagtagacagtatacttcctgggtcttcgtatgaggttcaggtgaggggcaagagactggatggcccaggaatctggagtgactggagtactcctcgtgtctttaccacacaagatgtcatatactttccacctaaaattctgacaagtgttgggtctaatgtttcttttcactgcatctataagaaggaaaacaagattgttccctcaaaagagattgtttggtggatgaatttagctgagaaaattcctcaaagccagtatgatgttgtgagtgatcatgttagcaaagttacttttttcaatctgaatgaaaccaaacctcgaggaaagtttacctatgatgcagtgtactgctgcaatgaacatgaatgccatcatcgctatgctgaattatatgtgattgatgtcaatatcaatatctcatgtgaaactgatgggtacttaactaaaatgacttgcagatggtcaaccagtacaatccagtcacttgcggaaagcactttgcaattgaggtatcataggagcagcctttactgttctgatattccatctattcatcccatatctgagcccaaagattgctatttgcagagtgatggtttttatgaatgcattttccagccaatcttcctattatctggctacacaatgtggattaggatcaatcactctctaggttcacttgactctccaccaacatgtgtccttcctgattctgtggtgaagccactgcctccatccagtgtgaaagcagaaattactataaacattggattattgaaaatatcttgggaaaagccagtctttccagagaataaccttcaattccagattcgctatggtttaagtggaaaagaagtacaatggaagatgtatgaggtttatgatgcaaaatcaaaatctgtcagtctcccagttccagacttgtgtgcagtctatgctgttcaggtgcgctgtaagaggctagatggactgggatattggagtaattggagcaatccagcctacacagttgtcatggatataaaagttcctatgagaggacctgaattttggagaataattaatggagatactatgaaaaaggagaaaaatgtcactttactttggaagcccctgatgaaaaatgactcattgtgcagtgttcagagatatgtgataaaccatcatacttcctgcaatggaacatggtcagaagatgtgggaaatcacacgaaattcactttcctgtggacagagcaagcacatactgttacggttctggccatcaattcaattggtgcttctgttgcaaattttaatttaaccttttcatggcctatgagcaaagtaaatatcgtgcagtcactcagtgcttatcctttaaacagcagttgtgtgattgtttcctggatactatcacccagtgattacaagctaatgtattttattattgagtggaaaaatcttaatgaagatggtgaaataaaatggcttagaatctcttcatctgttaagaagtattatatccatgatcattttatccccattgagaagtaccagttcagtctttacccaatatttatggaaggagtgggaaaaccaaagataattaatagtttcactcaagatgatattgaaaaacaccagagtgatgcaggtttatatgtaattgtgccagtaattatttcctcttccatcttattgcttggaacattattaatatcacaccaaagaatgaaaaagctattttgggaagatgttccgaaccccaagaattgttcctgggcacaaggacttaattttcagaagccagaaacgtttgagcatctttttatcaagcatacagcatcagtgacatgtggtcctcttcttttggagcctgaaacaatttcagaagatatcagtgttgatacatcatggaaaaataaagatgagatgatgccaacaactgtggtctctctactttcaacaacagatcttgaaaagggttctgtttgtattagtgaccagttcaacagtgttaacttctctgaggctgagggtactgaggtaacctatgaggacgaaagccagagacaaccctttgttaaatacgccacgctgatcagcaactctaaaccaagtgaaactggtgaagaacaagggcttataaatagttcagtcaccaagtgcttctctagcaaaaattctccgttgaaggattctttctctaatagctcatgggagatagaggcccaggcattttttatattatcagatcagcatcccaacataatttcaccacacctcacattctcagaaggattggatgaacttttgaaattggagggaaatttccctgaagaaaataatgataaaaagtctatctattatttaggggtcacctcaatcaaaaagagagagagtggtgtgcttttgactgacaagtcaagggtatcgtgcccattcccagccccctgtttattcacggacatcagagttctccaggacagttgctcacactttgtagaaaataatatcaacttaggaacttctagtaagaagacttttgcatcttacatgcctcaattccaaacttgttctactcagactcataagatcatggaaaacaagatgtgtgacctaactgtgtaatttcactgaagaaaccttcagatttgtgttataatgggtaatataaagtgtaatagattatagttgtgggtgggagagagaaaagaaaccaga

SEQ ID NO: 27 - DNA, 3928 bp, Human
ccccaaccctccctttcctgaattccccctcctcctcgctcaccttaaaaccatcgtgcatcaccatggcgagttgctccttcactcgcgaccaagcgacaagaagactaagaggtgcagcagcggcggcagcggcagctctagcagcagtggtgaccaccccgcttctttcctcgggaaccccgaccgcactcattgggaccgggtcgtcttgtccgggagccatgtggctctccacggccactggctcccggtcagactccgagtccgaagaggaggacctgcccgtcggggaggaagtctgcaaacgcggctacctgcggaaacagaagcatgggcacaggcgctacttcgtgctcaaactcgagactgctgacgccccagctcggctggaatactacgaaaatgccaggaagttccggcacagtgtccgcgccgcggcggctgcagcagcggcggccgcctctggcgccgcgatccccccgctcattccaccgcggcgcgtgatcaccctataccagtgcttttccgtgagccagcgagcagatgcaaggtaccgacacctcattgctcttttcacccaagacgaatacttcgcgatggtggccgagaacgagtcggagcaggaaagctggtacttgctgctcagccgcctcatcctcgagagcaagcgccgccgctgcggcacgctcggcgcgcagccggacggagagccggccgcgctggcggcggcagcggcggcggagccacccttctataaagatgtgtggcaggtaatagtcaaacccagggggctggggcacagaaaagagctgagcggcgtgttccggctgtgtctaaccgacgaggaggtcgtgtttgtgaggctgaacaccgaagtggccagcgtggtcgtccagctcctgagcatccgtcgctgtggacactcggagcagtatttcttcttggaagtaggcaggtccactgtcatcggtccgggagagctctggatgcaggtcgatgactgtgtggttgcccaaaacatgcatgagctgtttttggagaagatgagagccttgtgtgcagacgaatacagagcccgctgccgcagctacagcatcagcatcggcgcccacctgttaaccctgctgtccgctaggaggcacctgggcttggtgccgctcgagccgggaggctggctcagaaggtcccgctttgagcagttttgccacctcagggccatcggcgacggggaagacgagatgcttttcaccaggcgcttcgtaacacccagcgagcctgtggcccactccaggcgaggaagactgcacctgcccagagggcgcaggtcaaggagagcggtttcagtgccggccagcttttttcgccgcttagcacccagcccagcacgtccccggcaccctgcagaagccccgaacaatggagctcgcctgtcttctgaagtgtctggttctggctctggcaactttggggaggaaggcaatccccagggcaaagaagatcaggaaggaagcggaggtgactacatgcctatgaacaattggggctcaggaaatggccggggctcaggaggtggccagggctcaaatggccaaggctccagtagccatagctcgggaggaaaccagtgttcaggcgagggacagggatcccgaggtggtcagggctcaaatggccagggctcaggaggaaaccagtgctctagagatggccagggcaccgcaggtgggcacggttcaggtggtggccagagacctggaggtgggcatggctcaggtggtggccagggacctggagatggccatggctcaggtggtggcaagaactctggggggggcaaaggctcaggaagtgggaaaggatccgatggtgatggtgaacgtggaaaatctctgaagaaaagatcctattttggcaaattaactcaaagcaagcaacagcaaatgccaccacctccaccacctcctcctccacccccaccagctggaggaactggtggaaaagggaagtctgggggaagattcagactttatttttgtgttgacagaggagccacgaaagaatgcaaagaagccaaagaagtgaaagatgcagagatcccagaaggtgcagctcgaggtccccacagagccagagcttttgatgaagatgaggatgacccatacgtgccaatgaggccaggggtggccacccctcttgtaagctccagtgattatatgccaatggctcctcaaaatgtctctgcttcaaaaaagcgccactctcgatccccttttgaagattcaagagggtacatgatgatgtttcccagagtgagcccaccacctgctccgagtcctccaaaagcacctgatactaataaagaggatgactcaaaggacaatgacagtgagagtgactacatgtttatggctcctggagccggtgcaattccaaaaaaccccagaaatcctcagggtggctcttcctccaaaagttggagctcctacttctctctaccaaacccttttcggagctcacctttgggacagaatgacaacagtgagtatgtgccaatgttacctggaaagttcctggggaggggcctagacaaagaagtctcctataactgggaccccaaagatgcagcttcaaagccttcaggtgagggatcattctcaaagcctggagatgggggatcaccttcaaagccttcagatcatgagcccccaaagaataaagctaagagacctaaccgactttcttttattacaaaaggatataaaatcaagccaaaaccacaaaagcccacacatgagcagagagaagctgacagctctagtgactacgtcaacatggacttcactaaaagagagagcaatacaccagctccctctactcaaggactaccagattcgtggggcataattgctgaacccagacagtcagccttttctaattatgtgaatgttgagtttggagtgccatttccaaatccagcaaacgacctctcagatcttttaagagctataccacgtgccaaccccttatctctggacagtgctaggtggccacttcctccccttcccctcagtgctacaggtagcaatgctattgaggaagagggtgactacattgaagtaattttcaactcagcaatgacaccagccatggctcttgctgacagtgccattcgctatgatgctgaaacaggtcgaatctatgtggtcgacccattttctgagtgctgtatggatatttctctctcccccagccgatgttctgaaccaccacctgtagctaggctgctgcaggaagaagagcaggagagaagacgcccacaaagccgttctcaaagtttctttgcagcagccagagccgctgtctctgcttttccaacagacagcctcgagagagacctttccccatcctcagccccggctgtcgcttcggctgcagagccgactttagccctcagccaagttgtagctgcggcctccgcgctcgccgcagccccgggcatcggcgcagcagccgcagctgctggatttgactccgcctctgcccgctggtttcaacctgttgctaatgctgctgatgccgaagcagtaaggggagcccaagacgttgccggtggctcgaaccctggagcccacaacccatctgcaaaccttgccagaggtgataaccaggctggcggggctgccgctgcagctgccgctccggaaccaccacctcgcagtcgccgggtgccaagacccccggagagagaagattctgacaacgacgacgacactcacgtgagaatggattttgccagacgtgataatcagttcgactctcccaaaagaggtcggtaattttagaattaatttccctaaagtgaatggtcattgtctaatgattcgatgcgctacagtctacagtgttagggatactatttcattaa

SEQ ID NO: 28 - DNA, 2188 bp, Human
attgtgaccagaggggtttgtgtggctgaagaggcaggaggaacagtgtatccacagcgtgggaccatgccaggcacaaaacggtttcaacatgtcattgagaccccggagcctggcaagtgggagttgtctgggtacgaggcagctgtgccaatcacggagaagtcaaacccactgacccaggatctagacaaagcagatgctgagaacattgttcgactgctagggcaatgtgatgctgagatcttccaggaggaggggcaagccctgtccacataccagagactctacagcgaatccattctgaccaccatggtacaggtggctgggaaagttcaggaagtgctgaaggagccagatggggggctggttgtgctgagtggagggggcacctctggccggatggcattcctcatgtcggtgtcctttaatcagctgatgaaaggtctgggacagaaacctctttacacctacctcattgcaggtggtgacaggtctgtggtggcctctagggaggggacagaagatagtgccttgcacgggattgaggaactgaagaaggtggctgccgggaagaagagagtgattgtcattggcatttctgtgggactctctgctccctttgtggcaggccagatggactgctgcatgaacaacacagctgtcttcttgccagtcctggttggcttcaatccagtgagcatggccagaaatgaccccattgaagactggagttcaacattccgacaagtagcagagcggatgcagaaaatgcaggagaaacagaaagcttttgtgctcaatcctgccatcgggcccgagggtctcagcggctcctcccggatgaaaggtggaagtgccaccaagattctgctggaaaccctgttattagcagcccataagactgtggaccagggcattgcagcatctcaaagatgcctcctggaaatcttgcggacatttgagcgagctcatcaggtgacctacagccaaagccccaagattgccaccctgatgaagagtgtcagcaccagtctggagaagaaaggccacgtgtacctggttggctggcagaccctgggcatcattgccatcatggatggagtagagtgcatccacacctttggtgctgatttccgagatgtccgtggctttctcattggtgatcacagtgacatgtttaaccagaaggctgagctcaccaaccagggtccccagttcaccttctcccaggaggacttcctgacttccatccttccctctctcacggaaatcgatactgtggtcttcattttcaccctggatgacaacctcacggaggtgcagactatagtggagcaggtgaaagagaagaccaaccacatccaggccctggcacacagcaccgtgggtcagaccttgctgatccctctgaagaagctctttccctccatcatcagcatcacatggccactgcttttctttgaatatgaagggaacttcatccagaagttccagcgtgagctaagcaccaaatgggtgctgaatacagtgagtacaggtgctcatgtgcttcttggtaagatcctacaaaaccacatgttggaccttcggattagcaactccaagctcttctggcgggcgctggccatgctgcagcggttctctggacagtccaaggctcgatgcatcgagagcctcctccgagcgatccactttccccagccactgtcagatgatattcgggctgctcccatctcctgccatgtccaggttgcacatgagaaggaacaggtgatacccatcgccttgctgagcctcctattccggtgctcgatcactgaggctcaggcacacctggctgcagctccttctgtctgtgaggctgtcaggagtgctcttgctgggccaggtcagaagcgcactgcggaccccctcgagatcctagagcctgacgttcagtgaacccatgtttctgggtgggtgaaaggggcccaaccctgcccacttcagcccagcccgcccaaggggacttgtgccagcagaacatgtgggaggaagaagccccgtttccagggcatccgcagcccagggtagggagaaatattctctccactttgggggagagttcttgctctcgacctagtggtttctactctcaccgacttattctgatttcagaaataaaatgaaatgtcttattttggaa

SEQ ID NO: 29 - DNA, 1753 bp, Human
gaggagcctcggttcccctcgggcggctgaaggaggggctgagcctcaggacccctaggccaggccgtgttgaaagcagataccccgaggcctcgcccagcctgcgctggagggaagaaggcgctggaggagcaccagcgaaagcagccagtctgagatattgacactacagaaaaaactgacagcttactccttgtattgattctactcttctctacaaatatagactccgttccctaccacagccttatagttctgccccagagacaagtatgaataccacagacaacggtgtcaactgtctgtgtgctatctgtggggacagagcaacaggaaaacactatggggcatccagctgtgatgggtgcaagggtttcttcagacgcagcattcgtaagagtcacgtttattcttgcaggttcagtcggcaatgtgttgttgacaaggacaaaaggaatcaatgtagatattgtcgattaagaaagtgttttagagcgggaatgaaaaaagaagctgtacaaaatgaacgtgacagaataagcaccagaagaagcacatttgatggcagcaacatcccctccattaacacactggcacaagctgaagttcggtctcgccagatctcagtctcaagccctgggtcaagcactgacataaacgttaagaaaattgcaagtattggtgatgtctgtgaatctatgaaacagcagctcttagtcttggtggaatgggctaaatatattcctgccttctgtgaattaccattggatgatcaggtggcactgttgagagctcacgcaggggagcacttactgcttggagctacaaagagatccatgatatataaagatattttgcttttgggaaacaactatgttattcaccgcaacagctgtgaagttgagattagccgtgtggccaatcgtgttctagatgagctggttagaccatttcaagaaatccagattgatgacaatgagtatgcttgtttaaaggcaattgtattttttgatccagatgcaaaagggctaagcgatccagtaaaaattaagaacatgaggttccaagtgcagatcggtttggaggactacatcaatgatcggcagtatgactcccgggggaggtttggagagttgcttctgctcctgcccacactgcagagcatcacgtggcaaatgattgagcaaatacagtttgttaaactttttgggatggttaaaattgacaatctacttcaggaaatgctattaggtggggcttccaatgatggcagtcatctccatcatccaatgcatccacatttgtctcaagacccattaactggacaaactatacttttaggtcccatgtcaacactggttcatgcagaccagatctcaactcctgaaaccccactcccttccccaccacaaggctctgggcaagaacagtacaaaatagctgcaaaccaagcatcagtcatttcacaccagcatctctccaaacaaaagcaattgtgaaaatgtgtttacttcagaacggcactacataaatgtgaaaagttgttgatcttgaaatatctcaagatagcacttttggcaaactcttagccaaggcttcttcattggtgctgttataagatggtgtcctattttcttgtttatacgttcattctgtttgttattgctactatgtaaaactttcacatgcaaccaatgtatatctgagtttgaagatgtttatatagggtattttttccaactgcccctgcatt

SEQ ID NO: 30 - DNA, 1365 bp, Human
agaaacagaatcctaactatttctgaggaaactgcaggtccaaaatgtggctgcttttaacaatggcaagtttgatatctgtactggggactacacatggtttgtttggaaaattacatcctggaagccctgaagtgactatgaacattagtcagatgattacttattggggatacccaaatgaagaatatgaagttgtgactgaagatggttatattcttgaagtcaatagaattccttatgggaagaaaaattcagggaatacaggccagagacctgttgtgtttttgcagcatggtttgcttgcatcagccacaaactggatttccaacctgccgaacaacagccttgccttcattctggcagatgctggttatgatgtgtggctgggcaacagcagaggaaacacctgggccagaagaaacttgtactattcaccagattcagttgaattctgggctttcagctttgatgaaatggctaaatatgaccttccagccacaatcgacttcattgtaaagaaagctggacagaagcagctacactatgttggccattcccagggcaccaccattggttttattgccttttccaccaatcccagcctggctaaaagaatcaaaaccttctatgctctagctcctgttgccactgtgaagtatacaaaaagccttataaacaaacttagatttgttcctcaatccctcttcaagtttatatttggtgacaaaatattctacccacacaacttctttgatcaatttcttgctactgaagtgtgctcccgtgagatgctgaatctcctttgcagcaatgccttatttataatttgtggatttgacagtaagaactttaacacgagtcgcttggatgtgtatctatcacataatccagcaggaacttctgttcaaaacatgttccattggacccaggctgttaagtctgggaaattccaagcttatgactggggaagcccagttcagaataggatgcactatgatcagtcccagcctccctactacaatgtgacagccatgaatgtaccaattgcagtgtggaacggtggcaaggacctgttggctgacccccaagatgttggccttttgcttccaaaactccccaatcttatttaccacaaggagattcctttttacaatcacttggactttatctgggcaatggatgcccctcaagaagtttacaatgacattgtttctatgatatcagaagataaaaagtagttctggatttaaagaattatccgtttgtttttccaaaatactttattctctcatacatagtattttcataatgtttgacatgcagtgcttctttctgtaattttgactttagaaatatattggc

SEQ ID NO: 31 - DNA, 3914 bp, Human
gtggggtggggtggggctgggggcttgtcgccctttcaggctccaccctttgcggagattataaatagtcatgatcccagcgagacccagagatgctgtaatggtgagactttggatccttcctgaggacgtggagaaaacttgctgctgagaaggacattttgaaggttttgttggctgaaaaagctgtttctggaatcacccctagatctttcttgaagacttgaattagattacagcgatggggacacagaaggtcaccccagctctgatatttgccatcacagttgctacaatcggctctttccaatttggctacaacactggggtcatcaatgctcctgagaagatcataaaggaatttatcaataaaactttgacggacaagggaaatgccccaccctctgaggtgctgctcacgtctctctggtccttgtctgtggccatattttccgtcgggggtatgatcggctccttttccgtcggactcttcgtcaaccgctttggcaggcgcaattcaatgctgattgtcaacctgttggctgtcactggtggctgctttatgggactgtgtaaagtagctaagtcggttgaaatgctgatcctgggtcgcttggttattggcctcttctgcggactctgcacaggttttgtgcccatgtacattggagagatctcgcctactgccctgcggggtgcctttggcactctcaaccagctgggcatcgttgttggaattctggtggcccagatctttggtctggaattcatccttgggtctgaagagctatggccgctgctactgggttttaccatccttcctgctatcctacaaagtgcagcccttccattttgccctgaaagtcccagatttttgctcattaacagaaaagaagaggagaatgctaagcagatcctccagcggttgtggggcacccaggatgtatcccaagacatccaggagatgaaagatgagagtgcaaggatgtcacaagaaaagcaagtcaccgtgctagagctctttagagtgtccagctaccgacagcccatcatcatttccattgtgctccagctctctcagcagctctctgggatcaatgctgtgttctattactcaacaggaatcttcaaggatgcaggtgttcaagagcccatctatgccaccatcggcgcgggtgtggttaatactatcttcactgtagtttctctatttctggtggaaagggcaggaagaaggactctgcatatgataggccttggagggatggctttttgttccacgctcatgactgtttctttgttattaaaggataactataatgggatgagctttgtctgtattggggctatcttggtctttgtagccttctttgaaattggaccaggccccattccctggtttattgtggccgaactcttcagccagggcccccgcccagctgcgatggcagtggccggctgctccaactggacctccaacttcctagtcggattgctcttcccctccgctgctcactatttaggagcctacgtttttattatcttcaccggcttcctcattaccttcttggcttttaccttcttcaaagtccctgagacccgtggcaggacttttgaggatatcacacgggcctttgaagggcaggcacacggtgcagatagatctggaaaggacggcgtcatggagatgaacagcatcgagcctgctaaggagaccaccaccaatgtctaagtcgtgcctccttccacctccctcccggcatgggaaagccacctctccctcaacaagggagagacctcatcaggatgaacccaggacgcttctgaatgctgctacttaattcctttctcatcccacgcactccatgagcaccccaaggctgcggtttgttggatcttcaatggctttttaaattttatttcctggacatcctcttctgcttaggagagaccgagtgaacctaccttcatttcaggagggattggccgcttggcacatgacaactttgccagcttttcctcccttgggttctgatattgccgcactaggggatataggagaggaaaagtaaggtgcagttcccccaacctcagacttaccaggaagcagatacatatgagtgtggaagccggagggtgtttatgtaagagcaccttcctcacttccatacagctctacgtggcaaattaacttgagttttatttattttatcctctggtttaattacataattttttttttttaactttaagtttcaggatacatgtgccgaatgtgcaggtttgttacataggtatatatatgccatgatggaaatatttatttttttaagcgtaattttgccaaataataaaaacagaaggaaattgagattagagggaggtgtttaaagagaggttatagagtagaagatttgatgctggagaggttaaggtgcaataagaatttagggagaaatgttgttcattattggagggtaaatgatgtggtgcctgaggtctgtacgttacctcttaacaatttctgtccttcagatggaaactctttaacttctcgtaaaagtcatatacctatataataaagctactgatttcctttggagcttttttctttaagataatagtttacatgtagtagtacttgaaatctaggattattaactaatatgggcattgtagttaatgatggttgatgggttctaattttggatggagtccagggaagagaaagtgatttctagaaagcctgttcccctcactggatgaaataactccttcttgtagtagtctcattacttttgaagtaatcccgccacctatctcgtgggagagccatccaaataagaaacctaaaataattggttcttggtagagattcattatttttccactttgttctttaggagattttaggtgttgattttctgttgtattttaactcatacctttaaaggaattccccaaagaatgtttatagcaaacttggaatttgtaacctcagctctgggagaggatttttttctgagcgattattatctaaagtgtgttgttgctttaggctcacggcacgcttgcgtatgtctgttaccatgtcactgtggtcctatgccgaatgccctcaggggacttgaatctttccaataaaccaggtttagacagtatgagtcaatgtgcagtgtagcccacacttgagaggatgaatgtatgtgcactgtcactttgctctgggtggaagtacgttattgttgacttattttctctgtgtttgttcctacagcccctttttcatatgttgctcagtctccctttcccttcttggtgcttacacatctcagaccctttagccaaacccttgtcagtgacagtattttggttcttagttctcactgttccctctgctcctggagcctttgaataaaaatgcacgtagctgaggccggatgcggtggctcacgcctgtaatcccagcactttgggaggcctaggcgggcggtcaggggttcgagaccagtctggccaacatcgtgaaaccctgtctctactaaaaatgcaaaaattagccgggcgtggtggcgggcgcctgtaatcccagctacttgggaagctgaggcgggagaatcatgtgaacccgggacgcaggggttgcagtgagcggagatcgcatcattgcactctagcctgggccacagggcgagactccgtctcaaaaaaaaaaaaatgcacatagctatcgagtgtgctttagcttgaaaaggtgaccttgcaacttcatgtcaacttctggctcctcaaacagtaggttggcagtaaggcagggtcccatttctcactgagaagattgtgaatatttccatatggattttctattgttactctggttctttgttttaaaataaaaattctgaatgtacacg

SEQ ID NO: 32 - DNA, 2224 bp, Human
aatgtcttctctctccattcagtgcacgcgttactttggctaaaaggaggtgagcggcactctgcccttccagagcaagcatggagcaacaggatcagagcatgaaggaagggaggctgacgcttgtgcttgccctggcaaccctgatagctgcctttgggtcatccttccagtatgggtacaacgtggctgctgtcaactccccagcactgctcatgcaacaattttacaatgagacttactatggtaggaccggtgaattcatggaagacttccccttgacgttgctgtggtctgtaaccgtgtccatgtttccatttggagggtttatcggatccctcctggtcggccccttggtgaataaatttggcagaaaaggggccttgctgttcaacaacatattttctatcgtgcctgcgatcttaatgggatgcagcagagtcgccacatcatttgagcttatcattatttccagacttttggtgggaatatgtgcaggtgtatcttccaacgtggtccccatgtacttaggggagctggcccctaaaaacctgcggggggctctcggggtggtgccccagctcttcatcactgttggcatccttgtggcccagatctttggtcttcggaatctccttgcaaacgtagatggctggccgatcctgctggggctgaccggggtccccgcggcgctgcagctccttctgctgcccttcttccccgagagccccaggtacctgctgattcagaagaaagacgaagcggccgccaagaaagccctacagacgctgcgcggctgggactctgtggacagggaggtggccgagatccggcaggaggatgaggcagagaaggccgcgggcttcatctccgtgctgaagctgttccggatgcgctcgctgcgctggcagctgctgtccatcatcgtcctcatgggcggccagcagctgtcgggcgtcaacgctatctactactacgcggaccagatctacctgagcgccggcgtgccggaggagcacgtgcagtacgtgacggccggcaccggggccgtgaacgtggtcatgaccttctgcgccgtgttcgtggtggagctcctgggtcggaggctgctgctgctgctgggcttctccatctgcctcatagcctgctgcgtgctcactgcagctctggcactgcaggacacagtgtcctggatgccatacatcagcatcgtctgtgtcatctcctacgtcataggacatgccctcgggcccagtcccatacccgcgctgctcatcactgagatcttcctgcagtcctctcggccatctgccttcatggtggggggcagtgtgcactggctctccaacttcaccgtgggcttgatcttcccgttcatccaggagggcctcggcccgtacagcttcattgtcttcgccgtgatctgcctcctcaccaccatctacatcttcttgattgtcccggagaccaaggccaagacgttcatagagatcaaccagattttcaccaagatgaataaggtgtctgaagtgtacccggaaaaggaggaactgaaagagcttccacctgtcacttcggaacagtgactctggagaggaagccagtggagctggtctgccaggggcttcccactttggcttatttttctgacttctagctgtctgtgaatatccagaaataaaacaactctgatgtggaatgcagtcctcatctccagcctccccaccccagtgggaactgtgcaaagggctgccttgctgttcttgaagctgggctgtctctctccatgttggcctgtcaccagacccgagtcaattaaacagctggtcctccactttgctggttcagccttcgtgtggctcctggtaacgtggctccaccttgatgggtcaacctttgtgtggctcctggtaacataacaacaacagttactatagtggtgagatggaaggaatcaaattttgccagagaaactaacttggtggccccgacaggtcttccggggccatgggcatttgtttagagccaaattcatcctcttaccagatccttttccagaaatacctgtctaggaaggtgtgatgtcagaaacaatgacatccagaaagctgaggaacaggttcctgtggagacactgagtcagaattcttcatcctaaattattttgttagtggaaaatggaattgcttctgtgtagtcaataaaatgaacctgatcacttttc

SEQ ID NO: 33 - DNA, 1284 bp, Human
aagagaaaactcctccaaaagcagctctcactatcagaaaacccaactacagttgtgaacgccttcattttctgcctgaggtctcagtccgtcggcccagactgaagtgcagtggcacaatcatagctcgctgcagcctcgaccttccaggcttaaacgattctcccacctcagcctctcgagttgctgggaccacaggtcactgtgcatggcatcatcctggccccctctagagctccaatcctccaaccagagccagctcttccctcaaaatgctacggcctgtgacaatgctccagaagcctgggacctgctgcacagagtgctgccgacatttatcatctccatctgtttcttcggcctcctagggaacctttttgtcctgttggtcttcctcctgccccggcggcaactgaacgtggcagaaatctacctggccaacctggcagcctctgatctggtgtttgtcttgggcttgcccttctgggcagagaatatctggaaccagtttaactggcctttcggagccctcctctgccgtgtcatcaacggggtcatcaaggccaatttgttcatcagcatcttcctggtggtggccatcagccaggaccgctaccgcgtgctggtgcaccctatggccagccggaggcagcagcggcggaggcaggcccgggtcacctgcgtgctcatctgggttgtggggggcctcttgagcatccccacattcctgctgcgatccatccaagccgtcccagatctgaacatcaccgcctgcatcctgctcctcccccatgaggcctggcactttgcaaggattgtggagttaaatattctgggtttcctcctaccactggctgcgatcgtcttcttcaactaccacatcctggcctccctgcgaacgcgggaggaggtcagcaggacaaggtgcgggggccgcaaggatagcaagaccacagcgctgatcctcacgctcgtggttgccttcctggtctgctgggccccttaccacttctttgccttcctggaattcttattccaggtgcaagcagtccgaggctgcttttgggaggacttcattgacctgggcctgcaattggccaacttctttgccttcactaacagctccctgaatccagtaatttatgtctttgtgggccggctcttcaggaccaaggtctgggaactttataaacaatgcacccctaaaagtcttgctccaatatcttcatcccataggaaagaaatcttccaacttttctggcggaattaaaacagcattgaacc

SEQ ID NO: 34 - DNA, 2854 bp, Human
tagtcgcgggtccccgagtgagcacgccagggagcaggagaccaaacgacgggggtcggagtcagagtcgcagtgggagtccccggaccggagcacgagcctgagcgggagagcgccgctcgcacgcccgtcgccacccgcgtacccggcgcagccagagccaccagcgcagcgctgccatggagcccagcagcaagaagctgacgggtcgcctcatgctggccgtgggaggagcagtgcttggctccctgcagtttggctacaacactggagtcatcaatgccccccagaaggtgatcgaggagttctacaaccagacatgggtccaccgctatggggagagcatcctgcccaccacgctcaccacgctctggtccctctcagtggccatcttttctgttgggggcatgattggctccttctctgtgggccttttcgttaaccgctttggccggcggaattcaatgctgatgatgaacctgctggccttcgtgtccgccgtgctcatgggcttctcgaaactgggcaagtcctttgagatgctgatcctgggccgcttcatcatcggtgtgtactgcggcctgaccacaggcttcgtgcccatgtatgtgggtgaagtgtcacccacagcccttcgtggggccctgggcaccctgcaccagctgggcatcgtcgtcggcatcctcatcgcccaggtgttcggcctggactccatcatgggcaacaaggacctgtggcccctgctgctgagcatcatcttcatcccggccctgctgcagtgcatcgtgctgcccttctgccccgagagtccccgcttcctgctcatcaaccgcaacgaggagaaccgggccaagagtgtgctaaagaagctgcgcgggacagctgacgtgacccatgacctgcaggagatgaaggaagagagtcggcagatgatgcgggagaagaaggtcaccatcctggagctgttccgctcccccgcctaccgccagcccatcctcatcgctgtggtgctgcagctgtcccagcagctgtctggcatcaacgctgtcttctattactccacgagcatcttcgagaaggcgggggtgcagcagcctgtgtatgccaccattggctccggtatcgtcaacacggccttcactgtcgtgtcgctgtttgtggtggagcgagcaggccggcggaccctgcacctcataggcctcgctggcatggcgggttgtgccatactcatgaccatcgcgctagcactgctggagcagctaccctggatgtcctatctgagcatcgtggccatctttggctttgtggccttctttgaagtgggtcctggccccatcccatggttcatcgtggctgaactcttcagccagggtccacgtccagctgccattgccgttgcaggcttctccaactggacctcaaatttcattgtgggcatgtgcttccagtatgtggagcaactgtgtggtccctacgtcttcatcatcttcactgtgctcctggttctgttcttcatcttcacctacttcaaagttcctgagactaaaggccggaccttcgatgagatcgcttccggcttccggcaggggggagccagccaaagtgacaagacacccgaggagctgttccatcccctgggggctgattcccaagtgtgagtcgccccagatcaccagcccggcctgctcccagcagccctaaggatctctcaggagcacaggcagctggatgagacttccaaacctgacagatgtcagccgagccgggcctggggctcctttctccagccagcaatgatgtccagaagaatattcaggacttaacggctccaggattttaacaaaagcaagactgttgctcaaatctattcagacaagcaacaggttttataatttttttattactgattttgttatttttatatcagcctgagtctcctgtgcccacatcccaggcttcaccctgaatggttccatgcctgagggtggagactaagccctgtcgagacacttgccttcttcacccagctaatctgtagggctggacctatgtcctaaggacacactaatcgaactatgaactacaaagcttctatcccaggaggtggctatggccacccgttctgctggcctggatctccccactctaggggtcaggctccattaggatttgccccttcccatctcttcctacccaaccactcaaattaatctttctttacctgagaccagttgggagcactggagtgcagggaggagaggggaagggccagtctgggctgccgggttctagtctcctttgcactgagggccacactattaccatgagaagagggcctgtgggagcctgcaaactcactgctcaagaagacatggagactcctgccctgttgtgtatagatgcaagatatttatatatatttttggttgtcaatattaaatacagacactaagttatagtatatctggacaagccaacttgtaaatacaccacctcactcctgttacttacctaaacagatataaatggctggtttttagaaacatggttttgaaatgcttgtggattgagggtaggaggtttggatgggagtgagacagaagtaagtggggttgcaaccactgcaacggcttagacttcgactcaggatccagtcccttacacgtacctctcatcagtgtcctcttgctcaaaaatctgtttgatccctgttacccagagaatatatacattctttatcttgacattcaaggcatttctatcacatatttgatagttggtgttcaaaaaaacactagttttgtgccagccgtgatgctcaggcttgaaatgcattattttgaatgtgaagtaa

SEQ ID NO: 35 - DNA, 4990 bp, Human
ttttttttttttttgagaaaggggaatttcatcccaaataaaaggaatgaagtctggctccggaggagggtccccgacctcgctgtgggggctcctgtttctctccgccgcgctctcgctctggccgacgagtggagaaatctgcgggccaggcatcgacatccgcaacgactatcagcagctgaagcgcctggagaactgcacggtgatcgagggctacctccacatcctgctcatctccaaggccgaggactaccgcagctaccgcttccccaagctcacggtcattaccgagtacttgctgctgttccgagtggctggcctcgagagcctcggagacctcttccccaacctcacggtcatccgcggctggaaactcttctacaactacgccctggtcatcttcgagatgaccaatctcaaggatattgggctttacaacctgaggaacattactcggggggccatcaggattgagaaaaatgctgacctctgttacctctccactgtggactggtccctgatcctggatgcggtgtccaataactacattgtggggaataagcccccaaaggaatgtggggacctgtgtccagggaccatggaggagaagccgatgtgtgagaagaccaccatcaacaatgagtacaactaccgctgctggaccacaaaccgctgccagaaaatgtgcccaagcacgtgtgggaagcgggcgtgcaccgagaacaatgagtgctgccaccccgagtgcctgggcagctgcagcgcgcctgacaacgacacggcctgtgtagcttgccgccactactactatgccggtgtctgtgtgcctgcctgcccgcccaacacctacaggtttgagggctggcgctgtgtggaccgtgacttctgcgccaacatcctcagcgccgagagcagcgactccgaggggtttgtgatccacgacggcgagtgcatgcaggagtgcccctcgggcttcatccgcaacggcagccagagcatgtactgcatcccttgtgaaggtccttgcccgaaggtctgtgaggaagaaaagaaaacaaagaccattgattctgttacttctgctcagatgctccaaggatgcaccatcttcaagggcaatttgctcattaacatccgacgggggaataacattgcttcagagctggagaacttcatggggctcatcgaggtggtgacgggctacgtgaagatccgccattctcatgccttggtctccttgtccttcctaaaaaaccttcgcctcatcctaggagaggagcagctagaagggaattactccttctacgtcctcgacaaccagaacttgcagcaactgtgggactgggaccaccgcaacctgaccatcaaagcagggaaaatgtactttgctttcaatcccaaattatgtgtttccgaaatttaccgcatggaggaagtgacggggactaaagggcgccaaagcaaaggggacataaacaccaggaacaacggggagagagcctcctgtgaaagtgacgtcctgcatttcacctccaccaccacgtcgaagaatcgcatcatcataacctggcaccggtaccggccccctgactacagggatctcatcagcttcaccgtttactacaaggaagcaccctttaagaatgtcacagagtatgatgggcaggatgcctgcggctccaacagctggaacatggtggacgtggacctcccgcccaacaaggacgtggagcccggcatcttactacatgggctgaagccctggactcagtacgccgtttacgtcaaggctgtgaccctcaccatggtggagaacgaccatatccgtggggccaagagtgagatcttgtacattcgcaccaatgcttcagttccttccattcccttggacgttctttcagcatcgaactcctcttctcagttaatcgtgaagtggaaccctccctctctgcccaacggcaacctgagttactacattgtgcgctggcagcggcagcctcaggacggctacctttaccggcacaattactgctccaaagacaaaatccccatcaggaagtatgccgacggcaccatcgacattgaggaggtcacagagaaccccaagactgaggtgtgtggtggggagaaagggccttgctgcgcctgccccaaaactgaagccgagaagcaggccgagaaggaggaggctgaataccgcaaagtctttgagaatttcctgcacaactccatcttcgtgcccagacctgaaaggaagcggagagatgtcatgcaagtggccaacaccaccatgtccagccgaagcaggaacaccacggccgcagacacctacaacatcaccgacccggaagagctggagacagagtaccctttctttgagagcagagtggataacaaggagagaactgtcatttctaaccttcggcctttcacattgtaccgcatcgatatccacagctgcaaccacgaggctgagaagctgggctgcagcgcctccaacttcgtctttgcaaggactatgcccgcagaaggagcagatgacattcctgggccagtgacctgggagccaaggcctgaaaactccatctttttaaagtggccggaacctgagaatcccaatggattgattctaatgtatgaaataaaatacggatcacaagttgaggatcagcgagaatgtgtgtccagacaggaatacaggaagtatggaggggccaagctaaaccggctaaacccggggaactacacagcccggattcaggccacatctctctctgggaatgggtcgtggacagatcctgtgttcttctatgtccaggccaaaacaggatatgaaaacttcatccatctgatcatcgctctgcccgtcgctgtcctgttgatcgtgggagggttggtgattatgctgtacgtcttccatagaaagagaaataacagcaggctggggaatggagtgctgtatgcctctgtgaacccggagtacttcagcgctgctgatgtgtacgttcctgatgagtgggaggtggctcgggagaagatcaccatgagccgggaacttgggcaggggtcgtttgggatggtctatgaaggagttgccaagggtgtggtgaaagatgaacctgaaaccagagtggccattaaaacagtgaacgaggccgcaagcatgcgtgagaggattgagtttctcaacgaagcttctgtgatgaaggagttcaattgtcaccatgtggtgcgattgctgggtgtggtgtcccaaggccagccaacactggtcatcatggaactgatgacacggggcgatctcaaaagttatctccggtctctgaggccagaaatggagaataatccagtcctagcacctccaagcctgagcaagatgattcagatggccggagagattgcagacggcatggcatacctcaacgccaataagttcgtccacagagaccttgctgcccggaattgcatggtagccgaagatttcacagtcaaaatcggagattttggtatgacgcgagatatctatgagacagactattaccggaaaggagggaaagggctgctgcccgtgcgctggatgtctcctgagtccctcaaggatggagtcttcaccacttactcggacgtctggtccttcggggtcgtcctctgggagatcgccacactggccgagcagccctaccagggcttgtccaacgagcaagtccttcgcttcgtcatggagggcggccttctggacaagccagacaactgtcctgacatgctgtttgaactgatgcgcatgtgctggcagtataaccccaagatgaggccttccttcctggagatcatcagcagcatcaaagaggagatggagcctggcttccgggaggtctccttctactacagcgaggagaacaagctgcccgagccggaggagctggacctggagccagagaacatggagagcgtccccctggacccctcggcctcctcgtcctccctgccactgcccgacagacactcaggacacaaggccgagaacggccccggccctggggtgctggtcctccgcgccagcttcgacgagagacagccttacgcccacatgaacgggggccgcaagaacgagcgggccttgccgctgccccagtcttcgacctgctgatccttggatcctgaatctgtgcaaacagtaacgtgtgcgcacgcgcagcggggtggggggggagagagagttttaacaatccattcacaagcctcctgtacctcagtggatcttcagaactgcccttgctgcccgcgggagacagcttctctgcagtaaaacacatttgggatgttccttttttcaatatgcaagcagctttttattccctgcccaaacccttaactgacatgggcctttaagaaccttaatgacaacacttaatagcaacagagcacttgagaaccagtctcctcactctgtccctgtccttccctgttctccctttctctctcctctctgcttcataacggaaaaataattgccacaagtccagctgggaagccctttttatcagtttgaggaagtggctgtccctgtggccccatccaaccactgtacacacccgcctgacaccgtgggtcattacaaaaaaacacgtggagatggaaatttttacctttatctttcacctttctagggacatgaaatttacaaagggccatcgttcatccaaggctgttaccattttaacgctgcctaattttgccaaaatcctgaactttctccctcatcggcccggcgctgattcctcgtgtccggaggcatgggtgagcatggcagctggttgctccatttgagagacacgctggcgacacactccgtccatccgactgcccctgctgtgctgctcaaggccacaggcacacaggtctcattgcttctgactagattattatttgggggaactggacacaataggtctttctctcagtgaaggtggggagaagctgaaccggc

SEQ ID NO: 36 - DNA, 5010 bp, Human
gggcggcgcggtcggagggggccggcgcgcagagccagacgccgccgcttgttttggttggggctctcggcaactctccgaggaggaggaggaggagggaggaggggagaagtaactgcagcgcagcgcctcccgaggaacaggcgtcttccccgaacccttcccaaacctcccccatcccctctcgcccttgtcccctcccctcctccccagccgcctggagcgaggggcagggatgagtctgtccctccggccggtccccagctgcagtggctgcccggtatcgtttcgcatggaaaagccactttctccacccgccgagatgggcccggatgggggctgcagaggacgcgcccgcgggcggcggcagcagcagcagcagcagcagcagcaacagcaacagccgcagcgccgcggtctctgcgactgagctggtatttgggcggctggtggcggctgggacggttggggggtgggagcggataacggaggagggagaaccccgtgcaacgttgggacttggcaacccgcctccccctgcccaaggatatttaatttgcctcgggaatcgctgcttccagaggggaactcaggagggaaggcgcgcgcgcgcgcgcgctcctggaggggcaccgcagggacccccgactgtcgcctccctgtgccggactccagccggggcgacgagagatgcatcttcgctccttcctggtggcggcggcggctgagaggagacttggctctcggaggatcggggctgccctcaccccggacgcactgcctccccgccgggcgtgaagcgcccgaaaactccggtcgggctctctcctgggctcagcagctgcgtcctccttcagctgcccctccccggcgcggggggcggcgtggatttcagagtcggggtttctgctgcctccagccctgtttgcatgtgccgggccgcggcgaggagcctccgccccccacccggttgtttttcggagcctccctctgctcagcgttggtggtggcggtggcagcatggcgagccctccggagagcgatggcttctcggacgtgcgcaaggtgggctacctgcgcaaacccaagagcatgcacaaacgcttcttcgtactgcgcgcggccagcgaggctgggggcccggcgcgcctcgagtactacgagaacgagaagaagtggcggcacaagtcgagcgcccccaaacgctcgatcccccttgagagctgcttcaacatcaacaagcgggctgactccaagaacaagcacctggtggctctctacacccgggacgagcactttgccatcgcggcggacagcgaggccgagcaagacagctggtaccaggctctcctacagctgcacaaccgtgctaagggccaccacgacggagctgcggccctcggggcgggaggtggtgggggcagctgcagcggcagctccggccttggtgaggctggggaggacttgagctacggtgacgtgcccccaggacccgcattcaaagaggtctggcaagtgatcctgaagcccaagggcctgggtcagacaaagaacctgattggtatctaccgcctttgcctgaccagcaagaccatcagcttcgtgaagctgaactcggaggcagcggccgtggtgctgcagctgatgaacatcaggcgctgtggccactcggaaaacttcttcttcatcgaggtgggccgttctgccgtgacggggcccggggagttctggatgcaggtggatgactctgtggtggcccagaacatgcacgagaccatcctggaggccatgcgggccatgagtgatgagttccgccctcgcagcaagagccagtcctcgtccaactgctctaaccccatcagcgtccccctgcgccggcaccatctcaacaatcccccgcccagccaggtggggctgacccgccgatcacgcactgagagcatcaccgccacctccccggccagcatggtgggcgggaagccaggctccttccgtgtccgcgcctccagtgacggcgaaggcaccatgtcccgcccagcctcggtggacggcagccctgtgagtcccagcaccaacagaacccacgcccaccggcatcggggcagcgcccggctgcaccccccgctcaaccacagccgctccatccccatgccggcttcccgctgctcgccttcggccaccagcccggtcagtctgtcgtccagtagcaccagtggccatggctccacctcggattgtctcttcccacggcgatctagtgcttcggtgtctggttcccccagcgatggcggtttcatctcctcggatgagtatggctccagtccctgcgatttccggagttccttccgcagtgtcactccggattccctgggccacaccccaccagcccgcggtgaggaggagctaagcaactatatctgcatgggtggcaaggggccctccaccctgaccgcccccaacggtcactacattttgtctcggggtggcaatggccaccgctgcaccccaggaacaggcttgggcacgagtccagccttggctggggatgaagcagccagtgctgcagatctggataatcggttccgaaagagaactcactcggcaggcacatcccctaccattacccaccagaagaccccgtcccagtcctcagtggcttccattgaggagtacacagagatgatgcctgcctacccaccaggaggtggcagtggaggccgactgccgggacacaggcactccgccttcgtgcccacccgctcctacccagaggagggtctggaaatgcaccccttggagcgtcggggggggcaccaccgcccagacagctccaccctccacacggatgatggctacatgcccatgtccccaggggtggccccagtgcccagtggccgaaagggcagtggagactatatgcccatgagccccaagagcgtatctgccccacagcagatcatcaatcccatcagacgccatccccagagagtggaccccaatggctacatgatgatgtcccccagcggtggctgctctcctgacattggaggtggccccagcagcagcagcagcagcagcaacgccgtcccttccgggaccagctatggaaagctgtggacaaacggggtagggggccaccactctcatgtcttgcctcaccccaaacccccagtggagagcagcggtggtaagctcttaccttgcacaggtgactacatgaacatgtcaccagtgggggactccaacaccagcagcccctccgactgctactacggccctgaggacccccagcacaagccagtcctctcctactactcattgccaagatcctttaagcacacccagcgccccggggagccggaggagggtgcccggcatcagcacctccgcctttccactagctctggtcgccttctctatgctgcaacagcagatgattcttcctcttccaccagcagcgacagcctgggtgggggatactgcggggctaggctggagcccagccttccacatccccaccatcaggttctgcagccccatctgcctcgaaaggtggacacagctgctcagaccaatagccgcctggcccggcccacgaggctgtccctgggggatcccaaggccagcaccttacctcgggcccgagagcagcagcagcagcagcagcccttgctgcaccctccagagcccaagagcccgggggaatatgtcaatattgaatttgggagtgatcagtctggctacttgtctggcccggtggctttccacagctcaccttctgtcaggtgtccatcccagctccagccagctcccagagaggaagagactggcactgaggagtacatgaagatggacctggggccgggccggagggcagcctggcaggagagcactggggtcgagatgggcagactgggccctgcacctcccggggctgctagcatttgcaggcctacccgggcagtgcccagcagccggggtgactacatgaccatgcagatgagttgtccccgtcagagctacgtggacacctcgccagctgcccctgtaagctatgctgacatgcgaacaggcattgctgcagaggaggtgagcctgcccagggccaccatggctgctgcctcctcatcctcagcagcctctgcttccccgactgggcctcaaggggcagcagagctggctgcccactcgtccctgctggggggcccacaaggacctgggggcatgagcgccttcacccgggtgaacctcagtcctaaccgcaaccagagtgccaaagtgatccgtgcagacccacaagggtgccggcggaggcatagctccgagactttctcctcaacacccagtgccacccgggtgggcaacacagtgccctttggagcgggggcagcagtagggggcggtggcggtagcagcagcagcagcgaggatgtgaaacgccacagctctgcttcctttgagaatgtgtggctgaggcctggggagcttgggggagcccccaaggagccagccaaactgtgtggggctgctgggggtttggagaatggtcttaactacatagacctggatttggtcaaggacttcaaacagtgccctcaggagtgcacccctgaaccgcagcctcccccacccccaccccctcatcaacccctgggcagcggtgagagcagctccacccgccgctcaagtgaggatttaagcgcctatgccagcatcagtttccagaagcagccagaggaccgtcagtagctcaactggacatcacagcagaatttcgcagtacttgtggcccactctctgcagagagtaaattgagagcccaagaagcagggcaaaaagagcctctcagactcggtcatagcagccctgccacctttacctggcatcaaatttatcttttagttttgaaactgcagctgacaaagacacagaccccagccatgccttttgggttcagtttttttgtttttgtcattctttgttatgccctccccctttaaaagaaaaaag

SEQ ID NO: 37 - DNA, 8826 bp, Human
cagttatacatgggaagctgttgataccaaaaataatgtactttataaaatcaacatctgtggaagtgtggatattgtccagtgcgggccatcaagtgctgtttgtatgcacgacttgaagacacgcacttatcattcagtgggtgactctgttttgagaagtgcaaccagatctctcctggaattcaacacaacagtgagctgtgaccagcaaggcacaaatcacagagtccagagcagcattgccttcctgtgtgggaaaaccctgggaactcctgaatttgtaactgcaacagaatgtgtgcactactttgagtggaggaccactgcagcctgcaagaaagacatatttaaagcaaataaggaggtgccatgctatgtgtttgatgaagagttgaggaagcatgatctcaatcctctgatcaagcttagtggtgcctacttggtggatgactccgatccggacacttctctattcatcaatgtttgtagagacatagacacactacgagacccaggttcacagctgcgggcctgtccccccggcactgccgcctgcctggtaagaggacaccaggcgtttgatgttggccagccccgggacggagtgaagctggtgcgcaaggacaggcttgtcctgagttacgtgagggaagaggcaggaaagctagacttttgtgatggtcacagccctgcggtgactattacatttgtttgcccgtcggagcggagagagggcaccattcccaaactcacagctaaatccaactgccgctatgaaattgagtggattactgagtatgcctgccacagagattacctggaaagtaaaacttgttctctgagcggcgagcagcaggatgtctccatagacctcacaccacttgcccagagcggaggttcgtcctatatttcagatggaaaagaatatttgttttatttgaatgtctgtggagaaactgaaatacagttctgtaataaaaaacaagctgcagtttgccaagtgaaaaagagcgatacctctcaagtcaaagcagcaggaagataccacaatcagaccctccgatattcggatggagacctcaccttgatatattttggaggtgatgaatgcagctcagggtttcagcggatgagcgtcataaactttgagtgcaataaaaccgcaggtaacgatgggaaaggaactcctgtattcacaggggaggttgactgcacctacttcttcacatgggacacggaatacgcctgtgttaaggagaaggaagacctcctctgcggtgccaccgacgggaagaagcgctatgacctgtccgcgctggtccgccatgcagaaccagagcagaattgggaagctgtggatggcagtcagacggaaacagagaagaagcattttttcattaatatttgtcacagagtgctgcaggaaggcaaggcacgaggatgtcccgaggacgcggcagtgtgtgcagtggataaaaatggaagtaaaaatctgggaaaatttatttcctctcccatgaaagagaaaggaaacattcaactctcttattcagatggtgatgattgtggtcatggcaagaaaattaaaactaatatcacacttgtatgcaagccaggtgatctggaaagtgcaccagtgttgagaacttctggggaaggcggttgcttttatgagtttgagtggcacacagctgcggcctgtgtgctgtctaagacagaaggggagaactgcacggtctttgactcccaggcagggttttcttttgacttatcacctctcacaaagaaaaatggtgcctataaagttgagacaaagaagtatgacttttatataaatgtgtgtggcccggtgtctgtgagcccctgtcagccagactcaggagcctgccaggtggcaaaaaggcaatgatgagaagacttggaacttgggtctgagtaatgcgaagctttcatattatgatgggatgatccaactgaactacagaggcggcacgccctataacaatgaaagacacacaccgagagctacgctcatcacctttctctgtgatcgagacgcgggagtgggcttccctgaatatcaggaagaggataactccacctacaacttccggtggtacaccagctatgcctgcccggaggagcccctggaatgcgtagtgaccgacccctccacgctggagcagtacgacctctccagtctggcaaaatctgaaggtggccttggaggaaactggtatgccatggacaactcaggggaacatgtcacgtggaggaaatactacattaacgtgtgtcggcctctgaatccagtgccgggctgcaaccgatatgcatcggcttgccagatgaagtatgaaaaagatcagggctccttcactgaagtggtttccatcagtaacttgggaatggcaaagaccggcccggtggttgaggacagcggcagcctccttctggaatacgtgaatgggtcggcctgcaccaccagcgatggcagacagaccacatataccacgaggatccatctcgtctgctccaggggcaggctgaacagccaccccatcttttctctcaactgggagtgtgtggtcagtttcctgtggaacacagaggctgcctgtcccattcagacaacgacggatacagaccaggcttgctctataagggatcccaacagtggatttgtgtttaatcttaatccgctaaacagttcgcaaggatataacgtctctggcattgggaagatttttatgtttaatgtctgcggcacaatgcctgtctgtgggaccatcctgggaaaacctgcttctggctgtgaggcagaaacccaaactgaagagctcaagaattggaagccagcaaggccagtcggaattgagaaaagcctccagctgtccacagagggcttcatcactctgacctacaaagggcctctctctgccaaaggtaccgctgatgcttttatcgtccgctttgtttgcaatgatgatgtttactcagggcccctcaaattcctgcatcaagatatcgactctgggcaagggatccgaaacacttactttgagtttgaaaccgcgttggcctgtgttccttctccagtggactgccaagtcaccgacctggctggaaatgagtacgacctgactggcctaagcacagtcaggaaaccttggacggctgttgacacctctgtcgatgggagaaagaggactttctatttgagcgtttgcaatcctctcccttacattcctggatgccagggcagcgcagtggggtcttgcttagtgtcagaaggcaatagctggaatctgggtgtggtgcagatgagtccccaagccgcggcgaatggatctttgagcatcatgtatgtcaacggtgacaagtgtgggaaccagcgcttctccaccaggatcacgtttgagtgtgctcagatatcgggctcaccagcatttcagcttcaggatggttgtgagtacgtgtttatctggagaactgtggaagcctgtcccgttgtcagagtggaaggggacaactgtgaggtgaaagacccaaggcatggcaacttgtatgacctgaagcccctgggcctcaacgacaccatcgtgagcgctggcgaatacacttattacttccgggtctgtgggaagctttcctcagacgtctgccccacaagtgacaagtccaaggtggtctcctcatgtcaggaaaagcgggaaccgcagggatttcacaaagtggcaggtctcctgactcagaagctaacttatgaaaatggcttgttaaaaatgaacttcacggggggggacacttgccataaggtttatcagcgctccacagccatcttcttctactgtgaccgcggcacccagcggccagtatttctaaaggagacttcagattgttcctacttgtttgagtggcgaacgcagtatgcctgcccacctttcgatctgactgaatgttcattcaaagatggggctggcaactccttcgacctctcgtccctgtcaaggtacagtgacaactgggaagccatcactgggacgggggacccggagcactacctcatcaatgtctgcaagtctctggccccgcaggctggcactgagccgtgccctccagaagcagccgcgtgtctgctgggtggctccaagcccgtgaacctcggcagggtaagggacggacctcagtggagagatggcataattgtcctgaaatacgttgatggcgacttatgtccagatgggattcggaaaaagtcaaccaccatccgattcacctgcagcgagagccaagtgaactccaggcccatgttcatcagcgccgtggaggactgtgagtacacctttgcctggcccacagccacagcctgtcccatgaagagcaacgagcatgatgactgccaggtcaccaacccaagcacaggacacctgtttgatctgagctccttaagtggcagggcgggattcacagctgcttacagcgagaaggggttggtttacatgagcatctgtggggagaatgaaaactgccctcctggcgtgggggcctgctttggacagaccaggattagcgtgggcaaggccaacaagaggctgagatacgtggaccaggtcctgcagctggtgtacaaggatgggtccccttgtccctccaaatccggcctgagctataagagtgtgatcagtttcgtgtgcaggcctgaggccgggccaaccaataggcccatgctcatctccctggacaagcagacatgcactctcttcttctcctggcacacgccgctggcctgcgagcaagcgaccgaatgttccgtgaggaatggaagctctattgttgacttgtctccccttattcatcgcactggtggttatgaggcttatgatgagagtgaggatgatgcctccgataccaaccctgatttctacatcaatatttgtcagccactaaatcccatgcacggagtgccctgtcctgccggagccgctgtgtgcaaagttcctattgatggtccccccatagatatcggccgggtagcaggaccaccaatactcaatccaatagcaaatgagatttacttgaattttgaaagcagtactccttgcttagcggacaagcatttcaactacacctcgctcatcgcgtttcactgtaagagaggtgtgagcatgggaacgcctaagctgttaaggaccagcgagtgcgactttgtgttcgaatgggagactcctgtcgtctgtcctgatgaagtgaggatggatggctgtaccctgacagatgagcagctcctctacagcttcaacttgtccagcctttccacgagcacctttaaggtgactcgcgactcgcgcacctacagcgttggggtgtgcacctttgcagtcgggccagaacaaggaggctgtaaggacggaggagtctgtctgctctcaggcaccaagggggcatcctttggacggctgcaatcaatgaaactggattacaggcaccaggatgaagcggtcgttttaagttacgtgaatggtgatcgttgccctccagaaaccgatgacggcgtcccctgtgtcttccccttcatattcaatgggaagagctacgaggagtgcatcatagagagcagggcgaagctgtggtgtagcacaactgcggactacgacagagaccacgagtggggcttctgcagacactcaaacagctaccggacatccagcatcatatttaagtgtgatgaagatgaggacattgggaggccacaagtcttcagtgaagtgcgtgggtgtgatgtgacatttgagtggaaaacaaaagttgtctgccctccaaagaagttggagtgcaaattcgtccagaaacacaaaacctacgacctgcggctgctctcctctctcaccgggtcctggtccctggtccacaacggagtctcgtactatataaatctgtgccagaaaatatataaagggcccctgggctgctctgaaagggccagcatttgcagaaggaccacaactggtgacgtccaggtcctgggactcgttcacacgcagaagctgggtgtcataggtgacaaagttgttgtcacgtactccaaaggttatccgtgtggtggaaataagaccgcatcctccgtgatagaattgacctgtacaaagacggtgggcagacctgcattcaagaggtttgatatcgacagctgcacttactacttcagctgggactcccgggctgcctgcgccgtgaagcctcaggaggtgcagatggtgaatgggaccatcaccaaccctataaatggcaagagcttcagcctcggagatatttattttaagctgttcagagcctctggggacatgaggaccaatggggacaactacctgtatgagatccaactttcctccatcacaagctccagaaacccggcgtgctctggagccaacatatgccaggtgaagcccaacgatcagcacttcagtcggaaagttggaacctctgacaagaccaagtactaccttcaagacggcgatctcgatgtcgtgtttgcctcttcctctaagtgcggaaaggataagaccaagtctgtttcttccaccatcttcttccactgtgaccctctggtggaggacgggatccccgagttcagtcacgagactgccgactgccagtacctcttctcttggtacacctcagccgtgtgtcctctgggctcctgggaggcaagtactggtgggtgggctttgacagcgagaatcccggggacgacgggcagatgcacaaggggctgtcagaacggagccaggcagtcggcgcggtgctcagcctgctgctggtggcgctcacctgctgcctgctggccctgttgctctacaagaaggagaggagggaaacagtgataagtaagctgaccacttgctgtaggagaagttccaacgtgtcctacaaatactcaaaggtgaataaggaagaagagacagatgagaatgaaacagagtggctgatggaagagatccagctgcctcctccacggcagggaaaggaagggcaggagaacggccatattaccaccaagtcagtgaaagccctcagctccctgcatggggatgaccaggacagtgaggatgaggttctgaccatcccagaggtgaaagttcactcgggcaggggagctggggcagagagctcccacccagtgagaaacgcacagagcaatgcccttcaggagcgtgaggacgatagggtggggctggtcaggggtgagaaggcgaggaaagggaagtccagctctgcacagcagaagacagtgagctccaccaagctggtgtccttccatgacgacagcgacgaggacctcttacacatctgactccgcagtgcctgcaggggagcacggagccgcgggacagccaagcacctccaaccaaataagacttccactcgatgatgcttctataattttgcctttaacagaaactttcaaaagggaagagtttttgtgatgggggagagggtgaaggaggtcaggccccactccttcctgattgtttacagtcattggaataaggcatggctcagatcggccacagggcggtaccttgtgcccagggttttgccccaagtcctcatttaaaagcataaggccggacgcatctcaaaacagagggctgcattcgaagaaacccttgctgctttagtcccgatagggtatttgaccccgatatattttagcattttaattctctccccctatttattgactttgacaattactcaggtttgagaaaaaggaaaaaaaaacagccaccgtttcttcctgccagcaggggtgtgatgtaccagtttgtccatcttgagatggtgaggctgtcagtgtatggggcagcttccggcgggatgttgaactggtcattaatgtgtcccctgagttggagctcattctgtctcttttctcttttgctttctgtttcttaagggcacacacacgtgcgtgcgagcacacacacacatacgtgcacagggtccccgagtgcctaggttttggagagtttgcctgttctatgcctttagtcaggaatggctgcacctttttgcatgatatcttcaagcctgggcgtacagagcacatttgtcagtatttttgccggctggtgaattcaaacaacctgcccaaagattgatttgtgtgtttgtgtgtgtgtgtgtgtgtgtgtgtgtgtgtgtgtgagtggagttgaggtgtcagagaaaatgaattttttccagatttggggtataggtctcatctcttcaggttctcatgataccacctttactgtgcttatttttttaagaaaaaagtgttgatcaaccattcgacctataagaagccttaatttgcacagtgtgtgacttacagaaactgcatgaaaaatcatgggccagagcctcggccctagcattgcacttggcctcatgctggagggaggctgggcgggtacagcgcggaggaggagggaggccaggcgggcatggcgtggaggaggagggaggccgggcggtcacagcatggaggaggagggaggcgctgctggtgttcttattctggcggcagcgcctttcctgccatgtttagtgaatgacttttctcgcattgtagaattgtatatagactctggtgttctattgctgagaagcaaaccgccctgcagcatccctcagcctgtaccggtttggctggcttgtttgatttcaacatgagtgtattttttaaaattgatttttctcttcatttttttttcaatcaactttactgtaatataaagtattcaacaatttcaataaaagataaattattaa

SEQ ID NO: 38 - DNA, 1514 bp, Human
atcggccaccgccatcccatccagcgagcatctgccgccgcgccgccgccaccctcccagagagcactggccaccgctccaccatcacttgcccagagtttgggccaccgcccgccgccaccagcccagagagcatcggcccctgtctgctgctcgcgcctggagatgtcagaggtccccgttgctcgcgtctggctggtactgctcctgctgactgtccaggtcggcgtgacagccggcgctccgtggcagtgcgcgccctgctccgccgagaagctcgcgctctgcccgccggtgtccgcctcgtgctcggaggtcacccggtccgccggctgcggctgttgcccgatgtgcgccctgcctctgggcgccgcgtgcggcgtggcgactgcacgctgcgcccggggactcagttgccgcgcgctgccgggggagcagcaacctctgcacgccctcacccgcggccaaggcgcctgcgtgcaggagtctgacgcctccgctccccatgctgcagaggcagggagccctgaaagcccagagagcacggagataactgaggaggagctcctggataatttccatctgatggccccttctgaagaggatcattccatcctttgggacgccatcagtacctatgatggctcgaaggctctccatgtcaccaacatcaaaaaatggaaggagccctgccgaatagaactctacagagtcgtagagagtttagccaaggcacaggagacatcaggagaagaaatttccaaattttacctgccaaactgcaacaagaatggattttatcacagcagacagtgtgagacatccatggatggagaggcgggactctgctggtgcgtctacccttggaatgggaagaggatccctgggtctccagagatcaggggagaccccaactgccagatatattttaatgtacaaaactgaaaccagatgaaataatgttctgtcacgtgaaatatttaagtatatagtatatttatactctagaacatgcacatttatatatatatgtatatgtatatatatatagtaactactttttatactccatacataacttgatatagaaagctgtttatttattcactgtaagtttattttttctacacagtaaaaacttgtactatgttaataacttgtcctatgtcaatttgtatatcatgaaacacttctcatcatattgtatgtaagtaattgcatttctgctcttccaaagctcctgcgtctgtttttaaagagcatggaaaaatactgcctagaaaatgcaaaatgaaataagagagagtagtttttcagctagtttgaaggaggacggttaacttgtatattccaccattcacatttgatgtacatgtgtagggaaagttaaaagtgttgattacataatcaaagctacctgtggtgatgttgccacctgttaaaatgtacactggatatgttgttaaacacgtgtctataatggaaacatttacaataaatattctgcatggaaa

SEQ ID NO: 39 - DNA, 817 bp, Human
ctgcatgagtgtgtgctctgtgtcactgtggattggagttgaaaaagcttgactggcgtcattcaggagctggatggcgtgggacatgtgcaaccaggactctgagtctgtatggagtgacatcgagtgtgctgctctggttggtgaagaccagcctctttgcccagatcttcctgaacttgatctttctgaactagatgtgaacgacttggatacagacagctttctgggtggactcaagtggtgcagtgaccaatcagaaataatatccaatcagtacaacaatgagccttcaaacatatttgagaagatagatgaagagaatgaggcaaacttgctagcagtcctcacagagacactagacagtctccctgtggatgaagacggattgccctcatttgatgcgctgacagatggagacgtgaccactgacaatgaggctagtccttcctccatgcctgacggcacccctccaccccaggaggcagaagagccgtctctaactgagaattcatggagcaataaagcgaagagtatttgtcaacagcaaaagccacaaagacgtccctgctcggagcttctcaaatatctgaccacaaacgatgaccctcctcacaccaaacccacagagaacagaaacagcagcagagacaaatgcacctccaaaaagaagtcccacacacagtcgcagtcacaacacttacaagtttgtttttataaatgtgccatatcttccagtgaccccaagggttccccatttgagaacaagactattgaacgcaccttaagtgtggaactctctggaactgcaggtaag

SEQ ID NO: 40 - DNA, 3818 bp, Human
gttggctctgacacgttttattccttcaagtacgaaatcaaggagggggattgtcctgttcaaagtggcaaaacctggcaggactgtgagtacaaggatgctgcaaaagcagccactggagaatgcacggcaaccgtggggaagaggagcagtacgaaattctccgtggctacccagacctgccagattactccagccgagggccctgtggtgacagcccagtacgactgcctcggctgtgtgcatcctatatcaacgcagagcccagacctggagcccattctgagacacggcattcagtactttaacaacaacactcaacattcctccctcttcacgcttaatgaagtaaaacgggcccaaagacaggtggtggctggattgaactttcgaattacctactcaattgtgcaaacgaattgttccaaagagaattttctgttcttaactccagactgcaagtccctttggaatggtgataccggtgaatgtacagataatgcatacatcgatattcagctacgaattgcttccttctcacagaactgtgacatttatccagggaaggattttgtacaaccacctaccaagatttgcgtgggctgccccagagatatacccaccaacagcccagagctggaggagacactgactcacaccatcacaaagcttaatgcagagaataacgcaactttctatttcaagattgacaatgtgaaaaaagcaagagtacaggtggtggctggcaagaaatattttattgacttcgtggccagggaaaccacatgttccaaggaaagtaatgaagagttgaccgaaagctgtgagaccaaaaaacttggccaaagcctagattgcaacgctgaagtttatgtggtaccctgggagaaaaaaatttaccctactgtcaactgtcaaccactgggaatgatctcactgatgaaaaggcctccaggtttttcacctttccgatcatcacgaataggggaaataaaagaagaaacaactgtaagtccaccccacacttccatggcacctgcacaagatgaagagcgggattcaggaaaagaacaagggcatactcgtagacatgactggggccatgaaaaacaaagaaaacataatcttggccatggccataaacatgaacgtgaccaagggcatgggcaccaaagaggacatggccttggccatggacacgaacaacagcatggtcttggtcatggacataagttcaaacttgatgatgatcttgaacaccaagggggccatgtccttgaccatggacataagcataagcatggtcatggccacggaaaacataaaaataaaggcaaaaagaatggaaagcacaatggttggaaaacagagcatttggcaagctcttctgaagacagtactacaccttctgcacagacacaagagaagacagaagggccaacacccatcccttccctagccaagccaggtgtaacagttaccttttctgactttcaggactctgatctcattgcaactatgatgcctcctatatcaccagctcccatacagagtgatgacgattggatccctgatatccagatagacccaaatggcctttcatttaacccaatatcagattttccagacacgacctccccaaaatgtcctggacgcccctggaagtcagttagtgaaattaatccaaccacacaaatgaaagaatcttattatttcgatctcactgatggcctttcttaatttaagtggctatgggtatttctttcatactttattaaagtatcaatatccctctctccattgtccagatgaaaatatcctgatataatgcaccaaaaaccatgcagcttcggaacagtctaaagagaagtggtgagactcccagtggagacaccatcagtctccacggactgcataaaattgtgtgccacaattctaactcttttctgaatcttcttcccaagttttctaaactagcacagtaaacagacaaactaatgtgccgtatggcctgctgcaattggcttctctgataacaaatatgtaccttacaacatatgtcatgaatttgcatacaaagattcttgtcattcttaataaactgtggcacttggtatttgaatgtgtgtgaaaataagggaagtcaagagattaaatgctgaacttattaatggaatagaaataataaggaggctgaggctggagaattgcttgaacccgggaggcggaggttgcagtgagccgagatcgtgccactgcgctccagcctgggcatcagagcaagattctgtctcagaaaaaaagaaaaaaaaagaaataataagaaaaacttccagatttcaaagtaacaagaaagaagacaggttggccaaagggaggaaaggggggacataaattaattgactttctattcccaaaatgggctagttatatcaaataaatactcccactgccctttctgagtgagagtgtttctcataagtcaaaaatttctgtttactcattaactactctttgcaacaggctttcatatagaagtattctgtttatttttgctgagcctagattgagtaattcttagtttacagaagctccgagcttaatgataaggatgaaaagcagagggagcaatatagaagcaggcttgctaataaaactttttaaataattgacaagggaatattatggaatgtgatgcaaagtttgttccgaaattttatgaggaaattactctctagtctcactttatagtctttttgctatgactttgaagaccattgatttttgagaagcagaataataggattgcctttcattgccctatagtgcaaagaaggtatatgctttataaccaatgttgtacttttgcctagaaaaacaagatatggctttaaatagctacaatcatctttggatgtatatgtcactgctgcttcaagttattggatgcatttgaacctctgagtttgtctttcattttaaatattgtctgttcttttaaataaacaaccacagatgtcaggaaaaagtcttaccttgtcaactggttgctccactttttaaaaatgattgaatgataacatcatattaactgcgttttactatacttacagagtcacctaaggtcctgcgagtacaagggtcgacccccaaaggcaggggcagagccagcatctgagagggaggtctcttgaccaatgggcagaatcttcactccaggcacatagccccaaccacctctgccagcaaccttgagaggaaggacaagaagaaagatgggatagaatttaaatagagaagaatgccattttatcactctgcctctgggtgaaataaagatcagtcttgatgttctaactctaattcacagtggtctcctttcagccctacccattctgcagcaaattccagctggtcagagagtcagtgctgtggctctgccatggaggctcataacccaacactggaacattccctagccaaggcagaagtccttaggcgggacttccttaccaccacgggtgctaaaagaagagttagtaggtcatgcttctaccagtaatctaaggactctctccttctcttcttcctctttctccagatttccaagccttagctaagagtaatttggcttgtttagtattgttttcttatggtccagttaattaccaaaaatatttttaaaatcatctctgttaatagaatgtctaccaacttctcactatcagaaaatactcaacctccaaacaatttgaaattatctttctgatccaggtaaagaagcaaattgaaaatcaataaagtaaaaagtgacggag

SEQ ID NO: 41 - DNA, 1713 bp, Human
gttggctctgacacgttttattccttcaagtacgaaatcaaggagggggattgtcctgttcaaagtggcaaaacctggcaggactgtgagtacaaggatgctgcaaaagcagccactggagaatgcacggcaaccgtggggaagaggagcagtacgaaattctccgtggctacccagacctgccagattactccagccgagggccctgtggtgacagcccagtacgactgcctcggctgtgtgcatcctatatcaacgcagagcccagacctggagcccattctgagacacggcattcagtactttaacaacaacactcaacattcctccctcttcacgcttaatgaagtaaaacgggcccaaagacaggtggtggctggattgaactttcgaattacctactcaattgtgcaaacgaattgttccaaagagaattttctgttcttaactccagactgcaagtccctttggaatggtgataccggtgaatgtacagataatgcatacatcgatattcagctacgaattgcttccttctcacagaactgtgacatttatccagggaaggattttgtacaaccacctaccaagatttgcgtgggctgccccagagatatacccaccaacagcccagagctggaggagacactgactcacaccatcacaaagcttaatgcagagaataacgcaactttctatttcaagattgacaatgtgaaaaaagcaagagtacaggtggtggctggcaagaaatattttattgacttcgtggccagggaaaccacatgttccaaggaaagtaatgaagagttgaccgaaagctgtgagaccaaaaaacttggccaaagcctagattgcaacgctgaagtttatgtggtaccctgggagaaaaaaatttaccctactgtcaactgtcaaccactgggaatgatctcactgatgaaaaggcctccaggtttttcacctttccgatcatcacgaataggggaaataaaagaagaaacaactagtcacctaaggtcctgcgagtacaagggtcgacccccaaaggcaggggcagagccagcatctgagagggaggtctcttgaccaatgggcagaatcttcactccaggcacatagccccaaccacctctgccagcaaccttgagaggaaggacaagaagaaagatgggatagaatttaaatagagaagaatgccattttatcactctgcctctgggtgaaataaagatcagtcttgatgttctaactctaattcacagtggtctcctttcagccctacccattctgcagcaaattccagctggtcagagagtcagtgctgtggctctgccatggaggctcataacccaacactggaacattccctagccaaggcagaagtccttaggcgggacttccttaccaccacgggtgctaaaagaagagttagtaggtcatgcttctaccagtaatctaaggactctctccttctcttcttcctctttctccagatttccaagccttagctaagagtaatttggcttgtttagtattgttttcttatggtccagttaattaccaaaaatatttttaaaatcatctctgttaatagaatgtctaccaacttctcactatcagaaaatactcaacctccaaacaatttgaaattatctttctgatccaggtaaagaagcaaattgaaaatcaataaagtaaaaagtgacggag

SEQ ID NO: 42 - DNA, 8824 bp, Human
cagttatacatgggaagctgttgataccaaaaataatgtactttataaaatcaacatctgtggaagtgtggatattgtccagtgcgggccatcaagtgctgtttgtatgcacgacttgaagacacgcacttatcattcagtgggtgactctgttttgagaagtgcaaccagatctctcctggaattcaacacaacagtgagctgtgaccagcaaggcacaaatcacagagtccagagcagcattgccttcctgtgtgggaaaaccctgggaactcctgaatttgtaactgcaacagaatgtgtgcactactttgagtggaggaccactgcagcctgcaagaaagacatatttaaagcaaataaggaggtgccatgctatgtgtttgatgaagagttgaggaagcatgatctcaatcctctgatcaagcttagtggtgcctacttggtggatgactccgatccggacacttctctattcatcaatgtttgtagagacatagacacactacgagacccaggttcacagctgcgggcctgtccccccggcactgccgcctgcctggtaagaggacaccaggcgtttgatgttggccagccccgggacggactgaagctggtgcgcaaggacaggcttgtcctgagttacgtgagggaagaggcaggaaagctagacttttgtgatggtcacagccctgcggtgactattacatttgtttgcccgtcggagcggagagagggcaccattcccaaactcacagctaaatccaactgccgctatgaaattgagtggattactgagtatgcctgccacagagattacctggaaagtaaaacttgttctctgagcggcgagcagcaggatgtctccatagacctcacaccacttgcccagagcggaggttcatcctatatttcagatggaaaagaatatttgttttatttgaatgtctgtggagaaactgaaatacagttctgtaataaaaaacaagctgcagtttgccaagtgaaaaagagcgatacctctcaagtcaaagcagcaggaagataccacaatcagaccctccgatattcggatggagacctcaccttgatatattttggaggtgatgaatgcagctcagggtttcagcggatgagcgtcataaactttgagtgcaataaaaccgcaggtaacgatgggaaaggaactcctgtattcacaggggaggttgactgcacctacttcttcacatgggacacggaatacgcctgtgttaaggagaaggaagacctcctctgcggtgccaccgacgggaagaagcgctatgacctgtccgcgctggtccgccatgcagaaccagagcagaattgggaagctgtggatggcagtcagacggaaacagagaagaagcattttttcattaatatttgtcacagagtgctgcaggaaggcaaggcacgagggtgtcccgaggacgcggcagtgtgtgcagtggataaaaatggaagtaaaaatctgggaaaatttatttcctctcccatgaaagagaaaggaaacattcaactctcttattcagatggtgatgattgtggtcatggcaagaaaattaaaactaatatcacacttgtatgcaagccaggtgatctggaaagtgcaccagtgttgagaacttctggggaaggcggttgcttttatgagtttgagtggcacacagctgcggcctgtgtgctgtctaagacagaaggggagaactgcacggtctttgactcccaggcagggttttcttttgacttatcacctctcacaaagaaaaatggtgcctataaagttgagacaaagaagtatgacttttatataaatgtgtgtggcccggtgtctgtgagcccctgtcagccagactcaggagcctgccaggtggcaaaaaggcaatgatgagaagacttggaacttgggtctgagtaatgcgaagctttcatattatgatgggatgatccaactgaactacagaggcggcacaccctataacaatgaaagacacacaccgagagctacgctcatcacctttctctgtgatcgagacgcgggagtgggcttccctgaatatcaggaagaggataactccacctacaacttccggtggtacaccagctatgcctgcccggaggagcccctggaatgcgtagtgaccgacccctccacgctggagcagtacgacctctccagtctggcaaaatctgaaggtggccttggaggaaactggtatgccatggacaactcaggggaacatgtcacgtggaggaaatactacattaacgtgtgtcggcctctgaatccagtgccgggctgcaaccgatatgcatcggcttgccagatgaagtatgaaaaagatcagggctccttcactgaagtggtttccatcagtaacttgggaatggcaaagaccggcccggtggttgaggacagcggcagcctccttctggaatacgtgaatgggtcggcctgcaccaccagcgatggcagacagaccacatataccacgaggatccatctcgtctgctccaggggcaggctgaacagccaccccatcttttctctcaactgggagtgtgtggtcagtttcctgtggaacacagaggctgcctgtcccattcagacaacgacggatacagaccaggcttgctctataagggatcccaacagtggatttgtgtttaatcttaatccgctaaacagttcgcaaggatataacgtctctggcattgggaagatttttatgtttaatgtctgcggcacaatgcctgtctgtgggaccatcctgggaaaacctgcttctggctgtgaggcagaaacccaaactgaagagctcaagaattggaagccagcaaggccagtcggaattgagaaaagcctccagctgtccacagagggcttcatcactctgacctacaaagggcctctctctgccaaaggtaccgctgatgcttttatcgtccgctttgtttgcaatgatgatgtttactcagggcccctcaaattcctgcatcaagatatcgactctgggcaagggatccgaaacacttactttgagtttgaaaccgcgttggcctgtgttccttctccagtggactgccaagtcaccgacctggctggaaatgagtacgacctgactggcctaagcacagtcaggaaaccttggacggctgttgacacctctgtcgatgggagaaagaggactttctatttgagcgtttgcaatcctctcccttacattcctggatgccagggcagcgcagtggggtcttgcttagtgtcagaaggcaatagctggaatctgggtgtggtgcagatgagtccccaagccgcggcgaatggatctttgagcatcatgtatgtcaacggtgacaagtgtgggaaccagcgcttctccaccaggatcacgtttgagtgtgctcagatatcgggctcaccagcatttcagcttcaggatggttgtgagtacgtgtttatctggagaactgtggaagcctgtcccgttgtcagagtggaaggggacaactgtgaggtgaaagacccaaggcatggcaacttgtatgacctgaagcccctgggcctcaacgacaccatcgtgagcgctggcgaatacacttattacttccgggtctgtgggaagctttcctcagacgtctgccccacaagtgacaagtccaaggtggtctcctcatgtcaggaaaagcgggaaccgcagggatttcacaaagtggcaggtctcctgactcagaagctaacttatgaaaatggcttgttaaaaatgaacttcacggggggggacacttgccataaggtttatcagcgctccacagccatcttcttctactgtgaccgcggcacccagcggccagtatttctaaaggagacttcagattgttcctacttgtttgagtggcgaacgcagtatgcctgcccacctttcgatctgactgaatgttcattcaaagatggggctggcaactccttcgacctctcgtccctgtcaaggtacagtgacaactgggaagccatcactgggacgggggacccggagcactacctcatcaatgtctgcaagtctctggccccgcaggctggcactgagccgtgccctccagaagcagccgcgtgtctgctgggtggctccaagcccgtgaacctcggcagggtaagggacggacctcagtggagagatggcataattgtcctgaaatacgttgatggcgacttatgtccagatgggattcggaaaaagtcaaccaccatccgattcacctgcagcgagagccaagtgaactccaggcccatgttcatcagcgccgtggaggactgtgagtacacctttgcctggcccacagccacagcctgtcccatgaagagcaacgagcatgatgactgccaggtcaccaacccaagcacaggacacctgtttgatctgagctccttaagtggcagggcgggattcacagctgcttacagcgagaaggggttggtttacatgagcatctgtggggagaatgaaaactgccctcctggcgtgggggcctgctttggacagaccaggattagcgtgggcaaggccaacaagaggctgagatacgtggaccaggtcctgcagctggtgtacaaggatgggtccccttgtccctccaaatccggcctgagctataagagtgtgatcagtttcgtgtgcaggcctgaggccgggccaaccaataggcccatgctcatctccctggacaagcagacatgcactctcttcttctcctggcacacgccgctggcctgcgagcaagcgaccgaatgttccgtgaggaatggaagctctattgttgacttgtctccccttattcatcgcactggtggttatgaggcttatgatgagagtgaggatgatgcctccgataccaaccctgatttctacatcaatatttgtcagccactaaatcccatgcacggagtgccctgtcctgccggagccgctgtgtgcaaagttcctattgatggtccccccatagatatcggccgggtagcaggaccaccaatactcaatccaatagcaaatgagatttacttgaattttgaaagcagtactccttgcttagcggacaagcatttcaactacacctcgctcatcgcgtttcactgtaagagaggtgtgagcatgggaacgcctaagctgttaaggaccagcgagtgcgactttgtgttcgaatgggagactcctgtcgtctgtcctgatgaagtgaggatggatggctgtaccctgacagatgagcagctcctctacagcttcaacttgtccagcctttccacgagcacctttaaggtgactcgcgactcgcgcacctacagcgttggggtgtgcacctttgcagtcgggccagaacaaggaggctgtaaggacggaggagtctgtctgctctcaggcaccaagggggcatcctttggacggctgcaatcaatgaaactggattacaggcaccaggatgaagcggtcgttttaagttacgtgaatggtgatcgttgccctccagaaaccgatgacggcgtcccctgtgtcttccccttcatattcaatgggaagagctacgaggagtgcatcatagagagcagggcgaagctgtggtgtagcacaactgcggactacgacagagaccacgagtggggcttctgcagacactcaaacagctaccggacatccagcatcatatttaagtgtgatgaagatgaggacattgggaggccacaagtcttcagtgaagtgcgtgggtgtgatgtgacatttgagtggaaaacaaaagttgtctgccctccaaagaagttggagtgcaaattcgtccagaaacacaaaacctacgacctgcggctgctctcctctctcaccgggtcctggtccctggtccacaacggagtctcgtactatataaatctgtgccagaaaatatataaagggcccctgggctgctctgaaagggccagcatttgcagaaggaccacaactggtgacgtccaggtcctgggactcgttcacacgcagaagctgggtgtcataggtgacaaagttgttgtcacgtactccaaaggttatccgtgtggtggaaataagaccgcatcctccgtgatagaattgacctgtacaaagacggtgggcagacctgcattcaagaggtttgatatcgacagctgcacttactacttcagctgggactcccgggctgcctgcgccgtgaagcctcaggaggtgcagatggtgaatgggaccatcaccaaccctataaatggcaagagcttcagcctcggagatatttattttaagctgttcagagcctctggggacatgaggaccaatggggacaactacctgtatgagatccaactttcctccatcacaagctccagaaacccggcgtgctctggagccaacatatgccaggtgaagcccaacgatcagcacttcagtcggaaagttggaacctctgacaagaccaagtactaccttcaagacggcgatctcgatgtcgtgtttgcctcttcctctaagtgcggaaaggataagaccaagtctgtttcttccaccatcttcttccactgtgaccctctggtggaggacgggatccccgagttcagtcacgagactgccgactgccagtacctcttctcttggtacacctcagccgtgtgtcctctgggctcctgggaggcaagtactggtgggtgggctttgacagcgagaatcccggggacgacgggcagatgcacaaggggctgtcagaacggagccaggcagtcggcgcggtgctcagcctgctgctggtggcgctcacctgctgcctgctggccctgttgctctacaagaaggagaggagggaaacagtgataagtaagctgaccacttgctgtaggagaagttccaacgtgtcctacaaatactcaaaggtgaataaggaagaagagacagatgagaatgaaacagagtggctgatggaagagatccagctgcctcctccacggcagggaaaggaagggcaggagaacggccatattaccaccaagtcagtgaaagccctcagctccctgcatggggatgaccaggacagtgaggatgaggttctgaccatcccagaggtgaaagttcactcgggcaggggagctggggcagagagctcccacccagtgagaaacgcacagagcaatgcccttcaggagcgtgaggacgatagggtggggctggtcaggggtgagaaggcgaggaaagggaagtccagctctgcacagcagaagacagtgagctccaccaagctggtgtccttccatgacgacagcgacgaggacctcttacacatctgactccgcagtgcctgcaggggagcacggagccgcgggacagccaagcacctccaaccaaataagacttccactcgatgatgcttctataattttgcctttaacagaaactttcaaaagggaagagtttttgtgatgggggagagggtgaaggaggtcaggccccactccttcctgattgtttacagtcattggaataaggcatggctcagatcggccacagggcggtaccttgtgcccagggttttgccccaagtcctcatttaaaagcataaggccggacgcatctcaaaacagagggctgcattcgaagaaacccttgctgctttagtcccgatagggtatttgaccccgatatattttagcattttaattctctccccctatttattgactttgacaattactcaggtttgagaaaaaggaaaaaaaaacagccaccgtttcttcctgccagcaggggtgtgatgtaccagtttgtccatcttgagatggtgaggctgtcagtgtatggggcagcttccggcgggatgttgaactggtcattaatgtgtcccctgagttggagctcattctgtctcttttctcttttgctttctgtttcttaagggcacacacacgtgcgtgcgagcacacacacacatacgtgcacagggtccccgagtgcctaggttttggagagtttgcctgttctatgcctttagtcaggaatggctgcacctttttgcatgatatcttcaagcctgggcgtacagagcacatttgtcagtatttttgccggctggtgaattcaaacaacctgcccaaagattgatttgtgtgtttgtgtgtgtgtgtgtgtgtgtgtgtgtgtgtgtgagtggagttgaggtgtcagagaaaatgaattttttccagatttggggtataggtctcatctcttcaggttctcatgataccacctttactgtgcttatttttttaagaaaaaagtgttgatcaaccattcgacctataagaagccttaatttgcacagtgtgtgacttacagaaactgcatgaaaaatcatgggccagagcctcggccctagcattgcacttggcctcatgctggagggaggctgggcgggtacagcgcggaggaggagggaggccaggcgggcatggcgtggaggaggagggaggccgggcggtcacagcatggaggaggagggaggcgctgctggtgttcttattctggcggcagcgcctttcctgccatgtttagtgaatgacttttctcgcattgtagaattgtatatagactctggtgttctattgctgagaagcaaaccgccctgcagcatccctcagcctgtaccggtttggctggcttgtttgatttcaacatgagtgtattttttaaaattgatttttctcttcatttttttttcaatcaactttactgtaatataaagtattcaacaatttcaataaaagataaattattaa

SEQ ID NO: 43 - DNA, 1713 bp, Human; identical to SEQ ID NO: 41

SEQ ID NO: 44 - DNA, 3818 bp, Human
gttggctctgacacgttttattccttcaagtacgaaatcaaggagggggattgtcctgttcaaagtggcaaaacctggcaggactgtgagtacaaggatgctgcaaaagcagccactggagaatgcacggcaaccgtggggaagaggagcagtacgaaattctccgtggctacccagacctgccagattactccagccgagggccctgtggtgacagcccagtacgactgcctcggctgtgtgcatcctatatcaacgcagagcccagacctggagcccattctgagacacggcattcagtactttaacaacaacactcaacattcctccctcttcacgcttaatgaagtaaaacgggcccaaagacaggtggtggctggattgaactttcgaattacctactcaattgtgcaaacgaattgttccaaagagaattttctgttcttaactccagactgcaagtccctttggaatggtgataccggtgaatgtacagataatgcatacatcgatattcagctacgaattgcttccttctcacagaactgtgacatttatccagggaaggattttgtacaaccacctaccaagatttgcgtgggctgccccagagatatacccaccaacagcccagagctggaggagacactgactcacaccatcacaaagcttaatgcagagaataacgcaactttctatttcaagattgacaatgtgaaaaaagcaagagtacaggtggtggctggcaagaaatattttattgacttcgtggccagggaaaccacatgttccaaggaaagtaatgaagagttgaccgaaagctgtgagaccaaaaaacttggccaaagcctagattgcaacgctgaagtttatgtggtaccctgggagaaaaaaatttaccctactgtcaactgtcaaccactgggaatgatctcactgatgaaaaggcctccaggtttttcacctttccgatcatcacgaataggggaaataaaagaagaaacaactgtaagtccaccccacacttccatggcacctgcacaagatgaagagcgggattcaggaaaagaacaagggcatactcgtagacatgactggggccatgaaaaacaaagaaaacataatcttggccatggccataaacatgaacgtgaccaagggcatgggcaccaaagaggacatggccttggccatggacacgaacaacagcatggtcttggtcatggacataagttcaaacttgatgatgatcttgaacaccaagggggccatgtccttgaccatggacataagcataagcatggtcatggccacggaaaacataaaaataaaggcaaaaagaatggaaagcacaatggttggaaaacagagcatttggcaagctcttctgaagacagtactacaccttctgcacagacacaagagaagacagaagggccaacacccatcccttccctagccaagccaggtgtaacagttaccttttctgactttcaggactctgatctcattgcaactatgatgcctcctatatcaccagctcccacacagagtgatgacgattggatccctgatatccagatagacccaaatggcctttcatttaacccaatatcagattttccagacacgacctccccaaaatgtcctggacgcccctggaagtcagttagtgaaattaatccaaccacacaaatgaaagaatcttattatttcgatctcactgatggcctttcttaatttaagtggctatgggtatttctttcatactttattaaagtatcaatatccctctctccattgtccagatgaaaatatcctgatataatgcaccaaaaaccatgcagcttcggaacagtctaaagagaagtggtgagactcccagtggagacaccatcagtctccacggactgcataaaattgtgtgccacaattctaactcttttctgaatcttcttcccaagttttctaaactagcacagtaaacagacaaactaatgtgccgtatggcctgctgcaattggcttctctgataacaaatatgtaccttacaacatatgtcatgaatttgcatacaaagattcttgtcattcttaataaactgtggcacttggtatttgaatgtgtgtgaaaataagggaagtcaagagattaaatgctgaacttattaatggaatagaaataataaggaggctgaggctggagaattgcttgaacccgggaggcggaggttgcagtgagccgagatcgtgccactgcgctccagcctgggcatcagagcaagattctgtctcagaaaaaaagaaaaaaaaagaaataataagaaaaacttccagatttcaaagtaacaagaaagaagacaggttggccaaagggaggaaaggggggacataaattaattgactttctattcccaaaatgggctagttatatcaaataaatactcccactgccctttctgagtgagagtgtttctcataagtcaaaaatttctgtttactcattaactactctttgcaacaggctttcatatagaagtattctgtttatttttgctgagcctagattgagtaattcttagtttacagaagctccgagcttaatgataaggatgaaaagcagagggagcaatatagaagcaggcttgctaataaaactttttaaataattgacaagggaatattatggaatgtgatgcaaagtttgttccgaaattttatgaggaaattactctctagtctcactttatagtctttttgctatgactttgaagaccattgatttttgagaagcagaataataggattgcctttcattgccctatagtgcaaagaaggtatatgctttataaccaatgttgtacttttgcctagaaaaacaagatatggctttaaatagctacaatcatctttggatgtatatgtcactgctgcttcaagttattggatgcatttgaacctctgagtttgtctttcattttaaatattgtctgttcttttaaataaacaaccacagatgtcaggaaaaagtcttaccttgtcaactggttgctccactttttaaaaatgattgaatgataacatcatattaactgcgttttactatacttacagagtcacctaaggtcctgcgagtacaagggtcgacccccaaaggcaggggcagagccagcatctgagagggaggtctcttgaccaatgggcagaatcttcactccaggcacatagccccaaccacctctgccagcaaccttgagaggaaggacaagaagaaagatgggatagaatttaaatagagaagaatgccattttatcactctgcctctgggtgaaataaagatcagtcttgatgttctaactctaattcacagtggtctcctttcagccctacccattctgcagcaaattccagctggtcagagagtcagtgctgtggctctgccatggaggctcataacccaacactggaacattccctagccaaggcagaagtccttaggcgggacttccttaccaccacgggtgctaaaagaagagttagtaggtcatgcttctaccagtaatctaaggactctctccttctcttcttcctctttctccagatttccaagccttagctaagagtaatttggcttgtttagtattgttttcttatggtccagttaattaccaaaaatatttttaaaatcatctctgttaatagaatgtctaccaacttctcactatcagaaaatactcaacctccaaacaatttgaaattatctttctgatccaggtaaagaagcaaattgaaaatcaataaagtaaaaagtgacggag

SEQ ID NO: 45 - DNA, 3833 bp, Human
ttcttcgtgctgcgcggacccggcgcgggcggcgacgaggcgacggcgggcggggggtcggcgccgcaaccgccgcggctcgagtactacgagagcgagaaaaagtggcggagcaaggcaggcgcgccgaaacgggtgatcgctctcgactgctgcctgaacatcaacaagcgcgccgacgccaagcacaagtacctgatcgccctctacaccaaggacgagtacttcgccgtggccgccgagaacgagcaggagcaggagggctggtaccgcgcgctcaccgacctggtcagcgagggccgcgcggccgccggagacgcgccccccgccgccgcgcccgccgcgtcctgcagcgcctccctgcccggcgccctgggcggctctgccggcgccgccggggccgaggacagctacgggctggtggctcccgccacggccgcctaccgtgaggtgtggcaggtgaacctgaagcccaagggtctgggccagagcaagaacctgacgggggtgtaccgtctgtgcctgtctgcgcgcaccatcggcttcgtgaagctcaactgcgagcagccgtcggtgacgctgcagctcatgaacatccgccgctgcggccactcggacagcttcttcttcatcgaggtgggccgctcggccgtcacaggccccggcgagctgtggatgcaggcggacgactcggtggtggcgcagaacatccacgagaccatcctggaggccatgaaggcgctcaaggagctcttcgagttccggccgcgcagtaagagccaatcgtcggggtcgtcggccacgcaccccatcagcgtccccggcgcgcgccgccaccaccacctggtcaacctgccccccagccagacgggcctggtgcgccgctcgcgcaccgacagcctggccgccaccccgccggcggccaagtgcagctcgtgccgggtgcgcaccgccagcgagggcgacggcggcgcggcggcgggagcggcggccgcgggcgccaggccggtgtcggtggctgggagccccctgagccccgggccggtgcgcgcgcccctgagccgctcgcacaccctgagcggcggctgcggcggccgcgggagcaaggtggcgctgctgccggcagggggcgcgctgcaacacagccgctccatgtccatgcccgtggcgcactcgccgcccgccgccaccagccccggctccctgtcgtccagcagcggccacggctcgggctcctacccgccgccgcccggcccgcacccgcctctgccgcatccgctgcaccacggccccggccagcggccctccagcggcagcgcctccgcctcgggctcccccagcgaccccggcttcatgtccctggacgagtacggctccagcccaggcgacctgcgcgccttctgcagccaccgaagcaacacgcccgagtccatcgcggagacgcccccggcccgagacggcggcggcggcggtgagttctacgggtacatgaccatggacaggcccctgagccactgtggccgctcctaccgccgggtctcgggggacgcggcccaggacctggaccgagggctgcgcaagaggacctactccctgaccacgccagcccggcagcggccggtgccccagccctcctctgcctcgctggatgaatacaccctgatgcgggccaccttctcgggcagcgcgggccgcctctgcccgtcctgccccgcgtcctctcccaaggtggcctaccacccctacccagaggactacggagacatcgagatcggctcccacaggagctccagcagcaacctgggggcagacgacggctacatgcccatgacgcccggcgcggccctcgcgggcagtgggagcggcagctgcaggagcgacgactacatgcccatgagccccgccagcgtgtccgcccccaagcagatcttgcagcccagggccgccgccgccgccgccgccgccgtgccttctgcggggcctgcggggccagcacccacctctgcggcgggcaggacattcccggcgagcgggggcggctacaaggccagctcgcccgccgagagctcccccgaggacagtgggtacatgcgcatgtggtgcggttccaagctgtccatggagcatgcagatggcaagctgctgcccaacggggactacctcaacgtgtcccccagcgacgcggtcaccacgggcaccccgcccgacttcttctccgcagccctgcaccccggcggggagccgctcaggggcgttcccggctgctgctacagctccttgccccgctcctacaaggccccctacacctgtggcggggacagcgaccagtacgtgctcatgagctcccccgtggggcgcatcctggaggaggagcgtctggagcctcaggccacgccagggcccagccaggcggccagcgccttcggggccggccccacgcagccccctcaccctgtagtgccttcgcccgtgcggcctagcggcggccgcccggagggcttcttgggccagcgcggccgggcggtgaggcccacgcgcctgtccctggaggggctgcccagcctgcccagcatgcacgagtacccactgccaccggagcccaagagccccggcgagtacatcaacatcgactttggcgagcccggggcccgcctgtcgccgcccgcgcctcccctgctggcgtcggcggcctcgtcctcctcgctcttgtccgccagcagcccggcctcgtcgctgggctcaggcaccccgggcaccagcagcgacagccggcagcggtctccgctctccgactacatgaacctcgacttcagctcccccaagtctcctaagccgggcgccccgagcggccaccccgtgggctccttggacggcctcctgtcccccgaggcctcctccccgtatccgccgttgcccccgcgtccgtccgcgtccccgtcgtcgtctctgcagccgccgccaccgccgccggccccgggggagctgtaccgcctgccccccgcctcggccgttgccaccgcccagggcccgggcgccgcctcatcgttgtcctcggacaccggggacaatggtgactacaccgagatggcttttggtgtggccgccaccccgccgcaacctatcgcggcccccccgaagccagaagctgcccgcgtggccagcccgacgtcgggcgtgaagaggctgagcctcatggagcaggtgtcgggagtcgaggccttcctgcaggccagccagcccccggacccccaccgcggcgccaaggtcatccgcgcagacccgcaggggggccgccgccgccacagttccgagaccttctcctccaccacgacggtcacccccgtgtccccgtccttcgcccacaaccccaagcgccacaactcggcctccgtggaaaatgtctctctcaggaaaagcagcgagggcggcgtgggtgtcggccctggagggggcgacgagccgcccacctccccacgacagttgcagccggcgccccctttggcaccgcagggccggccgtggaccccgggtcagcccgggggcttggtcggttgtcctgggagcggtggatcgcccatgcgcagagagacctctgccggcttccagaatggtctcaactacatcgccatcgacgtgagggaggagcccgggctgccaccccagccgcagccgccgccgccgccgcttcctcagccgggagacaagagctcctggggccggacccgaagcctcgggggtctcatcagcgctgtgggcgtcggcagcaccggcggcgggtgcggggggccgggtcccggtgccctgccccctgccaacacctacgccagcattga

SEQ ID NO: 46 - DNA, 1515 bp, Human
gcccgggatcagtctccgcacgcggttccgcaggtggcagcgatggcccagtcctgaactccccgccatggccggcgcccccggcccgctgcgccttgcgctgctgctgctcgggatggtgggcagggccggcccccgcccccagggtgccactgtgtccctctgggagacggtgcagaaatggcgagaataccgacgccagtgccagcgctccctgactgaggatccacctcctgccacagacttgttctgcaaccggaccttcgatgaatacgcctgctggccagatggggagccaggctcgttcgtgaatgtcagctgcccctggtacctgccctgggccagcagtgtgccgcagggccacgtgtaccggttctgcacagctgaaggcctctggctgcagaaggacaactccagcctgccctggagggacttgtcggagtgcgaggagtccaagcgaggggagagaagctccccggaggagcagctcctgttcctctacatcatctacacggtgggctacgcactctccttctctgctctggttatcgcctctgcgatcctcctcagcttcagacacctgcactgcaccaggaactacatccacctgaacctgtttgcatccttcatcctgcgagcattgtccgtcttcatcaaggacgcagccctgaagtggatgtatagcacagccgcccagcagcaccagtgggatgggctcctctcctaccaggactctctgagctgccgcctggtgtttctgctcatgcagtactgtgtggcggccaattactactggctcttggtggagggcgtgtacctgtacacactgctggccttctcggtcttctctgagcaatggatcttcaggctctacgtgagcataggctggggtgttcccctgctgtttgttgtcccctggggcattgtcaagtacctctatgaggacgagggctgctggaccaggaactccaacatgaactactggctcattatccggctgcccattctctttgccattggggtgaacttcctcatctttgttcgggtcatctgcatcgtggtatccaaactgaaggccaatctcatgtgcaagacagacatcaaatgcagacttgccaagtccacgctgacactcatccccctgctggggactcatgaggtcatctttgcctttgtgatggacgagcacgcccgggggaccctgcgcttcatcaagctgtttacagagctctccttcacctccttccaggggctgatggtggccatcttatactgctttgtcaacaatgaggtccagctggaatttcggaagagctgggagcgctggcggcttgagcacttgcacatccagagggacagcagcatgaagcccctcaagtgtcccaccagcagcctgagcagtggagccacggcgggcagcagcatgtacacagccacttgccaggcctcctgcagctgagactccagcgcctgccctccctggggtccttgctgcaggccgggtggccaatccag

SEQ ID NO: 47 - DNA, 3403 bp, Human
tttcaggcccaagaagcccatcctgggaaggaaaatgcattggggaaccctgtgcggattcttgtggctttggccctatcttttctatgtccaagctgtgcccatccaaaaagtccaagatgacaccaaaaccctcatcaagacaattgtcaccaggatcaatgacatttcacacacgcagtcagtctcctccaaacagaaagtcaccggtttggacttcattcctgggctccaccccatcctgaccttatccaagatggaccagacactggcagtctaccaacagatcctcaccagtatgccttccagaaacgtgatccaaatatccaacgacctggagaacctccgggatcttcttcacgtgctggccttctctaagagctgccacttgccctgggccagtggcctggagaccttggacagcctggggggtgtcctggaagcttcaggctactccacagaggtggtggccctgagcaggctgcaggggtctctgcaggacatgctgtggcagctggacctcagccctgggtgctgaggccttgaaggtcactcttcctgcaaggactacgttaagggaaggaactctggcttccaggtatctccaggattgaagagcattgcatggacaccccttatccaggactctgtcaatttccctgactcctctaagccactcttccaaaggcataagaccctaagcctccttttgcttgaaaccaaagatatatacacaggatcctattctcaccaggaagggggtccacccagcaaagagtgggctgcatctgggattcccaccaaggtcttcagccatcaacaagagttgtcttgtcccctcttgacccatctccccctcactgaatgcctcaatgtgaccaggggtgatttcagagagggcagaggggtaggcagagcctttggatgaccagaacaaggttccctctgagaattccaaggagttccatgaagaccacatccacacacgcaggaactcccagcaacacaagctggaagcacatgtttatttattctgcattttattctggatggatttgaagcaaagcaccagcttctccaggctctttggggtcagccagggccaggggtctccctggagtgcagtttccaatcccatagatgggtctggctgagctgaacccattttgagtgactcgagggttgggttcatctgagcaagagctggcaaaggtggctctccagttagttctctcgtaactggtttcatttctactgtgactgatgttacatcacagtgtttgcaatggtgttgccctgagtggatctccaaggaccaggttattttaaaaagatttgttttgtcaagtgtcatatgtaggtgtctgcacccaggggtggggaatgtttgggcagaagggagaaggatctagaatgtgttttctgaataacatttgtgtggtgggttctttggaaggagtgagatcattttcttatcttctgcaattgcttaggatgtttttcatgaaaatagctctttcaggggggttgtgaggcctggccaggcaccccctggagagaagtttctggccctggctgaccccaaagagcctggagaagctgatgctttgcttcaaatccatccagaataaaacgcaaagggctgaaagccatttgttggggcagtggtaagctctggctttctccgactgctagggagtggtctttcctatcatggagtgacggtcccacactggtgactgcgatcttcagagcaggggtccttggtgtgaccctctgaatggtccagggttgatcacactctgggtttattacatggcagtgttcctatttggggcttgcatgccaaattgtagttcttgtctgattggctcacccaagcaaggccaaaattaccaaaaatcttggggggtttttactccagtggtgaagaaaactcctttagcaggtggtcctgagacctgacaagcactgctaggcgagtgccaggactccccaggccaggccaccaggatggcccttcccactggaggtcacattcaggaagatgaaagaggaggtttggggtctgccaccatcctgctgctgtgtttttgctatcacacagtgggtggtggatctgtccaaggaaacttgaatcaaagcagttaactttaagactgagcacctgcttcatgctcagccctgactggtgctataggctggagaagctcacccaataaacattaagattgaggcctgccctcagggatcttgcgttcccagtggtcaaaccgcactcacccatgtgccaaggtggggtatttaccacagcagctgaacagccaaatgcatggtgcagttgacagcaggtgggaaatggtatgagctgaggggggccgtgcccaggggcccacagggaaccctgcttgcactttgtaacatgtttacttttcagggcatcttagcttctattatagccacatccctttgaaacaagataactgagaatttaaaaataagaaaatacataagaccataacagccaacaggtggcaggaccaggactatagcccaggtcctctgatacccagagcattacgtgagccaggtaatgagggactggaaccagggagaccgagcgctttctggaaaagaggagtttcgaggtagagtttgaaggaggtgagggatgtgaattgcctgcagagagaagcctgttttgttggaaggtttggtgtgtggagatgcagaggtaaaagtgtgagcagtgagttacagcgagaggcagagaaagaagagacaggagggcaagggccatgctgaagggaccttgaagggtaaagaagtttgatattaaaggagttaagagtagcaagttctagagaagaggctggtgctgtggccagggtgagagctgctctggaaaatgtgacccagatcctcacaaccacctaatcaggctgaggtgtcttaagccttttgctcacaaaacctggcacaatggctaattcccagagtgtgaaacttcctaagtataaatggttgtctgtttttgtaacttaaaaaaaaaaaaaaaagtttggccgggtgcggtggctcacgcctgtaatcccagcactttgggaggccaaggtggggggatcacaaggtcactagatggcgagcatcctggccaacatggtgaaaccccgtctctactaaaaacacaaaagttagctgagcgtggtggcgggcgcctgtagtcccagccactcgggaggctgagacaggagaatcgcttaaacctgggaggcggagagtacagtgagccaagatcgcgccactgcactccggcctgatgacagagcgagattccgtcttaaaaaaaaaaaaaaaaaagtttgtttttaaaaaaatctaaataaaataactttgccccctg

SEQ ID NO: 48 - DNA, 1276 bp, Human
aagctgcttccctggagacgggcggggaggccaaacttcctgctgaagctctgtggcctcttttggggtgggggcgggggtccaggcagaaagaaaccgtctgctgctcaagacccacaggacgccgggaagactaaatgatcactgcccccagtgaatatggtgaagaagctggtgatggcccagaagcggggagagacacgagccctttgcctgggtgtaaccatggtggtgtgtgccgtcatcacctactacatcctggtcacgactgtgctgcccctctaccagaaaagcgtgtggacccaggaatccaagtgccacctgattgagaccaacatcagggaccaggaggagctgaagggcaagaaggtgccccagtacccatgcctgtgggtcaacgtgtcagctgccggcaggtgggctgtgctgtaccacacggaggacactcgggaccagaaccagcagtgctcctacatcccaggcagcgtggacaattaccagacggcccgggccgacgtggagaaggtcagagccaaattccaagagcagcaggtcttctactgcttctccgcacctcgggggaacgaaaccagcgtcctattccagcgcctctacgggccccaggccctcctcttctccctcttctggcccaccttcctgctgaccggtggcctcctcattatcgccatggtgaagagcaaccagtacctgtccatcctggcggcccagaagtagagccatccatccatgccataccacttgtcagggcacaggggactggctgggcccccagggctgctccccacttgcagcacaatgccttctccacctgccctcccactcttccagtccaatccacgctgtcttctgttgcaggactaacctttgagaaatccttttgtgaagtcattgcctgctcaagaatgtacagtggctccccaatgccttggaggccataaggccagccagttctagctctctattacctgtccccactcaactgactcatacctgtttccggctgcatcactatgtgccccacagagaacgatgatcgtcacctctgtgcctgagttctccctgttgtctcaaagcggtacccatcctcccccagaagctgtccccagcgagcctcccttctttgtttgaattctctaataagagcaacagcagctcccatttctagaacacatttacagtattactattttctaggatataaagtgccatatatatttttaattccaatattaataaatgtatgccaaacaacaat

SEQ ID NO: 49 - DNA, 5314 bp, Human
cttaggcctaactccacccaccactcctcctcataaagccaaccaagataacccttttagggcttctccaaagctgaagtcctcttgcaagactgtggtgccaccaccatcaaagaagcccaggtacagtgagtcttctggtacacaaggcaataactccaccaagaaagggccggagcaatccgagttgtatgcacaactcagcaagtcctcagtcctcactggtggacacgaggaaaggaagaccaagcggcccagtctgcggctgtttggtgaccatgactattgccagtcaattaattccaaaacggaaatactcattaatatatcacaggagctccaagactctagacaactagaaaataaagatgtctcctctgattggcaggggcagatttgttcttccacagattcagaccagtgctacctgagagagactttggaggcaagcaagcaggtctctccttgcagcacaagaaaacagctccaagaccaggaaatccgagccgagctgaacaagcacttcggtcatcccagtcaagctgtttttgacgacgaagcagacaagaccggtgaactgagggacagtgatttcagtaatgaacaattctccaaactacctatgtttataaattcaggactagccatggatggcctgtttgatgacagcgaagatgaaagtgataaactgagctacccttgggatggcacacaatcctattcattgttcaatgtgtctccttcttgttcttcttttaactctccatgtagagattctgtgtcaccacccaaatccttattttctcaaagaccccaaaggatgcgctctcgttcaaggtccttttctcgacacaggtcgtgttcccgatcaccatattccaggtcaagatcaaggtctccaggcagtagatcctcttcaagatcctgctattactatgagtcaagccactacagacaccgcacgcaccgaaattctcccttgtatgtgagatcacgttcaagatcgccctacagccgtcggcccaggtatgacagctacgaggaatatcagcacgagaggctgaagagggaagaatatcgcagagagtatgagaagcgagagtctgagagggccaagcaaagggagaggcagaggcagaaggcaattgaagagcgccgtgtgatttatgtcggtaaaatcagacctgacacaacacggacagaactgagggaccgttttgaagtttttggtgaaattgaggagtgcacagtaaatctgcgggatgatggagacagctatggtttcattacctaccgttatacctgtgatgcttttgctgctcttgaaaatggatacactttgcgcaggtcaaacgaaactgactttgagctgtacttttgtggacgcaagcaatttttcaagtctaactatgcagacctagattcaaactcagatgactttgaccctgcttccaccaagagcaagtatgactctctggattttgatagtttactgaaagaagctcagagaagcttgcgcaggtaacatgttccctagctgaggatgacagagggatggcgaatacctcatgggacagcgcgtccttccctaaagactattgcaagtcatacttaggaatttctcctactttacactctctgtacaaaaacaaaacaaaacaacaacaatacaacaagaacaacaacaacaataacaacaatggtttacatgaacacagctgctgaagaggcaagagacagaatgatatccagtaagcacatgtttattcatgggtgtcagctttgcttttcctggagtctcttggtgatggagtgtgcgtgtgtgcatgtatgtgtgtgtgtatgtatgtgtgtggtgtgtgtgcttggtttaggggaagtatgtgtgggtacatgtgaggactgggggcacctgaccagaatgcgcaagggcaaaccatttcaaatggcagcagttccatgaagacacgcttaaaacctagaacttcaaaatgttcgtattctattcaaaaggaaaaatatatatatatatatatatatatataaattaaaaaggaaagaaaactaacaaccaaccaaccaaccaaccaaccacaaaccaccctaaaatgacagccgctgatgtctgggcatcagcctttgtactctgtttttttaagaaagtgcagaatcaacttgaagcaagctttctctcataacgtaatgattatatgacaatcctgaagaaaccacaggttccatagaactaatatcctgtctctctctctctctctctctctctcttttttttttctttttccttttgccatggaatctgggtgggagaggatactgcgggcaccagaatgctaaagtttcctaacattttgaagtttctgtagttcatccttaatcctgacacccatgtaaatgtccaaaatgttgatcttccactgcaaatttcaaaagccttgtcaatggtcaagcgtgcagcttgttcagcggttctttctgaggagcggacaccgggttacattactaatgagagttgggtagaactctctgagatgtgttcagatagtgtaattgctacattctctgatgtagttaagtatttacagatgttaaatggagtatttttattttatgtatatactatacaacaatgttcttttttgttacagctatgcactgtaaatgcagccttcttttcaaaactgctaaatttttcttaatcaagaatattcaaatgtaattatgaggtgaaacaattattgtacactaacatatttagaagctgaacttactgcttatatatatttgattgtaaaaacaaaaagacagtgtgtgtgtctgttgagtgcaacaagagcaaaatgatgctttccgcacatccatcccttaggtgagcttcaatctaagcatcttgtcaagaaatatcctagtcccctaaaggtattaaccacttctgcgatatttttccacattttcttgtcgcttgtttttctttgaagttttatacactggatttgttaggggaatgaaattttctcatctaaaatttttctagaagatatcatgattttatgtaaagtctctcaatgggtaaccattaagaaatgtttttattttctctatcaacagtagttttgaaactagaagtcaaaaatctttttaaaatgctgttttgttttaatttttgtgattttaatttgatacaaaatgctgaggtaataattatagtatgatttttacaataattaatgtgtgtctgaagactatctttgaagccagtatttctttcccttggcagagtatgacgatggtatttatctgtattttttacagttatgcatcctgtataaatactgatatttcattcctttgtttactaaagagacatatttatcagttgcagatagcctatttattataaattatgagatgatgaaaataataaagccagtggaaattttctacctaggatgcatgacaattgtcaggttggagtgtaagtgcttcatttgggaaattcagcttttgcagaagcagtgtttctacttgcactagcatggcctctgacgtgaccatggtgttgttcttgatgacattgcttctgctaaatttaataaaaacttcagaaaaacctccattttgatcatcaggatttcatctgagtgtggagtccctggaatggaattcagtaacatttggagtgtgtattcaagtttctaaattgagattcgattactgtttggctgacatgacttttctggaagacatgatacacctactactcaattgttcttttcctttctctcgcccaacacgatcttgtaagatggatttcacccccaggccaatgcagctaattttgatagctgcattcatttatcaccagcatattgtgttctgagtgaatccactgtttgtcctgtcggatgcttgcttgattttttggcttcttatttctaagtagatagaaagcaataaaaatactatgaaatgaaagaacttgttcacaggttctgcgttacaacagtaacacatctttaatccgcctaattcttgttgttctgtaggttaaatgcaggtattttaactgtgtgaacgccaaactaaagtttacagtctttctttctgaattttgagtatcttctgttgtagaataataataaaaagactattaagagcaataaattatttttaagaaatcgagatttagtaaatcctattatgtgttcaaggaccacatgtgttctctattttgcctttaaatttttgtgaaccaattttaaatacattctcctttttgccctggattgttgacatgagtggaatacttggtttcttttcttacttatcaaaagacagcactacagatatcatattgaggattaatttatcccccctacccccagcctgacaaatattgttaccatgaagatagttttcctcaatggacttcaaattgcatctagaattagtggagcttttgtatcttctgcagacactgtgggtagcccatcaaaatgtaagctgtgctcctctcatttttatttttatttttttgggagagaatatttcaaatgaacacgtgcaccccatcatcactggaggcaaatttcagcatagatctgtaggatttttagaagaccgtgggccattgccttcatgccgtggtaagtaccacatctacaattttggtaaccgaactggtgctttagtgatgtggatttttttcttttttaaaagagatgtagcagaataattcttccagtgcaacaaaatcaattttttgctaaacgactccgagaacaacagttgggctgtcaacattcaaagcagcagagagggaactttgcactattggggtatgatgtttgggtcagttgataaaaggaaaccttttcatgcctttagatgtgagcttccagtaggtaatgattatgtgtcctttcttgatggctgtaatgagaacttcaatcactgtagtctaagacctgatctatagatgacctagaatagccatgtactataatgtgatgattctaaatttgtacctatgtgacagacattttcaataatgtgaactgctgatttgatggagctactttaagatttgtaggtgaaagtgtaatactgttggttgaactatgctgaagagggaaagtgagcgattagttgagcccttgccgggccttttttccacctgccaattctacatgtattgttgtggttttattcattgtatgaaaattcctgtgattttttttaaatgtgcagtacacatcagcctcactgagctaataaagggaaacgaatgtttcaaatc

SEQ ID NO: 50 - DNA, 1450 bp, Human
atgctgcccccttggaccctcggccttctcctgctggccacagtcagaggaaaagaggtctgctacggacaacttggctgcttttctgatgaaaaaccatgggcaggaacccttcagcgacctgtaaaattacttccctggtcccccgaggacattgacacccgctttcttctgtacacaaatgaaaatccaaacaacttccaactaatcactggcacggaaccagacaccattgaggcttcaaacttccaactggaccgcaagacacgcttcatcatccatggcttcttagacaaggcggaggacagctggccatcggacatgtgcaagaaaatgtttgaagtggagaaggtgaactgcatctgtgtggactggaggcacgggtcccgggcaatgtacacccaagccgtgcaaaacattcgggttgttggggcggagacagctttcttaatacaagcactgtcgacgcagctggggtacagccttgaggacgtgcatgtcatcggccacagcctgggcgcgcacacggccgcggaggcgggcaggaggctggggggccgcgtgggcaggatcacagggctggatccagcagggccgtgcttccaggatgaacctgaggaggttcggttggatccatctgacgccgtgtttgtggatgtgattcacacagattcttctcccatagttccttccctaggtttcggaatgagccaaaaggtgggccatctggatttctttccaaatggaggaaaggaaatgcccggatgtaagaaaaatgtcctttcaaccattactgatattgatggaatatgggaaggaattggtggctttgtgtcttgcaatcacctaagaagcttcgagtattactcaagcagcgtcctcaaccctgatggcttcctgggctatccctgtgcctcctacgatgagtttcaggagagtaagtgtttcccttgtccagctgaaggatgccccaaaatggggcactatgctgaccaatttaaggggaaaacaagtgctgtggaacaaacctttttcctgaacacaggagagagtggtaactttactagttggagatataaggtatcagtcacactttctggaaaagagaaagtgaatgggtacatcaggattgctttgtatggaagtaatgaaaactcgaaacaatatgagattttcaaaggatccctcaaaccagatgcaagtcacacgtgtgctattgatgtggattttaatgttggaaaaatacagaaagttaaattcctctggaacaaacgtgggataaatctatctgagcccaaactgggggcttcccaaatcacagtgcaaagtggtgaagatgggactgagtataatttttgtagcagcgacactgtggaagaaaacgtcttgcaatctctttacccttgttaaaaacgtggtgcggctattgcggtaataaaatctttaatgc

SEQ ID NO: 51 - DNA, 1483 bp, Human
catctggaacattagacaggatgctgatcttctggacaatcacacttttcctgctgggagcagccaaaggaaaagaagtttgctatgaggacctcgggtgcttttctgacactgagccctggggcgggacagcaatcaggcccctgaaaattctcccctggagccctgagaagatcggcacccgcttcctgctgtacaccaatgaaaacccaaacaactttcaaattctcctcctctctgatccatcaacaattgaggcatcaaattttcaaatggacagaaagacccggttcatcatccatggcttcatagacaaaggagatgagagctgggtgacagacatgtgcaagaaactgttcgaggtggaggaggtgaactgcatctgcgtggactggaagaagggctcccaagccacctacacacaggctgccaacaacgtgcgagtggtgggcgcccaggtggcccagatgctcgacatcctcttgacagagtatagctaccccccttccaaagttcacctcattggccacagcctgggagcccacgtggctggagaggcaggaagcaagactccaggcctgagcaggattacagggttggatcctgtagaagcaagtttcgagagtactcctgaagaggtgcgacttgatccctctgatgctgactttgttgatgtgattcacacggatgcagctcccctgatcccattcttgggttttggaacgaaccaacagatgggtcatcttgacttcttccccaatggaggagagagcatgccgggatgcaagaagaatgccctgtctcagatcgtggatctagatggcatctgggcgggaacccgggactttgtggcttgcaatcacctaagaagctacaagtattacttggaaagcatcctcaatcccgatgggtttgctgcatatccctgcacttcctacaagtcctttgagtctgacaagtgcttcccgtgtccagatcaaggatgcccacagatgggtcactatgctgataaatttgctggcaggacaagtgaagagcagcagaaattcttcttgaacacaggagaggctagcaatttcgctcgctggagatatggggtttccatcacactgtctggaagaacagccactggtcagatcaaagttgctttgtttggaaataagggaaacactcaccagtacagcatcttcagggggattctcaaaccaggctcaacccattcctatgagtttgatgcaaagctggatgttggaacaattgagaaagtcaagtttctttggaataacaatgtgataaatccaaccctccccaaagtgggtgccaccaagatcactgtgcaaaagggagaagagaagacagtgtacaacttctgtagcgaagacacagtgcgggaagacacgctgctcaccctcacgccctgctaagctcccggggcgacgaggctgctgcgttcacactaataaaatccactggtgcatctgta

SEQ ID NO: 52 - DNA, 2382 bp, Human
ctggtgctgtggcccgggccctggcagccctcccgggaggcgagccggggaggcggtggcccctgccggttgcggcggggcgcgggaagaggcgggactctttgacgcggcggaggggtcgggcgacggccgacgcgccgccatctttggtccagtgcggtggcggcggcggcggtggcggcggcgactgctgcggtgaaggaggaggaggagccgagcgggcgctggcaccgaggcctgaccatggacgaggaatacgatgtgatcgtgctggggaccggtctcaccgaatgcatcctgtcgggcatcatgtctgtgaacgggaagaaggtgctgcacatggaccggaacccctactacgggggcgagagctcctccatcacacccctggaggagctgtataagcgttttcagttgctggaggggccccctgagtcgatgggccgaggccgagactggaatgttgacctgattcccaaattcctcatggctaacgggcagctggtaaagatgctactgtatacagaggtgactcgctacctggacttcaaggtggtggagggcagctttgtctacaaggggggcaagatctacaaagtgccgtccactgagactgaggccttggcttccaatctgatgggcatgtttgagaaacggcgcttccgcaagttcctggtgtttgtggcaaacttcgatgagaatgaccccaagacctttgagggcgttgacccccagactaccagcatgcgtgacgtctaccggaagtttgatctgggccaggatgtcatcgatttcactggccatgccctggcgctctaccgcactgatgactacctggaccagccctgccttgagaccgtcaaccgcatcaagttgtacagtgagtccctggcccggtatggcaagagcccatatttatacccgctctacggcttgggcgagctgccccagggttttgcaagattgagtgccatctatggggggacatatatgctgaacaaacctgtggatgacatcatcatggagaacggcaaggtggtgggcgtgaagtctgagggagaggtggcccgctgcaagcagctgatctgtgaccccagctacatcccggaccgtgtgcggaaggctggccaggttatccgcatcatctgtatccttagccaccccatcaagaacaccaacgacgccaactcctgccaaataatcatcccccagaaccaggtcaacaggaagtcagacatctacgtgtgcatgatctcctatgcacacaacgtggcggcccagggcaagtacatagctattgccagcactactgtggagaccacggaccctgaaaaggaggtggagccggctctggagctgttggagcccattgaccagaagtttgtggctatcagtgacttgtatgagcccattgatgatggttgtgagagccaggtgttctgttcctgctcctacgatgccaccacacactttgagacaacctgcaacgacatcaaagacatctacaaacgcatggctggcacggcctttgactttgagaacatgaagcgcaaacagaacgacgtctttggagaagctgagcagtgattgtggccgcccccagcccctgctgccccagcctgtgtctgttctcctcgagggctccagcatcctctgcttcccccaccacgttcccatcacccacctcattgatccactgaccaaatccttaaccctagcgatggcttgggagatggggggttggatagcatcctctttcttggcccttccttatcctaggaaaagagggttcctctccttgtgtgtgtctcttccccccacccctaattcttctgctctgtttgggaagacgtggaggaaaaggtgacttctgcccccaccgctcttacccccactgtagtggcctttggagatgcccccacctcccccccaccaactctcgcgtgttggagagaaggggccctcccagcacaaagttgcattcctcccccctaatttattctaatttattaactttgacccaccctttctgagcctgcagccttcccgtgtggcctgagggctgtcgagtgagctgccccagcccctcccagcccttgcccagcctgggggagtggggaaggcttgggcatggccccgttggaggttgatttgctgttttgtttcttgtctttgtgttctgtggtacttgctgagagaaaagaaaagtgagccaagcagaaggaggtgggaaaacggacccaaaccccagtgtgccctgccccatgcctttcctttagtggtgggaaacccttatcttgcaaagtgaatgtgtccccttccccaccctctagtgtatttcacagaaaacaaaacctcccaataaaacggttgaaacctgaa

SEQ ID NO: 53 - DNA, 2128 bp, Human
gtgggtcccatcgggcccgccctcgcacgtcactccgggacccccgcggcctccgcaggttctgcgctccaggccggagtcagagactccaggatcggttctttcatcttcgccgcccctgcgcgtccagctcttctaagacgagatgccgtcgggcttccaacagataggctccgaagatggggaaccccctcagcagcgagtgactgggaccctggtccttgctgtgttctctgcggtgcttggctccctgcagtttgggtacaacattggggtcatcaatgcccctcagaaggtgattgaacagagctacaatgagacgtggctggggaggcaggggcctgagggacccagctccatccctccaggcaccctcaccaccctctgggccctctccgtggccatcttttccgtgggcggcatgatttcctccttcctcattggtatcatctctcagtggcttggaaggaaaagggccatgctggtcaacaatgtcctggcggtgctggggggcagcctcatgggcctggccaatgctgctgcctcctatgaaatgctcatccttggacgattcctcattggcgcctactcagggctgacatcagggctggtgcccatgtacgtgggggagattgctcccactcacctgcggggcgccctggggacgctcaaccaactggccattgttatcggcattctgatcgcccaggtgctgggcttggagtccctcctgggcactgccagcctgtggccactgctcctgggcctcacagtgctacctgccctcctgcagctggtcctgctgcccttctgtcccgagagcccccgctacctctacatcatccagaatctcgaggggcctgccagaaagagtctgaagcgcctgacaggctgggccgatgtttctggagtgctggctgagctgaaggatgagaagcggaagctggagcgtgagcggccactgtccctgctccagctcctgggcagccgtacccaccggcagcccctgatcattgcggtcgtgctgcagctgagccagcagctctctggcatcaatgctgttttctattattcgaccagcatcttcgagacagcaggggtaggccagcctgcctatgccaccataggagctggtgtggtcaacacagtcttcaccttggtctcggtgttgttggtggagcgggcggggcgccggacgctccatctcctgggcctggcgggcatgtgtggctgtgccatcctgatgactgtggctctgctcctgctggagcgagttccagccatgagctacgtctccattgtggccatctttggcttcgtggcattttttgagattggccctggccccattccttggttcatcgtggccgagctcttcagccagggaccccgcccggcagccatggctgtggctggtttctccaactggacgagcaacttcatcattggcatgggtttccagtatgttgcggaggctatggggccctacgtcttccttctatttgcggtcctcctgctgggcttcttcatcttcaccttcttaagagtacctgaaactcgaggccggacgtttgaccagatctcagctgccttccaccggacaccctctcttttagagcaggaggtgaaacccagcacagaacttgagtatttagggccagatgagaacgactgaggggccaggcaggggtgggagagccagctctctctacccggcccagagaccccttcctttcctctgcagcactttaaccctctcttccctattatttccgggtggaaaagaatccctgcagcctggtagaattgggaagctgggggaagggtggtctgagcaccccctcattcccctcgtgtgactctcttggattatttatgtgttgtggtttggccgtggccatcagggtgggccactctcccctccctcttccttcccccatcccctttcctccccaccttccccagactcagctccagaataccttcttcgctgctagagaagggggattggagggaagacaggtctagactttctcagtgggacaaaccagagcagagagcaggacaggagacaagaaatccagtttcccaccaccttggactcctcccacaatctgggactttcact

SEQ ID NO: 54 - DNA, 3121 bp, Human
aggtcactgggaccctggttttcactgtcatcactgctgtgctgggttccttccagtttggatatgacattggtgtgatcaatgcacctcaacaggcaagtaataatatctcactatagacatgttttgggtgttccactggatgaccgaaaagctatcaacaactatgttatcaacagtacagatgaactgcccacaatctcatactcaatgaacccaaaaccaaccccttgggctgaggaagagactgtggcagctgctcaactaatcaccatgctctggtccctgtctgtatccagctttgcagttggtggaatgactgcatcattctttggtgggtggcttggggacacacttggaagaatcaaagccatgttagtagcaaacattctgtcattagttggagctctcttgatggggttttcaaaattgggaccatctcatatacttataattgctggaagaagcatatcaggactatattgtgggctaatttcaggcctggttcctatgtatatcggtgaaattgctccaaccgctctcaggggagcacttggcacttttcatcagctggccatcgtcacgggcattcttattagtcagattattggtcttgaatttatcttgggcaattatgatctgtggcacatcctgcttggcctgtctggtgtgcgagccatccttcagtctctgctactctttttctgtccagaaagccccagatacctttacatcaagttagatgaggaagtcaaagcaaaacaaagcttgaaaagactcagaggatatgatgatgtcaccaaagatattaatgaaatgagaaaagaaagagaagaagcatcgagtgagcagaaagtctctataattcagctcttcaccaattccagctaccgacagcctattctagtggcactgatgctgcatgtggctcagcaattttccggaatcaatggcattttttactactcaaccagcatttttcagacggctggtatcagcaaacctgtttatgcaaccattggagttggcgctgtaaacatggttttcactgctgtctctgtattccttgtggagaaggcagggcgacgttctctctttctaattggaatgagtgggatgtttgtttgtgccatcttcatgtcagtgggacttgtgctgctgaataagttctcttggatgagttatgtgagcatgatagccatcttcctctttgtcagcttctttgaaattgggccaggcccgatcccctggttcatggtggctgagtttttcagtcaaggaccacgtcctgctgctttagcaatagctgcattcagcaattggacctgcaatttcattgtagctctgtgtttccagtacattgcggacttctgtggaccttatgtgtttttcctctttgctggagtgctcctggcctttaccctgttcacattttttaaagttccagaaaccaaaggaaagtcttttgaggaaattgctgcagaattccaaaagaagagtggctcagcccacaggccaaaagctgctgtagaaatgaaattcctaggagctacagagactgtgtaaaaaaaaaaccctgctttttgacatgaacagaaacaataagggaaccgtctgtttttaaatgatgattccttgagcattttatatccacatctttaagtattgttttatttttatgtgctctcatcagaaatgtcatcaaatattaccaaaaaagtatttttttaagttagagaatatatttttgatggtaagactgtaattaagtaaaccaaaaaggctagtttattttgttacactaaagggcaggtggttctaatatttttagctctgttctttataacaaggttcttctaaaattgaagagatttcaacatatcatttttttaacacataactagaaacctgaggatgcaacaaatatttatatatttgaatatcattaaattggaattttcttacccatatatcttatgttaaaggagatatggctagtggcaataagttccatgttaaaatagacaactcttccatttattgcactcagcttttttcttgagtactagaatttgtattttgcttaaaattttacttttgttctgtattttcatgtggaatggattatagagtatactaaaaaatgtctatagagaaaaactttcatttttggtaggcttatcaaaatctttcagcactcagaaaagaaaaccattttagttcctttatttaatggccaaatggtttttgcaagatttaacactaaaaaggtttcacctgatcatatagcgtgggttatcagttaacattaacatctattataaaaccatgttgattcccttctggtacaatcctttgagttatagtttgctttgctttttaattgaggacagcctggttttcacatacactcaaacaatcatgagtcagacatttggtatattacctcaaattcctaataagtttgatcaaatctaatgtaagaaaatttgaagtaaaggattgatcactttgttaaaaatattttctgaattattatgtctcaaaataagttgaaaaggtagggtttgaggattcctgagtgtgggcttctgaaacttcataaatgttcagcttcagacttttatcaaaatccctatttaattttcctggaaagactgattgttttatggtgtgttcctaacataaaataatcgtctcctttgacatttccttctttgtcttagctgtatacagattctagccaaactattctatggccattactaacacgcattgtacactatctatctgcctttacctacataggcaaattggaaatacacagatgattaaacagactttagcttacagtcaattttacaattatggaaatatagttctgatgggtcccaaaagcttagcagggtgctaacgtatctctaggctgttttctccaccaactggagcactgatcaatccttcttatgtttgctttaatgtgtattgaagaaaagcactttttaaaaagtactctttaagagtgaaataattaaaaaccactgaacatttgctttgttttctaaagttgttcacatatatgtaatttagcagtccaaagaacaagaaattgtttcttttc

SEQ ID NO: 55 - DNA, 2285 bp, Human
gaattccgaatcatgtgcagaatgctgaatcttcccccagccaggacgaataagacagcgcggaaaagcagattctcgtaattctggaattgcatgttgcaaggagtctcctggatcttcgcacccagcttcgggtagggagggagtccgggtcccgggctaggccagcccggcaggtggagagggtccccggcagccccgcgcgcccctggccatgtctttaatgccctgccccttcatgtggccttctgagggttcccagggctggccagggttgtttcccacccgcgcgcgcgctctcacccccagccaaacccacctggcagggctccctccagccgagaccttttgattcccggctcccgcgctcccgcctccgcgccagcccgggaggtggccctggacagccggacctcgcccggccccggctgggaccatggtgtttctctcgggaaatgcttccgacagctccaactgcacccaaccgccggcaccggtgaacatttccaaggccattctgctcggggtgatcttggggggcctcattcttttcggggtgctgggtaacatcctagtgatcctctccgtagcctgtcaccgacacctgcactcagtcacgcactactacatcgtcaacctggcggtggccgacctcctgctcacctccacggtgctgcccttctccgccatcttcgaggtcctaggctactgggccttcggcagggtcttctgcaacatctgggcggcagtggatgtgctgtgctgcaccgcgtccatcatgggcctctgcatcatctccatcgaccgctacatcggcgtgagctacccgctgcgctacccaaccatcgtcacccagaggaggggtctcatggctctgctctgcgtctgggcactctccctggtcatatccattggacccctgttcggctggaggcagccggcccccgaggacgagaccatctgccagatcaacgaggagccgggctacgtgctcttctcagcgctgggctccttctacctgcctctggccatcatcctggtcatgtactgccgcgtctacgtggtggccaagagggagagccggggcctcaagtctggcctcaagaccgacaagtcggactcggagcaagtgacgctccgcatccatcggaaaaacgccccggcaggaggcagcgggatggccagcgccaagaccaagacgcacttctcagtgaggctcctcaagttctcccgggagaagaaagcggccaaaacgctgggcatcgtggtcggctgcttcgtcctctgctggctgccttttttcttagtcatgcccattgggtctttcttccctgatttcaagccctctgaaacagtttttaaaatagtattttggctcggatatctaaacagctgcatcaaccccatcatatacccatgctccagccaagagttcaaaaaggcctttcagaatgtcttgagaatccagtgtctctgcagaaagcagtcttccaaacatgccctgggctacaccctgcacccgcccagccaggccgtggaagggcaacacaaggacatggtgcgcatccccgtgggatcaagagagaccttctacaggatctccaagacggatggcgtttgtgaatggaaatttttctcttccatgccccgtggatctgccaggattacagtgtccaaagaccaatcctcctgtaccacagcccgggtgagaagtaaaagctttttgcaggtctgctgctgtgtagggccctcaacccccagccttgacaagaaccatcaagttccaaccattaaggtccacaccatctccctcagtgagaacggggaggaagtctaggacaggaaagatgcagaggaaaggggaataatcttaggtacccaccccacttccttctcggaaggccagctcttcttggaggacaagacaggaccaatcaaagaggggacctgctgggaatggggtgggtggtagacccaactcatcaggcagcgggtagggcacagggaagagggagggtgtctcacaaccaaccagttcagaatgatacggaacagcatttccctgcagctaatgctttcttggtcactctgtgcccacttcaacgaaaaccaccatgggaaacagaatttcatgcacaatccaaaagactataaatataggattatgatttcatcatgaatattttgagcacacactctaagtttggagctatttcttgatggaagtgaggggattttattttcaggctcaacctactgacagccacatttgacatttatgggga

SEQ ID NO: 56 - DNA, 451 bp, Human
ggctgcatcagaagaggccatcaagcagatcactgtccttctgccatggccctgtggatgcgcctcctgcccctgctggcgctgctggccctctggggacctgacccagccgcagcctttgtgaaccaacacctgtgcggctcacacctggtggaagctctctacctagtgtgcggggaacgaggcttcttctacacacccaagacccgccgggaggcagaggacctgcaggtggggcaggtggagctgggcgggggccctggtgcaggcagcctgcagcccttggccctggaggggtccctgcagaagcgtggcattgtggaacaatgctgtaccagcatctgctccctctaccagctggagaactactgcaactagacgcagcccgcaggcagccccccacccgccgcctcctgcaccgagagagatggaataaagcccttgaaccagc

SEQ ID NO: 57 - DNA, 1534 bp, Human
cctccaaccacctgcacgcctgccagggcctctctggggcagccatgaagtccctcgtcctgctcctttgtcttgctcagctctggggctgccactcagccccacatggcccagggctgatttatagacaaccgaactgcgatgatccagaaactgaggaagcagctctggtggctatagactacatcaatcaaaaccttccttggggatacaaacacaccttgaaccagattgatgaagtaaaggtgtggcctcagcagccctccggagagctgtttgagattgaaatagacaccctggaaaccacctgccatgtgctggaccccacccctgtggcaagatgcagcgtgaggcagctgaaggagcatgctgtcgaaggagactgtgatttccagctgttgaaactagatggcaagttttccgtggtatacgcaaaatgtgattccagtccagactcagccgaggacgtgcgcaaggtgtgccaagactgccccctgctggccccgctgaacgacaccagggtggtgcacgccgcgaaagctgccctggccgccttcaacgctcagaacaacggctccaattttcagctggaggaaatttcccgggctcagcttgtgcccctcccaccttctacctatgtggagtttacagtgtctggcactgactgtgttgctaaagaggccacagaggcagccaagtgtaacctgctggcagaaaagcaatatggcttttgtaaggcaacactcagtgagaagcttggtggggcagaggttgcagtgacctgcacggtgttccaaacacagcccgtgacctcacagccccaaccagaaggtgccaatgaagcagtccccacccccgtggtggacccagatgcacctccgtcccctccacttggcgcacctggactccctccagctggctcacccccagactcccatgtgttactggcagctcctccaggacaccagttgcaccgggcgcactacgacctgcgccacaccttcatgggtgtggtctcattggggtcaccctcaggagaagtgtcgcacccccggaaaacacgcacagtggtgcagcctagtgttggtgctgctgctgggccagtggttcctccatgtccggggaggatcagacacttcaaggtctaggctagacatggcagagatgaggaggtttggcacagaaaacatagccaccattttgtccaagcctgggcatgggtggggggccttgtctgctggccacgcaagtgtcacatgcgatctacattaatatcaagtcttgactccctacttcccgtcattcctcacaggacagaagcagagtgggtggtggttatgtttgacagaaggcattaggttgacaacttgtcatgattttgacggtaagccaccatgattgtgttctctgcctctggttgaccttacaaaaaccattggaactgtgactttgaaaggtgctcttgctaagcttatatgtgcctgttaatgaaagtgcctgaaagaccttccttaataaagaaggttctaagctg

SEQ ID NO: 58 - DNA, 5309 bp, Human
gcacttccttctcggctagattatctgaaactgttgtcggttcttgagatgatactaccaccgaatgtctgtgtttcattgtctagtccaacctgtattgtggatatctacaacgttccggcaatagttttgcaggtgcatcacatttttgtttttgttttgggaggaaaagggagggcacggcagccaggcttcatattcctacaagtgcatgcttcaagattactgtacttacagtgtttccaacatcttctcataaaaggggaaagcttcatagcctcaaccatgaaggaaaccagtcgcatagggcatggagctggagaactataaacagcccgtggtgctgagagaggacaactgccgaaggcgccggaggatgaagccgcgcagtgctgcggccagcctgtcctccatggagctcatccccatcgagttcgtgctgcccaccagccagcgcaaatgcaagagccccgaaacggcgctgctgcacgtggccggccacggcaacgtggagcagatgaaggcccaggtgtggctgcgagcgctggagaccagcgtggcggcggacttctaccaccggctgggaccgcatcacttcctcctgctctatcagaagaaggggcagtggtacgagatctacgacaagtaccaggtggtgcagactctggactgcctgcgctactggaaggccacgcaccggagcccgggccagatccacctggtgcagcggcacccgccctccgaggagtcccaagccttccagcggcagctcacggcgctgattggctatgacgtcactgacgtcagcaacgtgcacgacgatgagctggagttcacgcgccgtggcttggtgaccccgcgcatggcggaggtggccagccgcgaccccaagctctacgccatgcacccgtgggtgacgtccaagcccctcccggagtacctgtggaagaagattgccaacaactgcatcttcatcgtcattcaccgcagcaccaccagccagaccattaaggtctcacccgacgacacccccggcgccatcctgcagagcttcttcaccaagatggccaagaagaaatctctgatggatattcccgaaagccaaagcgaacaggattttgtgctgcgcgtctgtggccgggatgagtacctggtgggcgaaacgcccatcaaaaacttccagtgggtgaggcactgcctcaagaacggagaagagattcacgtggtactggacacgcctccagacccggccctagacgaggtgaggaaggaagagtggccgctggtggacgactgcacgggagtcaccggctaccatgagcagcttaccatccacggcaaggaccacgagagtgtgttcaccgtgtccctgtgggactgcgaccgcaagttcagggtcaagatcagaggcattgatatccccgtcctgcctcggaacaccgacctcacagtttttgtagaggcaaacatccagcatgggcaacaagtcctttgccaaaggagaaccagccccaaacccttcacagaggaggtgctgtggaatgtgtggcttgagttcagtatcaaaatcaaagacttgcccaaaggggctctactgaacctccagatctactgcggtaaagctccagcactgtccagcaaggcctctgcagagtcccccagttctgagtccaagggcaaagttcagcttctctattatgtgaacctgctgctgatagaccaccgtttcctcctgcgccgtggagaatacgtcctccacatgtggcagatatctgggaagggagaagaccaaggaagcttcaatgctgacaaactcacgtctgcaactaacccagacaaggagaactcaatgtccatctccattcttctggacaattactgccacccgatagccctgcctaagcatcagcccacccctgacccggaaggggaccgggttcgagcagaaatgcccaaccagcttcgcaagcaattggaggcgatcatagccactgatccacttaaccctctcacagcagaggacaaagaattgctctggcattttagatacgaaagccttaagcacccaaaagcatatcctaagctatttagttcagtgaaatggggacagcaagaaattgtggccaaaacataccaattgttggccagaagggaagtctgggatcaaagtgctttggatgttgggttaacaatgcagctcctggactgcaacttctcagatgaaaatgtaagagccattgcagttcagaaactggagagcttggaggacgatgatgttctgcattaccttctacaattggtccaggctgtgaaatttgaaccataccatgatagtgcccttgccagatttctgctgaagcgtggtttaagaaacaaaagaattggtcactttttgttttggttcttgagaagtgagatagcccagtccagacactatcagcagaggttcgctgtgattctggaagcctatctgaggggctgtggcacagccatgctgcacgactttacccaacaagtccaagtaatcgagatgttacaaaaagtcacccttgatattaaatcgctctctgctgaaaagtatgacgtcagttcccaagttatttcacaacttaaacaaaagcttgaaaacctgcagaattctcaactccccgaaagctttagagttccatatgatcctggactgaaagcaggagcgctggcaattgaaaaatgtaaagtaatggcctccaagaaaaaaccactatggcttgagtttaaatgtgccgatcctacagccctatcaaatgaaacaattggaattatctttaaacatggtgatgatctgcgccaagacatgcttattttacagattctacgaatcatggagtctatttgggagactgaatctttggatctatgcctcctgccatatggttgcatttcaactggtgacaaaataggaatgatcgagattgtgaaagacgccacgacaattgccaaaattcagcaaagcacagtgggcaacacgggagcatttaaagatgaagtcctgaatcactggctcaaagaaaaatcccctactgaagaaaagtttcaggcagcagtggagagatttgtttattcctgtgcaggctactgtgtggcaacctttgttcttggaataggcgacagacacaatgacaatattatgatcaccgagacaggaaacctatttcatattgacttcgggcacattcttgggaattacaaaagtttcctgggcattaataaagagagagtgccatttgtgctaacccctgacttcctctttgtgatgggaacttctggaaagaagacaagcccacacttccagaaatttcaggacatctgtgttaaggcttatctagcccttcgtcatcacacaaacctactgatcatcctgttctccatgatgctgatgacaggaatgccccagttaacaagcaaagaagacattgaatatatccgggatgccctcacagtggggaaaaatgaggaggatgctaaaaagtattttcttgatcagatcgaagtttgcagagacaaaggatggactgtgcagtttaattggtttctacatcttgttcttggcatcaaacaaggagagaaacattcagcctaatactttaggctagaatcaaaaacaagttagtgttctatggtttaaattagcatagcaatcatcgaacttggatttcaaatgcaatagacattgtgaaagctggcatttcagaagtatagctcttttcctacctgaactcttccctggagaaaagatgttggcattgctgattgtttggttaagcaatgtccagtgctaggattatttgcaggtttggttttttctcatttgtctgtggcattggagaatattctcggtttaaacagactaatgacttccttattgtccctgatattttgactatcttactattgagtgcttctggaaattctttggaataattgatgacatctattttcatctgggtttagtctcaattttggttatctttgtgttcctcaagctctttaaagaaaaagatgtaatcgttgtaacctttgtctcattccttaaatgatgcttccaaacatctccttagtgtctgcaggtgttagtggtgtgctaaaagcaaggaaagcgagttagtcttttcagtgtcttttgcaattcaattcttttgtcatgtataactgagacacacaaacacagcaggagaaatctaaaccgttgtgccttgaccttcctctgctggtcttgttccagggttatgaatatgaaaaaatagagatgagactttttgtgtcaactctgtccacaagagtgagttatctagtatgattagtatagctttctccagcatggcagcaggaagtaactacagggcctcttttatgcctgacatttcttcccttcctttttccctgcctccctttttcatcaattgcgatgctcccacaactctttacagacttgtgaaatcttcaagaacacctttactctataactcaaaaattagttgaaaaataattacttctcaaggattattagaatcttaggtacttatttgtaaagatgtttagtgacttttttttcaagtatcttattaaaggaggcattctagaaaatatgaattagtttccaaatgccttaattttaaactttggcctgaacagttttttctttttcttaatggaagaagatatttaatatcttaaaaatattccaagttaggaagaacactacttgccttatccatttcccatttaaaggacttttaaactttgacacatccttcagatttcctgaaaataattgaaatatcttactttaaaaatattttcatctctgaaatatctcgttatttattggaggtattgtttaaccttagagagaccattaaattatttataaaatattttgtaattacctgtagctaatacattacatagaaaaaaactatgttaacagtgtctctgtttaagtataatcagatataaatatatacttaattttttaattttaaaaatagatacctgtttgactttgaggtagtccagaccttttctttttttttttttttttaatgtgtgcaaaagcccaaaggttcctaagcctggctgcaaagaagaatcaacagggacactttttaaaaacactcttatcagcctgggcaacacagtgagactccatctcttaaaaaaaaaattagctgggtatagtggtatgtgcctgtagtcccaggtactcaggaggctgaggcaggaggattgcctgagcccaggaggtggaaactgcagagagtcatgatcat

SEQ ID NO: 59 - DNA, 2083 bp, Human
caaaggcaccatgcctctgcgggatgaaaccctccgagaggtgtgggcctctgacagtgggcatgaagaagaaagcctgagcccggaggccccgcggcgccccaaacagcgacccgccccggcacagaggctaaggaagaagaggacggaggcccccgaatccccctgccccacgggatccaagccccggaagcccggagctgggcggagggggaggccgcgggaggagccttccccagacccagcccaggcccgggcgccgcagacggtctacgccaggttcctcagggaccccgaggccaagaagcgcgacccccgggaaacctttctggtagcccgtgccccagacgcggaggacgaggaggaggaggaagaggaggacgaggaggacgaggaagaggaggcagaggaaaagaaagagaaaatccttctgcctcccaagaagcccctgagagagaagagctccgcagacctgaaggagaggagggccaaggcccagggcccaaggggagacctgggaagccctgaccccccaccgaaacctctgcgtgttaggaataaggaagctccagcaggggaggggaccaagatgagaaagaccaagaagaaagggtctggggaggccgacaaggacccctcagggagcccagccagtgcgaggaagagcccagcagccatgtttctggttggggaaggcagtcctgacaagaaagccctgaagaagaaaggcactcccaaaggcgcgaggaaggaggaagaagaggaggaggaggcagctacggtgataaagaacagcaatcaaaagggcaaagccaaaggaaaaggcaaaaagaaggaggagagggccccgtctccccccgtggaggtggacgaaccccgggagtttgtgctccggcctgccccccagggccgcacggtgcgctgccggctgacccgggacaaaaagggcatggatcgaggcatgtatccctcctacttcctgcacctggacacggagaagaaggtgttcctcttggctggcaggaaacgaaaacggagcaagacagccaattacctcatctccatcgaccctaccaatctgtcccgaggaggggagaatttcatcgggaagctgaggtccaacctcctggggaaccgcttcacggtctttgacaacgggcagaacccacagcgtgggtacagcactaatgtggcaagccttcggcaggagctggcagctgtgatctatgaaaccaacgtgctgggcttccgtggcccccggcgcatgaccgtcatcattcctggcatgagtgcggagaacgagagggtccccatccggccccgaaatgctagtgacggcctgctggtgcgctggcagaacaagacgctggagagcctcatagaactgcacaacaagccacctgtctggaacgatgacagtggctcctacaccctcaacttccaaggccgggtcacccaggcctcagtcaagaacttccagattgtccacgctgatgaccccgactatatcgtgctgcagttcggccgcgtggcggaggacgccttcaccctagactaccggtacccgctgtgcgccctgcaggccttcgccatcgccctctccagtttcgacgggaagctggcctgcgagtgaccccagcagcccctcagcgcccccagagcccgtcagcgtgggggaaaggattcagtggaggctggcagggtccctccagcaaagctcccgcggaaaactgctcctgtgtcggggctgacctctcactgcctctcggtgacctccgtcctctccccagcctggcacaggccgaggcaggaggagcccggacggcgggtaggacggagatgaagaacatctggagttggagccgcacatctggtctcggagctcgcctgcgccgctgtgcccccctcctccccgcgccccagtcacttcctgtccgggagcagtagtcattgttgttttaacctcccctctccccgggaccgcgctagggctccgaggagctggggcgggctaggaggagggggtaggtgatgggggacgagggccaggcacccacatccccaataaagccgcgtccttggc

SEQ ID NO: 60 - DNA, 6321 bp, Human
gggcggcgcggtcggagggggccggcgcgcagagccagacgccgccgcttgttttggttggggctctcggcaactctccgaggaggaggaggaggagggaggaggggagaagtaactgcagcgcagcgcctcccgaggaacaggcgtcttccccgaacccttcccaaacctcccccatcccctctcgcccttgtcccctcccctcctccccagccgcctggagcgaggggcagggatgagtctgtccctccggccggtccccagctgcagtggctgcccggtatcgtttcgcatggaaaagccactttctccacccgccgagatgggcccggatgggggctgcagaggacgcgcccgcgggcggcggcagcagcagcagcagcagcagcagcaacagcaacagccgcagcgccgcggtctctgcgactgagctggtatttgggcggctggtggcggctgggacggttggggggtgggagcggataacggaggagggagaaccccgtgcaacgttgggacttggcaacccgcctccccctgcccaaggatatttaatttgcctcgggaatcgctgcttccagaggggaactcaggagggaaggcgcgcgcgcgcgcgcgctcctggaggggcaccgcagggacccccgactgtcgcctccctgtgccggactccagccggggcgacgagagatgcatcttcgctccttcctggtggcggcggcggctgagaggagacttggctctcggaggatcggggctgccctcaccccggacgcactgcctccccgccgggcgtgaagcgcccgaaaactccggtcgggctctctcctgggctcagcagctgcgtcctccttcagctgcccctccccggcgcggggggcggcgtggatttcagagtcggggtttctgctgcctccagccctgtttgcatgtgccgggccgcggcgaggagcctccgccccccacccggttgtttttcggagcctccctctgctcagcgttggtggtggcggtggcagcatggcgagccctccggagagcgatggcttctcggacgtgcgcaaggtgggctacctgcgcaaacccaagagcatgcacaaacgcttcttcgtactgcgcgcggccagcgaggctgggggcccggcgcgcctcgagtactacgagaacgagaagaagtggcggcacaagtcgagcgcccccaaacgctcgatcccccttgagagctgcttcaacatcaacaagcgggctgactccaagaacaagcacctggtggctctctacacccgggacgagcactttgccatcgcggcggacagcgaggccgagcaagacagctggtaccaggctctcctacagctgcacaaccgtgctaagggccaccacgacggagctgcggccctcggggcgggaggtggtgggggcagctgcagcggcagctccggccttggtgaggctggggaggacttgagctacggtgacgtgcccccaggacccgcattcaaagaggtctggcaagtgatcctgaagcccaagggcctgggtcagacaaagaacctgattggtatctaccgcctttgcctgaccagcaagaccatcagcttcgtgaagctgaactcggaggcagcggccgtggtgctgcagctgatgaacatcaggcgctgtggccactcggaaaacttcttcttcatcgaggtgggccgttctgccgtgacggggcccggggagttctggatgcaggtggatgactctgtggtggcccagaacatgcacgagaccatcctggaggccatgcgggccatgagtgatgagttccgccctcgcagcaagagccagtcctcgtccaactgctctaaccccatcagcgtccccctgcgccggcaccatctcaacaatcccccgcccagccaggtggggctgacccgccgatcacgcactgagagcatcaccgccacctccccggccagcatggtgggcgggaagccaggctccttccgtgtccgcgcctccagtgacggcgaaggcaccatgtcccgcccagcctcggtggacggcagccctgtgagtcccagcaccaacagaacccacgcccaccggcatcggggcagcgcccggctgcaccccccgctcaaccacagccgctccatccccatgccggcttcccgctgctcgccttcggccaccagcccggtcagtctgtcgtccagtagcaccagtggccatggctccacctcggattgtctcttcccacggcgatctagtgcttcggtgtctggttcccccagcgatggcggtttcatctcctcggatgagtatggctccagtccctgcgatttccggagttccttccgcagtgtcactccggattccctgggccacaccccaccagcccgcggtgaggaggagctaagcaactatatctgcatgggtggcaaggggccctccaccctgaccgcccccaacggtcactacattttgtctcggggtggcaatggccaccgctgcaccccaggaacaggcttgggcacgagtccagccttggctggggatgaagcagccagtgctgcagatctggataatcggttccgaaagagaactcactcggcaggcacatcccctaccattacccaccagaagaccccgtcccagtcctcagtggcttccattgaggagtacacagagatgatgcctgcctacccaccaggaggtggcagtggaggccgactgccgggacacaggcactccgccttcgtgcccacccgctcctacccagaggagggtctggaaatgcaccccttggagcgtcggggggggcaccaccgcccagacagctccaccctccacacggatgatggctacatgcccatgtccccaggggtggccccagtgcccagtggccgaaagggcagtggagactatatgcccatgagccccaagagcgtatctgccccacagcagatcatcaatcccatcagacgccatccccagagagtggaccccaatggctacatgatgatgtcccccagcggtggctgctctcctgacattggaggtggccccagcagcagcagcagcagcagcaacgccgtcccttccgggaccagctatggaaagctgtggacaaacggggtagggggccaccactctcatgtcttgcctcaccccaaacccccagtggagagcagcggtggtaagctcttaccttgcacaggtgactacatgaacatgtcaccagtgggggactccaacaccagcagcccctccgactgctactacggccctgaggacccccagcacaagccagtcctctcctactactcattgccaagatcctttaagcacacccagcgccccggggagccggaggagggtgcccggcatcagcacctccgcctttccactagctctggtcgccttctctatgctgcaacagcagatgattcttcctcttccaccagcagcgacagcctgggtgggggatactgcggggctaggctggagcccagccttccacatccccaccatcaggttctgcagccccatctgcctcgaaaggtggacacagctgctcagaccaatagccgcctggcccggcccacgaggctgtccctgggggatcccaaggccagcaccttacctcgggcccgagagcagcagcagcagcagcagcccttgctgcaccctccagagcccaagagcccgggggaatatgtcaatattgaatttgggagtgatcagtctggctacttgtctggcccggtggctttccacagctcaccttctgtcaggtgtccatcccagctccagccagctcccagagaggaagagactggcactgaggagtacatgaagatggacctggggccgggccggagggcagcctggcaggagagcactggggtcgagatgggcagactgggccctgcacctcccggggctgctagcatttgcaggcctacccgggcagtgcccagcagccggggtgactacatgaccatgcagatgagttgtccccgtcagagctacgtggacacctcgccagctgcccctgtaagctatgctgacatgcgaacaggcattgctgcagaggaggtgagcctgcccagggccaccatggctgctgcctcctcatcctcagcagcctctgcttccccgactgggcctcaaggggcagcagagctggctgcccactcgtccctgctggggggcccacaaggacctgggggcatgagcgccttcacccgggtgaacctcagtcctaaccgcaaccagagtgccaaagtgatccgtgcagacccacaagggtgccggcggaggcatagctccgagactttctcctcaacacccagtgccacccgggtgggcaacacagtgccctttggagcgggggcagcagtagggggcggtggcggtagcagcagcagcagcgaggatgtgaaacgccacagctctgcttcctttgagaatgtgtggctgaggcctggggagcttgggggagcccccaaggagccagccaaactgtgtggggctgctgggggtttggagaatggtcttaactacatagacctggatttggtcaaggacttcaaacagtgccctcaggagtgcacccctgaaccgcagcctcccccacccccaccccctcatcaacccctgggcagcggtgagagcagctccacccgccgctcaagtgaggatttaagcgcctatgccagcatcagtttccagaagcagccagaggaccgtcagtagctcaactggacatcacagcagaatgaagacctaaatgacctcagcaaatcctcttctaactcatgggtacccagactctaaatatttcatgattcacaactaggacctcatatcttcctcatcagtagatggtacgatgcatccatttcagtttgtttactttatccaatcctcaggatttcattgactgaactgcacgttctatattgtgccaagcgaaaaaaaaaaatgcactgtgacaccagaataatgagtctgcataaacttcatcttcaaccttaaggacttagctggccacagtgagctgatgtgcccaccaccgtgtcatgagagaatgggtttactctcaatgcattttcaagatacatttcatctgctgctgaaactgtgtacgacaaagcatcattgtaaattatttcatacaaaactgttcacgttgggtggagagagtattaaatatttaacataggttttgatttatatgtgtaattttttaaatgaaaatgtaacttttcttacagcacatcttttttttggatgtgggatggaggtatacaatgttctgttgtaaagagtggagcaaatgcttaaaacaaggcttaaaagagtagaatagggtatgatccttgttttaagattgtaattcagaaaacataatataagaatcatagtgccatagatggttctcaattgtatagttatatttgctgatactatctcttgtcatataaacctgatgttgagctgagttccttataagaattaatcttaattttgtattttttcctgtaagacaataggccatgttaattaaactgaagaaggatatatttggctgggtgttttcaaatgtcagcttaaaattggtaattgaatggaagcaaaattataagaagaggaaattaaagtcttccattgcatgtattgtaaacagaaggagatgggtgattccttcaattcaaaagctctctttggaatgaacaatgtgggcgtttgtaaattctggaaatgtctttctattcataataaactagatactgttgatcttttcttctgtcccctccccccaccacttctgtaagtttcctgctctattcccaccatttttttctgtgcacacattatgatatatttcatttcctgcattgtcttgagaaagatggtaaggcaagtgagctgttgctaaccagaaattaaaattccagtaagtgtttttcattatgaccagggctatgtgtcaccttccctaagactcttaccttatctcatattttttgagaacttccagtgttacattatttaactgaatgtaattggcccatttgccttggtgggtgctggcctattagtgattagttaacaaaacacagcgtacagagagcacagaaaagcttaatgacctgctactgaaacacctagccagcagtgaaaatgttaattcttttcttgtttggaaagtatacacgtcttggaattttttccacgtgaaaaacaaatggcaatgaatgcatttaaagatattgccgacagatttttaaatctttttaccaggaaacttcctaaaggttaaat

SEQ ID NO: 61 - DNA, 6487 bp, Human
cgaaattgaaccggagccatcttgggcccggcgcgcagacccgcggagtttcccgtgccgacgccccggggccacttccagtgcggagtagcggaggcgtgggggcctcgaggggctggcgcggcccagcggtcgggccagggtcgtgccgccggcgggtcgggccgggcaatgcctcgcgggcgcaatgaatccgcggcaggggtattccctcagcggatactacacccatccatttcaaggctatgagcacagacagctcagataccagcagcctgggccaggatcttcccccagtagtttcctgcttaagcaaatagaatttctcaaggggcagctcccagaagcaccggtgattggaaagcagacaccgtcactgccaccttccctcccaggactccggccaaggtttccagtactacttgcctccagtaccagaggcaggcaagtggacatcaggggtgtccccaggggcgtgcatctcggaagtcaggggctccagagagggttccagcatccttcaccacgtggcaggagtctgccacagagaggtgttgattgcctttcctcacatttccaggaactgagtatctaccaagatcaggaacaaaggatcttaaagttcctggaagagcttggggaagggaaggccaccacagcacatgatctgtctgggaaacttgggactccgaagaaagaaatcaatcgagttttatactccctggcaaagaagggcaagctacagaaagaggcaggaacaccccctttgtggaaaatcgcggtctccactcaggcttggaaccagcacagcggagtggtaagaccagacggtcatagccaaggagccccaaactcagacccgagtttggaaccggaagacagaaactccacatctgtctcagaagatcttcttgagccttttattgcagtctcagctcaggcttggaaccagcacagcggagtggtaagaccagacagtcatagccaaggatccccaaactcagacccaggtttggaacctgaagacagcaactccacatctgccttggaagatcctcttgagtttttagacatggccgagatcaaggagaaaatctgcgactatctcttcaatgtgtctgactcctctgccctgaatttggctaaaaatattggccttaccaaggcccgagatataaatgctgtgctaattgacatggaaaggcagggggatgtctatagacaagggacaacccctcccatatggcatttgacagacaagaagcgagagaggatgcaaatcaagagaaatacgaacagtgttcctgaaaccgctccagctgcaatccctgagaccagaagaaacgcagagttcctcacctgtaatatacccacatcaaatgcctcaaataacatggtaaccacagaaaaagtggagaatgggcaggaacctgtcataaagttagaaaacaggcaagaggccagaccagaaccagcaagactgaaaccacctgttcattacaatggcccctcaaaagcagggtatgttgactttgaaaatggccagtgggccacagatgacatcccagatgacttgaatagtatccgcgcagcaccaggtgagtttcgagccatcatggagatgccctccttctacagtcatggcttgccacggtgttcaccctacaagaaactgacagagtgccagctgaagaaccccatcagcgggctgttagaatatgcccagttcgctagtcaaacctgtgagttcaacatgatagagcagagtggaccaccccatgaacctcgatttaaattccaggttgtcatcaatggccgagagtttcccccagctgaagctggaagcaagaaagtggccaagcaggatgcagctatgaaagccatgacaattctgctagaggaagccaaagccaaggacagtggaaaatcagaagaatcatcccactattccacagagaaagaatcagagaagactgcagagtcccagacccccaccccttcagccacatccttcttttctgggaagagccccgtcaccacactgcttgagtgtatgcacaaattggggaactcctgcgaattccgtctcctgtccaaagaaggccctgcccatgaacccaagttccaatactgtgttgcagtgggagcccaaactttccccagtgtgagtgctcccagcaagaaagtggcaaagcagatggccgcagaggaagccatgaaggccctgcatggggaggcgaccaactccatggcttctgataaccaggtcaggaagattggcgagctcgtgagatacctgaacaccaaccctgtgggtggccttttggagtacgcccgctcccatggctttgctgctgaattcaagttggtcgaccagtccggacctcctcacgagcccaagttcgtttaccaagcaaaagttgggggtcgctggttcccagccgtctgcgcacacagcaagaagcaaggcaagcaggaagcagcagatgcggctctccgtgtcttgattggggagaacgagaaggcagaacgcatgggtttcacagagctccctctcactggcagcaccttccatgaccagatagccatgctgagccaccggtgcttcaacactctgactaacagcttccagccctccttgctcggccgcaagattctggccgccatcattatgaaaaaagactctgaggacatgggtgtcgtcgtcagcttgggaacagggaatcgctgtgtgaaaggagattctctcagcctaaaaggagaaactgtcaatgactgccatgcagaaataatctcccggagaggcttcatcaggtttctctacagtgagttaatgaaatacaactcccagactgcgaaggatagtatatttgaacctgctaagggaggagaaaagctccaaataaaaaagactgtgtcattccatctgtatatcagcactgctccgtgtggagatggcgccctctttgacaagtcctgcagcgaccgtgctatggaaagcacagaatcccgccactaccctgtcttcgagaatcccaaacaaggaaagctccgcaccaaggtggagaacggagaaggcacaatccctgtggaatccagtgacattgtgcctacgtgggatggcattcggctcggggagagactccgtaccatgtcctgtagtgacaaaatcctacgctggaacgtgctgggcctgcaaggggcactgttgacccacttcctgcagcccatttatctcaaatctgtcacattgggttaccttttcagccaagggcatctgacccgtgctatttgctgtcgtgtgacaagagatgggagtgcatttgaggatggactacgacatccctttattgtcaaccaccccaaggttggcagagtcagcatatatgattccaaaaggcaatccgggaagactaaggagacaagcgtcaactggtgtctggctgatggctatgacctggagatcctggacggtaccagaggcactgtggatgggccacggaatgaattgtcccgggtctccaaaaagaacatttttcttctatttaagaagctctgctccttccgttaccgcagggatctactgagactctcctatggtgaggccaagaaagctgcccgtgactacgagacggccaagaactacttcaaaaaaggcctgaaggatatgggctatgggaactggattagcaaaccccaggaggaaaagaacttttatctctgcccagtatagtatgctccagtgacagatggattagggtgtgtcatactagggtgtgagagaggtaggtcgtagcattcctcatcacatggtcaggggatttttttttctcctttttttttctttttaagccataattggtgatactgaaaactttgggttcccatttatcctgctttctttgggattgctaggcaaggtctggccaggccccccttttttcccccaagtgaagaggcagaaacctaagaagttatcttttctttctacccaaagcatacatagtcactgagcacctgcggtccatttcctcttaaaagttttgttttgatttgtttccatttcctttccctttgtgtttgctacactgacctcttgcggtcttgattaggtttcagtcaactctggatcatgtcagggactgataatttcatttgtggattacgcagacccctctacttcccctctttcccttctgagattctttccttgtgatctgaatgtctccttttccccctcagagggcaaagaggtgaacataaaggatttggtgaaacatttgtaagggtaggagttgaaaactgcagttcccagtgccacggaagtgtgattggagcctgcagataatgctcagccatcctcccatcctgcactttagccagctgcagggcgggcaaggcaaggaaagctgcttccctggaagtgtatcactttctccggcagctgggaagtctagaaccagccagactgggttaagggagctgctcaagcaatagcagaggtttcacccggcaggatgacacagaccacttcccagggagcacgggcatgccttggaatattgccaagcttccagctgcctcttctcttaaagcattcctaggaatattttccccgccaatgctgggcgtacaccctagccaacgggacaaatcctagagggtataaaatcatctctgctcagataatcatgacttagcaagaataagggcaaaaaatcctgttggcttaacgtcactgttccacccggtgtaatatctctcatgacagtgacaccaagggaagttgactaagtcacatgtaaattaggagtgttttaaagaatgccatagatgttgattcttaactgctacagataacctgtaattgagcagatttaaaattcaggcatacttttccatttatccaagtgctttcatttttccagatggcttcagaagtaggctcgtgggcagggcgcagacctgatctttctagggttgacatagaaagcagtagttgtgggtgaaagggcaggttgtcttcaaactctgtgaggtagaatcctttgtctatacctccatgaacattgactcgtgtgttcagagcctttggcctctctgtggagtctggctctctggctcctgtgcattctttgaatagtcactcgtaaaaactgtcagtgcttgaaactgtttcctttactcatgttgaagggactttgttggcttttagagtgttggtcatgactccaagagcagagcagggaagagcccaagcatagacttggtgccgtggtgaaggctgcagtccagttttgtgatgctgcttttacgtgtccctcgataacagtcagctagacacactcaggaggactactgaggctctgcgaccttcaggagctgagcctgcctctctcctttagatgacagaccttcatctgggaacgtgctgagccagcaccctcagatgatttccctccaaactgctgactaggtcatcctctgtctggtagagacattcacatctttgcttttattctgtgctctctgtacttttgaccaaaaattgaccaaagtaagaaaatgcaagttctaaaaatagactaaggatgcctttgcagaacaccaaagcatcccaaggaactggtagggaagtggcgcctgtctcctggagtggaagaggcctgctccctggctctgggtctgctgggggcacagtaaatcagtcttggcacccacatccagggcagagaggtctgtggttctcagcatcagaaggcagcgcagcccctctcctcttcaggctacagggttgtcacctgctgagtcctcaggttgtttggcctctctggtccatcttgggcattaggttctccagcagagctctggccagctgcctcttctttaactgggaacacaggctctcacaagatcagaacccccactcacccccaagatcttatctagcaagcctgtagtattcagtttctgttgtaggaagagagcgaggcatccctgaattccacgcatctgctggaaacgagccgtgtcagatcgcacatccctgcgcccccatgcccccatgcccctctgagtcacacaggacagaggaggcagagcttctgcccactgttatcttcactttctttgtccagtcttttgtttttaataagcagtgaccctccctactcttctttttaatgatttttgtagttgatttgtctgaactgtggctactgtgcattccttgaataatcacttgtaaaaattgtcagtgcttgaagctgtttcctttactcacattgaagggacttcgttggttttttggagtcttggttgtgactccaagagcagagtgaggaagacccccaagcatagactcgggtactgtgatgatggctgcagtccagttttatgattctgcttttatgtgtcccttgataacagtgacttaacaatatacattcctcataaataaaaaaaaaacaagaatctgaattcttag

SEQ ID NO: 62 - protein, 110 aa, Human
MALWMRLLPLLALLALWGPDPAAAFVNQHLCGSHLVEALYLVCGERGFFYTPKTRREAEDLQVGQVELGGGPGAGSLQPLALEGSLQKRGIVEQCCTSICSLYQLENYCN

SEQ ID NO: 63 - protein, 167 aa, Human
MHWGTLCGFLWLWPYLFYVQAVPIQKVQDDTKTLIKTIVTRINDISHTQSVSSKQKVTGLDFIPGLHPILTLSKMDQTLAVYQQILTSMPSRNVIQISNDLENLRDLLHVLAFSKSCHLPWASGLETLDSLGGVLEASGYSTEVVALSRLQGSLQDMLWQLDLSPGC

SEQ ID NO: 64 - protein, 524 aa, Human
MTEDKVTGTLVFTVITAVLGSFQFGYDIGVINAPQQVIISHYRHVLGVPLDDRKAINNYVINSTDELPTISYSMNPKPTPWAEEETVAAAQLITMLWSLSVSSFAVGGMTASFFGGWLGDTLGRIKAMLVANILSLVGALLMGFSKLGPSHILIIAGRSISGLYCGLISGLVPMYIGEIAPTALRGALGTFHQLAIVTGILISQIIGLEFILGNYDLWHILLGLSGVRAILQSLLLFFCPESPRYLYIKLDEEVKAKQSLKRLRGYDDVTKDINEMRKEREEASSEQKVSIIQLFTNSSYRQPILVALMLHVAQQFSGINGIFYYSTSIFQTAGISKPVYATIGVGAVNMVFTAVSVFLVEKAGRRSLFLIGMSGMFVCAIFMSVGLVLLNKFSWMSYVSMIAIFLFVSFFEIGPGPIPWFMVAEFFSQGPRPAALAIAAFSNWTCNFIVALCFQYIADFCGPYVFFLFAGVLLAFTLFTFFKVPETKGKSFEEIAAEFQKKSGSAHRPKAAVEMKFLGATETV

SEQ ID NO: 65 - protein, 259 aa, Human
MSEVPVARVWLVLLLLTVQVGVTAGAPWQCAPCSAEKLALCPPVSASCSEVTRSAGCGCCPMCALPLGAACGVATARCARGLSCRALPGEQQPLHALTRGQGACVQESDASAPHAAEAGSPESPESTEITEEELLDNFHLMAPSEEDHSILWDAISTYDGSKALHVTNIKKWKEPCRIELYRVVESLAKAQETSGEEISKFYLPNCNKNGFYHSRQCETSMDGEAGLCWCVYPWNGKRIPGSPEIRGDPNCQIYFNVQN

SEQ ID NO: 66 - protein, 466 aa, Human
MVFLSGNASDSSNCTQPPAPVNISKAILLGVILGGLILFGVLGNILVILSVACHRHLHSVTHYYIVNLAVADLLLTSTVLPFSAIFEVLGYWAFGRVFCNIWAAVDVLCCTASIMGLCIISIDRYIGVSYPLRYPTIVTQRRGLMALLCVWALSLVISIGPLFGWRQPAPEDETICQINEEPGYVLFSALGSFYLPLAIILVMYCRVYVVAKRESRGLKSGLKTDKSDSEQVTLRIHRKNAPAGGSGMASAKTKTHFSVRLLKFSREKKAAKTLGIVVGCFVLCWLPFFLVMPIGSFFPDFKPSETVFKIVFWLGYLNSCINPIIYPCSSQEFKKAFQNVLRIQCLRRKQSSKHALGYTLHPPSQAVEGQHKDMVRIPVGSRETFYRISKTDGVCEWKFFSSMPRGSARITVSKDQSSCTTARVRSKSFLEVCCCVGPSTPSLDKNHQVPTIKVHTISLSENGEEV

SEQ ID NO: 67 - protein, 1367 aa, Human
MKSGSGGGSPTSLWGLLFLSAALSLWPTSGEICGPGIDIRNDYQQLKRLENCTVIEGYLHILLISKAEDYRSYRFPKLTVITEYLLLFRVAGLESLGDLFPNLTVIRGWKLFYNYALVIFEMTNLKDIGLYNLRNITRGAIRIEKNADLCYLSTVDWSLILDAVSNNYIVGNKPPKECGDLCPGTMEEKPMCEKTTINNEYNYRCWTTNRCQKMCPSTCGKRACTENNECCHPECLGSCSAPDNDTACVACRHYYYAGVCVPACPPNTYRFEGWRCVDRDFCANILSAESSDSEGFVIHDGECMQECPSGFIRNGSQSMYCIPCEGPCPKVCEEEKKTKTIDSVTSAQMLQGCTIFKGNLLINIRRGNNIASELENFMGLIEVVTGYVKIRHSHALVSLSFLKNLRLILGEEQLEGNYSFYVLDNQNLQQLWDWDHRNLTIKAGKMYFAFNPKLCVSEIYRMEEVTGTKGRQSKGDINTRNNGERASCESDVLHFTSTTTSKNRIIITWHRYRPPDYRDLISFTVYYKEAPFKNVTEYDGQDACGSNSWNMVDVDLPPNKDVEPGILLHGLKPWTQYAVYVKAVTLTMVENDHIRGAKSEILYIRTNASVPSIPLDVLSASNSSSQLIVKWNPPSLPNGNLSYYIVRWQRQPQDGYLYRHNYCSKDKIPIRKYADGTIDIEEVTENPKTEVCGGEKGPCCACPKTEAEKQAEKEEAEYRKVFENFLHNSIFVPRPERKRRDVMQVANTTMSSRSRNTTAADTYNITDPEELETEYPFFESRVDNKERTVISNLRPFTLYRIDIHSCNHEAEKLGCSASNFVFARTMPAEGADDIPGPVTWEPRPENSIFLKWPEPENPNGLILMYEIKYGSQVEDQRECVSRQEYRKYGGAKLNRLNPGNYTARIQATSLSGNGSWTDPVFFYVQAKTGYENFIHLIIALPVAVLLIVGGLVIMLYVFHRKRNNSRLGNGVLYASVNPEYFSAADVYVPDEWEVAREKITMSRELGQGSFGMVYEGVAKGVVKDEPETRVAIKTVNEAASMRERIEFLNEASVMKEFNCHHVVRLLGVVSQGQPTLVIMELMTRGDLKSYLRSLRPEMENNPVLAPPSLSKMIQMAGEIADGMAYLNANKFVHRDLAARNCMVAEDFTVKIGDFGMTRDIYETDYYRKGGKGLLPVRWMSPESLKDGVFTTYSDVWSFGVVLWEIATLAEQPYQGLSNEQVLRFVMEGGLLDKPDNCPDMLFELMRMCWQYNPKMRPSFLEIISSIKEEMEPGFREVSFYYSEENKLPEPEELDLEPENMESVPLDPSASSSSLPLPDRHSGHKAENGPGPGVLVLRASFDERQPYAHMNGGRKNERALPLPQSSTC

SEQ ID NO: 68 - protein, 2491 aa, Human
MGAAAGRSPHLGPAPARRPQRSLLLLQLLLLVAAPGSTQAQAAPFPELCSYTWEAVDTKNNVLYKINICGSVDIVQCGPSSAVCMHDLKTRTYHSVGDSVLRSATRSLLEFNTTVSCDQQGTNHRVQSSIAFLCGKTLGTPEFVTATECVHYFEWRTTAACKKDIFKANKEVPCYVFDEELRKHDLNPLIKLSGAYLVDDSDPDTSLFINVCRDIDTLRDPGSQLRACPPGTAACLVRGHQAFDVGQPRDGLKLVRKDRLVLSYVREEAGKLDFCDGHSPAVTITFVCPSERREGTIPKLTAKSNCRYEIEWITEYACHRDYLESKTCSLSGEQQDVSIDLTPLAQSGGSSYISDGKEYLFYLNVCGETEIQFCNKKQAAVCQVKKSDTSQVKAAGRYHNQTLRYSDGDLTLIYFGGDECSSGFQRMSVINFECNKTAGNDGKGTPVFTGEVDCTYFFTWDTEYACVKEKEDLLCGATDGKKRYDLSALVRHAEPEQNWEAVDGSQTETEKKHFFINICHRVLQEGKARGCPEDAAVCAVDKNGSKNLGKFISSPMKEKGNIQLSYSDGDDCGHGKKIKTNITLVCKPGDLESAPVLRTSGEGGCFYEFEWRTAAACVLSKTEGENCTVFDSQAGFSFDLSPLTKKNGAYKVETKKYDFYINVCGPVSVSPCQPDSGACQVAKSDEKTWNLGLSNAKLSYYDGMIQLNYRGGTPYNNERHTPRATLITFLCDRDAGVGFPEYQEEDNSTYNFRWYTSYACPEEPLECVVTDPSTLEQYDLSSLAKSEGGLGGNWYAMDNSGEHVTWRKYYINVCRPLNPVPGCNRYASACQMKYEKDQGSFTEVVSISNLGMAKTGPVVEDSGSLLLEYVNGSACTTSDGRQTTYTTRIHLVCSRGRLNSHPIFSLNWECVVSFLWNTEAACPIQTTTDTDQACSIRDPNSGFVFNLNPLNSSQGYNVSGIGKIFMFNVCGTMPVCGTILGKPASGCEAETQTEELKNWKPARPVGIEKSLQLSTEGFITLTYKGPLSAKGTADAFIVRFVCNDDVYSGPLKFLHQDIDSGQGIRNTYFEFETALACVPSPVDCQVTDLAGNEYDLTGLSTVRKPWTAVDTSVDGRKRTFYLSVCNPLPYIPGCQGSAVGSCLVSEGNSWNLGVVQMSPQAAANGSLSIMYVNGDKCGNQRFSTRITFECAQISGSPAFQLQDGCEYVFIWRTVEACPVVRVEGDNCEVKDPRHGNLYDLKPLGLNDTIVSAGEYTYYFRVCGKLSSDVCPTSDKSKVVSSCQEKREPQGFHKVAGLLTQKLTYENGLLKMNFTGGDTCHKVYQRSTAIFFYCDRGTQRPVFLKETSDCSYLFEWRTQYACPPFDLTECSFKDGAGNSFDLSSLSRYSDNWEAITGTGDPEHYLINVCKSLAPQAGTEPCPPEAAACLLGGSKPVNLGRVRDGPQWRDGIIVLKYVDGDLCPDGIRKKSTTIRFTCSESQVNSRPMFISAVEDCEYTFAWPTATACPMKSNEHDDCQVTNPSTGHLFDLSSLSGRAGFTAAYSEKGLVYMSICGENENCPPGVGACFGQTRISVGKANKRLRYVDQVLQLVYKDGSPCPSKSGLSYKSVISFVCRPEAGPTNRPMLISLDKQTCTLFFSWHTPLACEQATECSVRNGSSIVDLSPLIHRTGGYEAYDESEDDASDTNPDFYINICQPLNPMHAVPCPAGAAVCKVPIDGPPIDIGRVAGPPILNPIANEIYLNFESSTPCLADKHFNYTSLIAFHCKRGVSMGTPKLLRTSECDFVFEWETPVVCPDEVRMDGCTLTDEQLLYSFNLSSLSTSTFKVTRDSRTYSVGVCTFAVGPEQGGCKDGGVCLLSGTKGASFGRLQSMKLDYRHQDEAVVLSYVNGDRCPPETDDGVPCVFPFIFNGKSYEECIIESRAKLWCSTTADYDRDHEWGFCRHSNSYRTSSIIFKCDEDEDIGRPQVFSEVRGCDVTFEWKTKVVCPPKKLECKFVQKHKTYDLRLLSSLTGSWSLVHNGVSYYINLCQKIYKGPLGCSERASICRRTTTGDVQVLGLVHTQKLGVIGDKVVVTYSKGYPCGGNKTASSVIELTCTKTVGRPAFKRFDIDSCTYYFSWDSRAACAVKPQEVQMVNGTITNPINGKSFSLGDIYFKLFRASGDMRTNGDNYLYEIQLSSITSSRNPACSGANICQVKPNDQHFSRKVGTSDKTKYYLQDGDLDVVFASSSKCGKDKTKSVSSTIFFHCDPLVEDGIPEFSHETADCQYLFSWYTSAVCPLGVGFDSENPGDDGQMHKGLSERSQAVGAVLSLLLVALTCCLLALLLYKKERRETVISKLTTCCRRSSNVSYKYSKVNKEEETDENETEWLMEEIQLPPPRQGKEGQENGHITTKSVKALSSLHGDDQDSEDEVLTIPEVKVHSGRGAGAESSHPVRNAQSNALQEREDDRVGLVRGEKARKGKSSSAQQKTVSSTKLVSFHDDSDEDLLHI

SEQ ID NO: 69 - protein, 1226 aa, Human
MNPRQGYSLSGYYTHPFQGYEHRQLRYQQPGPGSSPSSFLLKQIEFLKGQLPEAPVIGKQTPSLPPSLPGLRPRFPVLLASSTRGRQVDIRGVPRGVHLGSQGLQRGFQHPSPRGRSLPQRGVDCLSSHFQELSIYQDQEQRILKFLEELGEGKATTAHDLSGKLGTPKKEINRVLYSLAKKGKLQKEAGTPPLWKIAVSTQAWNQHSGVVRPDGHSQGAPNSDPSLEPEDRNSTSVSEDLLEPFIAVSAQAWNQHSGVVRPDSHSQGSPNSDPGLEPEDSNSTSALEDPLEFLDMAEIKEKICDYLFNVSDSSALNLAKNIGLTKARDINAVLIDMERQGDVYRQGTTPPIWHLTDKKRERMQIKRNTNSVPETAPAAIPETRRNAEFLTCNIPTSNASNNMVTTEKVENGQEPVIKLENRQEARPEPARLKPPVHYNGPSKAGYVDFENGQWATDDIPDDLNSIRAAPGEFRAIMEMPSFYSHGLPRCSPYKKLTECQLKNPISGLLEYAQFASQTCEFNMIEQSGPPHEPRFKFQVVINGREFPPAEAGSKKVAKQDAAMKAMTILLEEAKAKDSGKSEESSHYSTEKESEKTAESQTPTPSATSFFSGKSPVTTLLECMHKLGNSCEFRLLSKEGPAHEPKFQYCVAVGAQTFPSVSAPSKKVAKQMAAEEAMKALHGEATNSMASDNQPEGMISESLDNLESMMPNKVRKIGELVRYLNTNPVGGLLEYARSHGFAAEFKLVDQSGPPHEPKFVYQAKVGGRWFPAVCAHSKKQGKQEAADAALRVLIGENEKAERMGFTEVTPVTGASLRRTMLLLSRSPEAQPKTLPLTGSTFHDQIAMLSHRCFNTLTNSFQPSLLGRKILAAIIMKKDSEDMGVVVSLGTGNRCVKGDSLSLKGETVNDCHAEIISRRGFIRFLYSELMKYNSQTAKDSIFEPAKGGEKLQIKKTVSFHLYISTAPCGDGALFDKSCSDRAMESTESRHYPVFENPKQGKLRTKVENGEGTIPVESSDIVPTWDGIRLGERLRTMSCSDKILRWNVLGLQGALLTHFLQPIYLKSVTLGYLFSQGHLTRAICCRVTRDGSAFEDGLRHPFIVNHPKVGRVSIYDSKRQSGKTKETSVNWCLADGYDLEILDGTRGTVDGPRNELSRVSKKNIFLLFKKLCSFRYRRDLLRLSYGEAKKAARDYETAKNYFKKGLKDMGYGNWISKPQEEKNFYLCPV

SEQ ID NO: 70 - protein, 625 aa, Human [sequence omitted]

SEQ ID NO: 71 - protein, 367 aa, Human
MKSLVLLLCLAQLWGCHSAPHGPGLIYRQPNCDDPETEEAALVAIDYINQNLPWGYKHTLNQIDEVKVWPQQPSGELFEIEIDTLETTCHVLDPTPVARCSVRQLKEHAVEGDCDFQLLKLDGKFSVVYAKCDSSPDSAEDVRKVCQDCPLLAPLNDTRVVHAAKAALAAFNAQNNGSNFQLEEISRAQLVPLPPSTYVEFTVSGTDCVAKEATEAAKCNLLAEKQYGFCKATLSEKLGGAEVAVTCTVFQTQPVTSQPQPEGANEAVPTPVVDPDAPPSPPLGAPGLPPAGSPPDSHVLLAAPPGHQLHRAHYDLRHTFMGVVSLGSPSGEVSHPRKTRTVVQPSVGAAAGPVVPPCPGRIRHFKV

SEQ ID NO: 72 - protein, 463 aa, Human
MAGAPGPLRLALLLLGMVGRAGPRPQGATVSLWETVQKWREYRRQCQRSLTEDPPPATDLFCNRTFDEYACWPDGEPGSFVNVSCPWYLPWASSVPQGHVYRFCTAEGLWLQKDNSSLPWRDLSECEESKRGERSSPEEQLLFLYIIYTVGYALSFSALVIASAILLGFRHLHCTRNYIHLNLFASFILRALSVFIKDAALKWMYSTAAQQHQWDGLLSYLDSLSCRLVFLLMQYCVAANYYWLLVEGVYLYTLLAFSVLSEQWIFRLYVSIGWGVPLLFVVPWGIVKYLYEDEGCWTRNSNMNYWLIIRLPILFAIGVNFLIFVRVICIVVSKLKANLMCKTDIKCRLAKSTLTLIPLLGTHEVIFAFVMDEHARGTLRFIKLFTELSFTSFQGLMVAILYCFVNNEVQLEFRKSWERWRLEHLHIQRDSSMKPLKCPTSSLSSGATAGSSMYTATCQASCS

SEQ ID NO: 73 - protein, 1165 aa, Human
MICQKFCVVLLHWEFIYVITAFNLSYPITPWRFKLSCMPPNSTYDYFLLPAGLSKNTSNSNGHYETAVEPKFNSSGTHFSNLSKTTFHCCFRSEQDRNCSLCADNIEGKTFVSTVNSLVFQQIDANWNIQCWLKGDLKLFICYVESLFKNLFRNYNYKVHLLYVLPEVLEDSPLVPQKGSFQMVHCNCSVHECCECLVPVPTAKLNDTLLMCLKITSGGVIFQSPLMSVQPINMVKPDPPLGLHMEITDDGNLKISWSSPPLVPFPLQYQVKYSENSTTVIREADKIVSATSLLVDSILPGSSYEVQVRGKRLDGPGIWSDWSTPRVFTTQDVIYFPPKILTSVGSNVSFHCIYKKENKIVPSKEIVWWMNLAEKIPQSQYDVVSDHVSKVTFFNLNETKPRGKFTYDAVYCCNEHECHHRYAELYVIDVNINISCETDGYLTKMTCRWSTSTIQSLAESTLQLRYHRSSLYCSDIPSIHPISEPKDCYLQSDGFYECIFQPIFLLSGYTMWIRINHSLGSLDSPPTCVLPDSVVKPLPPSSVKAEITINIGLLKISWEKPVFPENNLQFQIRYGLSGKEVQWKMYEVYDAKSKSVSLPVPDLCAVYAVQVRCKRLDGLGYWSNWSNPAYTVVMDIKVPMRGPEFWRIINGDTMKKEKNVTLLWKPLMKNDSLCSVQRYVINHHTSCNGTWSEDVGNHTKFTFLWTEQAHTVTVLAINSIGASVANFNLTFSWPMSKVNIVQSLSAYPLNSSCVIVSWILSPSDYKLMYFIIEWKNLNEDGEIKWLRISSSVKKYYIHDHFIPIEKYQFSLYPIFMEGVGKPKIINSFTQDDIEKHQSDAGLYVIVPVIISSSILLLGTLLISHQRMKKLFWEDVPNPKNCSWAQGLNFQKPETFEHLFIKHTASVTCGPLLLEPETISEDISVDTSWKNKDEMMPTTVVSLLSTTDLEKGSVCISDQFNSVNFSEAEGTEVTYEAESQRQPFVKYATLISNSKPSETGEEQGLINSSVTKCFSSKNSPLKDSFSNSSWEIEAQAFFILSDQHPNIISPHLTFSEGLDELLKLEGNFPEENNDKKSIYYLGVTSIKKRESGVLLTDKSRVSCPFPAPCLFTDIRVLQDSCSHFVENNINLGTSSKKTFASYMPQFQTCSTQTHKIMENKMCDLTV

SEQ ID NO: 74 - protein, 1101 aa, Human [sequence omitted]

SEQ ID NO: 75 - protein, 501 aa, Human
MEQQDQSMKEGRLTLVLALATLIAAFGSSFQYGYNVAAVNSPALLMQQFYNETYYGRTGEFMEDFPLTLLWSVTVSMFPFGGFIGSLLVGPLVNKFGRKGALLFNNIFSIVPAILMGCSRVATSFELIIISRLLVGICAGVSSNVVPMYLGELAPKNLRGALGVVPQLFITVGILVAQIFGLRNLLANVDGWPILLGLTGVPAALQLLLLPFFPESPRYLLIQKKDEAAAKKALQTLRGWDSVDREVAEIRQEDEAEKAAGFISVLKLFRMRSLRWQLLSIIVLMGGQQLSGVNAIYYYADQIYLSAGVPEEHVQYVTAGTGAVNVVMTFCAVFVVELLGRRLLLLLGFSICLIACCVLTAALALQDTVSWMPYISIVCVISYVIGHALGPSPIPALLITEIFLQSSRPSAFMVGGSVHWLSNFTVGLIFPFIQEGLGPYSFIVFAVICLLTTIYIFLIVPETKAKTFIEINQIFTKMNKVSEVYPEKEELKELPPVTSEQ

SEQ ID NO: 76 - protein, 542 aa, Human
MPLRDETLREVWASDSGHEEESLSPEAPRRPKQRPAPAQRLRKKRTEAPESPCPTGSKPRKPGAGRRGRPREEPSPDPAQARAPQTVYARFLRDPEAKKRDPRETFLVARAPDAEDEEEEEEEDEEDEEEEAEEKKEKILLPPKKPLREKSSADLKERRAKAQGPRGDLGSPDPPPKPLRVRNKEAPAGEGTKMRKTKKKGSGEADKDPSGSPASARKSPAAMFLVGEGSPDKKALKKKGTPKGARKEEEEEEEAATVIKNSNQKGKAKGKGKKKAKEERAPSPPVEVDEPREFVLRPAPQGRTVRCRLTRDKKGMDRGMYPSYFLHLDTEKKVFLLAGRKRKRSKTANYLISIDPTNLSRGGENFIGKLRSNLLGNRFTVFDNGQNPQRGYSTNVASLRQELAAVIYETNVLGFRGPRRMTVIIPGMSAENERVPIRPRNASDGLLVRWQNKTLESLIELHNKPPVWNDDSGSYTLNFQGRVTQASVKNFQIVHADDPDYIVLQFGRVAEDAFTLDYRYPLCALQAFAIALSSFDGKLACE

SEQ ID NO: 77 - protein, 1257 aa, Human
MASCSFTRDQATRRLRGAAAAAAAALAAVVTTPLLSSGTPTALIGTGSSCPGAMWLSTATGSRSDSESEEEDLPVGEEVCKRGYLRKQKHGHRRYFVLKLETADAPARLEYYENARKFRHSVRAAAAAAAAAASGAAIPPLIPPRRVITLYQCFSVSQRADARYRHLIALFTQDEYFAMVAENESEQESWYLLLSRLILESKRRRCGTLGAQPDGEPAALAAAAAAEPPFYKDVWQVIVKPRGLGHRKELSGVFRLCLTDEEVVFVRLNTEVASVVVQLLSIRRCGHSEQYFFLEVGRSTVIGPGELWMQVDDCVVAQNMHELFLEKMRALCADEYRARCRSYSISIGAHLLTLLSARRHLGLVPLEPGGWLRRSRFEQFCHLRAIGDGEDEMLFTRRFVTPSEPVAHSRRGRLHLPRGRRSRRAVSVPASFFRRLAPSPARPRHPAEAPNNGARLSSEVSGSGSGNFGEEGNPQGKEDQEGSGGDYMPMNNWGSGNGRGSGGGQGSNGQGSSSHSSGGNQCSGEGQGSRGGQGSNGQGSGGNQCSRDGQGTAGGHGSGGGQRPGGGHGSGGGQGPGDGHGSGGGKNSGGGKGSGSGKGSDGDGERGKSLKKRSYFGKLTQSKQQQMPPPPPPPPPPPPAGGTGGKGKSGGRFRLYFCVDRGATKECKEAKEVKDAEIPEGAARGPHRARAFDEDEDDPYVPMRPGVATPLVSSSDYMPMAPQNVSASKKRHSRSPFEDSRGYMMMFPRVSPPPAPSPPKAPDTNKEDDSKDNDSESDYMFMAPGAGAIPKNPRNPQGGSSSKSWSSYFSLPNPFRSSPLGQNDNSEYVPMLPGKFLGRGLDKEVSYNWDPKDAASKPSGEGSFSKPGDGGSPSKPSDHEPPKNKAKRPNRLSFITKGYKIKPKPQKPTHEQREADSSSDYVNMDFTKRESNTPAPSTQGLPDSWGIIAEPRQSAFSNYVNVEFGVPFPNPANDLSDLLRAIPRANPLSLDSARWPLPPLPLSATGSNAIEEEGDYIEVIFNSAMTPAMALADSAIRYDAETGRIYVVDPFSECCMDISLSPSRCSEPPPVARLLQEEEQERRRPQSRSQSFFAAARAAVSAFPTDSLERDLSPSSAPAVASAAEPTLALSQVVAAASALAAAPGIGAAAAAAGFDSASARWFQPVANAADAEAVRGAQDVAGGSNPGAHNPSANLARGDNQAGGAAAAAAAPEPPPRSRRVPRPPEREDSDNDDDTHVRMDFARRDNQFDSPKRGR

SEQ ID NO: 78 - protein, 1324 aa, Human
MASPPRHGPPGPASGDGPNLNNNNNNNNHSVRKCGYLRKQKHGHKRFFVLRGPGAGGDKATAGGGSAPQPPRLEYYESEKNWRSKAGAPKRVIALDCCLNINKRADPKHKYLIALYTKDEYFAVAAENEQEQEGWYRALTDLVSEGRAAAGDAPPAAAPAASCSASLPGAVGGSAGAAGAEDSYGLVAPATAAYREVWQVNLKPKGLGQSKNLTGVYRLCLSARTIGFVKLNCEQPSVTLQLMNIRRCGHSDSFFFIEVGRSAVTGPGELWMQADDSVVAQNIHETILEAMKALKELFEFRPRSKSQSSGSSATHPISVPGARRHHHLVNLPPSQTGLVRRSRTDSLAATPPAAKCSSCRVRTASEGDGGAAAGAAAAGARPVSVAGSPLSPGPVRAPLSRSHTLIGGCRAAGTKWHCFPAGGGLQHSRSMSMPVEHLPPAATSPGSLSSSSDHGWGSYPPPPGPHPLLPHPLHHGPGQRPSSGSASASGSPSDPGFMSLDEYGSSPGDLRAFCSHRSNTPESIAETPPARDGGGGGEFYGYMTMDRPLSHCGRSYRRVSGDAAQDLDRGLRKRTYSLTTPARQRPVPQPSSASLDEYTLMRATFSGSAGRLCPSCPASSPKVAYHPYPEDYGDIEIGSHRSSSSNLGADDGYMPMTPGAALAGSGSGSCRSDDYMPMSPASVSAPKQILQPRAAAAAAAAVPFAGPAGPAPTFAAGRTFPASGGGYKASSPAESSPEDSGYMRMWCGSKLSMEHADGKLLPNGDYLNVSPSDAVTTGTPPDFFSAALHPGGEPLRGVPGCCYSSLPRSYKAPYTCGGDSDQYVLMSSPVGRILEEERLEPQATPGPTQAASAFGAGPTQPPHPVVPSPVRPSGGRPEGFLGQRGRAVRPTRLSLEGLPSLPSMHEYPLPPEPKSPGEYINIDFGEPGARLSPPAPPLLASAASSSSLLSASSPALSLGSGTPGTSSDSRQRSPLSDYMNLDFSSPKSPKPGAPSGHPVGSLDGLLSPEASSPYPPLPPRPSASPSSSLQPPPPPPAPGELYRLPPASAVATAQGPGAASSLSSDTGDNGDYTEMAFGVAATPPQPIAAPPKPEAARVASPTSGVKRLSLMEQVSGVEAFLQASQPPDPHRGAKVIRADPQGGRRRHSSETFSSTTTVTPVSPSFAHNPKRHNSASVENVSLRKSSEGGVGVGPGGGDEPPTSPRQLQPAPPLAPQGRPWTPGQPGGLVGCPGSGGSPMRRETSAGFQNGLKYIAIDVREEPGLPPQPQPPPPPLPQPGDKSSWGRTRSLGGLISAVGVGSTRGGCGGPGPGAPAPCPTTYAQH

SEQ ID NO: 79 - protein, 408 aa, Human
MNTTDNGVNCLCAICGDRATGKHYGASTCDGCKGFFRRSIRKSHIYSCRFSRQCVVDKDKRNQCRYCRLRKCFRAGMKKEAVQNERDRISTRRSTFDGSNIPSINTLAQAEVRSRQISVSSPGSSTDINVKKIASIGDVCESMKQQLLVLVEWAKYIPAFCELPLDDQVALLRAHAGEHLLLGATKRSMMYKDILLLGNNYVIHRNSCEVEISRVANRVLDELVRPFQEIQIDDNEYACLKAIVFFDPDAKGLSDPVKIKNMRFQVQIGLEDYINDRQYDSRGRFGELLLLLPTLQSITWQMIEQIQFVKLFGMVKIDNLLQEMLLGGASNDGSHLHHPMHPHLSQDPLTGQTILLGPMSTLVHADQISTPETPLPSPPQGSGQEQYKIAANQASVISHQHLSKQKQL

SEQ ID NO: 80 - protein, 191 aa, Human
MVKKLVMAQKRGETRALCLGVTMVVCAVITYYILVTTVLPLYQKSVWTQESKCHLIETNIRDQEELKGKKVPQYPCLWVNVSAAGRWAVLYHTEDTRDQNQQCSYIPGSVDNYQTARADVEKVRAKFQEQQVFYCFSAPRGNETSVLFQRLYGPQALLFSLFWPTFLLTGGLLIIAMVKSNQYLSILAAQK

SEQ ID NO: 81 - protein, 398 aa, Human
MWLLLTMASLISVLGTTHGLFGKLHPGSPEVTMNISQMITYWGYPNEEYEVVTEDGYILEVNRIPYGKKNSGNTGQRPVVFLQHGLLASATNWISNLPNNSLAFILADAGYDVWLGNSRGNTWARRNLYYSPDSVEFWAFSFDEMAKYDLPATIDFIVKKTGQKQLHYVGHSQGTTIGFIAFSTNPSLAKRIKTFYALAPVATVKYTKSLINKLRFVPQSLFKFIFGDKIFYPHNFFDQFLATEVCSREMLNLLCSNALFIICGFDSKNFNTSRLDVYLSHNPAGTSVQNMFHWTQAVKSGKFQAYDWGSPVQNRMHYDQSQPPYYNVTAMNVPIAVWNGGKDLLADPQDVGLLLPKLPNLIYHKEIPFYNHLDFIWAMDAPQEVYNDIVSMISEDKK

SEQ ID NO: 82 - protein, 469 aa, Human
MLPPWTLGLLLLATVRGKEVCYGQLGCFSDEKPWAGTLQRPVKLLPWSPEDIDTRFLLYTNENPNNFQLITGTEPDTIEASNFQLDRKTRFIIHGFLDKAEDSWPSDMCKKMFEVEKVNCICVDWRHGSRAMYTQAVQNIRVVGAETAFLIQALSTQLGYSLEDVHVIGHSLGAHTAAEAGRRLGGRVGRITGLDPAGPCFQDEPEEVRLDPSDAVFVDVIHTDSSPIVPSLGFGMSQKVGHLDFFPNGGKEMPGCKKNVLSTITDIDGIWEGIGGFVSCNHLRSFEYYSSSVLNPDGFLGYPCASYDEFQESKCFPCPAEGCPKMGHYADQFKGKTSAVEQTFFLNTGESGNFTSWRYKVSVTLSGKEKVNGYIRIALYGSNENSKQYEIFKGSLKPDASHTCAIDVDFNVGKIQKVKFLWNKRGINLSEPKLGASQITVQSGEDGTEYNFCSSDTVEENVLQSLYPC

SEQ ID NO: 83 - protein, 467 aa, Human
MLIFWTITLFLLGAAKGKEVCYEDLGCFSDTEPWGGTAIRPLKILPWSPEKIGTRFLLYTNENPNNFQILLLSDPSTIEASNFQMDRKTRFIIHGFIDKGDESWVTDMCKKLFEVEEVNCICVDWKKGSQATYTQAANNVRVVGAQVAQMLDILLTEYSYPPSKVHLIGHSLGAHVAGEAGSKTPGLSRITGLDPVEASFESTPEEVRLDPSDADFVDVIHTDAAPLIPFLGFGTNQQMGHLDFFPNGGESMPGCKKNALSQIVDLDGIWAGTRDFVACNHLRSYKYYLESILNPDGFAAYPCTSYKSFESDKCFPCPDQGCPQMGHYADKFAGRTSEEQQKFFLNTGEASNFARWRYGVSITLSGRTATGQIKVALFGNKGNTHQYSIFRGILKPGSTHSYEFDAKLDVGTIEKVKFLWNNNVINPTLPKVGATKITVQKGEEKTVYNFCSEDTVREDTLLTLTPC

SEQ ID NO: 84 - protein, 492 aa, Human
MEPSSKKLTGRLMLAVGGAVLGSLQFGYNTGVINAPQKVIEEFYNQTWVHRYGESILPTTLTTLWSLSVAIFSVGGMIGSFSVGLFVNRFGRRNSMLMMNLLAFVSAVLMGFSKLGKSFEMLILGRFIIGVYCGLTTGFVPMYVGEVSPTAFRGALGTLHQLGIVVGILIAQVFGLDSIMGNKDLWPLLLSIIFIPALLQCIVLPFCPESPRFLLINRNEENRAKSVLKKLRGTADVTHDLQEMKEESRQMMREKKVTILELFRSPAYRQPILIAVVLQLSQQLSGINAVFYYSTSIFEKAGVQQPVYATIGSGIVNTAFTVVSLFVVERAGRRTLHLIGLAGMAGCAILMTIALALLEQLPWMSYLSIVAIFGFVAFFEVGPGPIPWFIVAELFSQGPRPAAIAVAGFSNWTSNFIVGMCFQYVEQLCGPYVFIIFTVLLVLFFIFTYFKVPETKGRTFDEIASGFRQGGASQSDKTPEELFHPLGADSQV

SEQ ID NO: 85 - protein, 496 aa, Human
MGTQKVTPALIFAITVATIGSFQFGYNTGVINAPEKIIKEFINKTLTDKGNAPPSEVLLTSLWSLSVAIFSVGGMIGSFSVGLFVNRFGRRNSMLIVNLLAVTGGCFMGLCKVAKSVEMLILGRLVIGLFCGLCTGFVPMYIGEISPTALRGAFGTLNQLGIVVGILVAQIFGLEFILGSEELWPLLLGFTILPAILQSAALPFCPESPRFLLINRKEEENAKQILQRLWGTQDVSQDIQEMKDESARMSQEKQVTVLELFRVSSYRQPIIISIVLQLSQQLSGINAVFYYSTGIFKDAGVQEPIYATIGAGVVNTIFTVVSLFLVERAGRRTLHMIGLGGMAFCSTLMTVSLLLKDNYNGMSFVCIGAILVFVAFFEIGPGPIPWFIVAELFSQGPRPAAMAVAGCSNWTSNFLVGLLFPSAAHYLGAYVFIIFTGFLITFLAFTFFKVPETRGRTFEDITRAFEGQAHGADRSGKDGVMEMNSIEPAKETTTNV

SEQ ID NO: 86 - protein, 798 aa, Human
MAWDMCNQDSESVWSDIECAALVGEDQPLCPDLPELDLSELDVNDLDTDSFLGGLKWCSDQSEIISNQYNNEPSNIFEKIDEENEANLLAVLTETLDSLPVDEDGLPSFDALTDGDVTTDNEASPSSMPDGTPPPQEAEEPSLLKKLLLAPANTQLSYNECSGLSTQNHANHNHRIRTNPAIVKTENSWSNKAKSICQQQKPQRRPCSELLKYLTTNDDPPHTKPTENRNSSRDKCTSKKKSHTQSQSQHLQAKPTTLSLPLTPESPNDPKGSPFENKTIERTLSVELSGTAGLTPPTTPPHKANQDNPFRASPKLKSSCKTVVPPPSKKPRYSESSGTQGNNSTKKGPEQSELYAQLSKSSVLTGGHEERKTKRPSLRLFGDHDYCQSINSKTEILINISQELQDSRQLENKDVSSDWQGQICSSTDSDQCYLRETLEASKQVSPCSTRKQLQDQEIRAELNKHFGHPSQAVFDDEADKTGELRDSDFSNEQFSKLPMFINSGLAMDGLFDDSEDESDKLSYPWDGTQSYSLFNVSPSCSSFNSPCRDSVSPPKSLFSQRPQRMRSRSRSFSRHRSCSRSPYSRSRSRSPGSRSSSRSCYYYESSHYRHRTHRNSPLYVRSRSRSPYSRRPRYDSYEEYQHERLKREEYRREYEKRESERAKQRERQRQKAIEERRVIYVGKIRPDTTRTELRDRFEVFGEIEECTVNLRDDGDSYGFITYRYTCDAFAALENGYTLRRSNETDFELYFCGRKQFFKSNYADLDSNSDDFDPASTKSKYDSLDFDSLLKEAQRSLRR

SEQ ID NO: 87 - protein, 1167 aa, Human
SKMICQKFCVVLLHWEFIYVITAFNLSYPITPWRFKLSCMPPNSTYDYFLLPAGLSKNTSNSNGHYETAVEPKFNSSGTHFSNLSKTTFHCCFRSEQDRNCSLCADNIEGRTFVSTVNSLVFQQIDANWNIQCWLKGDLKLFICYVESLFKNLFRNYNYKVHLLYVLPEVLEDSPLVPQKGSFQMVHCNCSVHECCECLVPVPTAKLNDTLLMCLKITSGGVIFRSPLMSVQPINMVKPDPPLGLHMEITDDGNLKISWSSPPLVPFPLQYQVKYSENSTTVIREADKIVSATSLLVDSILPGSSYEVQVRGKRLDGPGIWSDWSTPRVFTTQDVIYFPPKILTSVGSNVSFHCIYKKENKIVPSKEIVWWMNLAEKIPQSQYDVVSDHVSKVTFFNLNETKPRGKFTYDAVYCCNEHECHHRYAELYVIDVNINISCETDGYLTKMTCRWSTSTIQSLAESTLQLRYHRSSLYCSDIPSIHPISEPKDCYLQSDGFYECIFQPIFLLSGYTMWIRINHSLGSLDSPPTCVLPDSVVKPLPPSSVKAEITINIGLLKISWEKPVFPENNLQFQIRYGLSGKEVQWKMYEVYDAKSKSVSLPVPDLCAVYAVQVRCKRLDGLGYWSNWSNPAYTVVMDIKVPMRGPEFWRIINGDTMKKEKNVTLLWKPLMKNDSLCSVQRYVINHHTSCNGTWSEDVGNHTKFTFLWTEQAHTVTVLAINSIGASVANFNLTFSWPMSKVNIVQSLSAYPLNSSCVIVSWILSPSDYKLMYFIIEWKNLNEDGEIKWLRISSSVKKYYIHDHFIPIEKYQFSLYPIFMEGVGKPKIINSFTQDDIEKHQSDAGLYVIVPVIISSSILLLGTLLISHQRMKKLFWEDVPNPKNCSWAQGLNFQKPETFEHLFIKHTASVTCGPLLLEPETISEDISVDTSWKNKDEMMPTTVVSLLSTTDLEKGSVCISDQFNSVNFSEAEGTEVTYEDESQRQPFVKYATLISNSKPSETGEEQGLINSSVTKCFSSKNSPLKDSFSNSSWEIEAQAFFILSDQHPNIISPHLTFSEGLDELLKLEGNFPEENNDKKSIYYLGVTSIKKRESGVLLTDKSRVSCPFPAPCLFTDIRVLQDSCSHFVENNINLGTSSKKTFASYMPQFQTCSTQTHKIMENKMCDLTV

SEQ ID NO: 88 - protein, 1278 aa, Human
PTLPFLNSPSSSLTLKPSCITMASCSFTRDQATRRLRGAAAAAAAALAAVVTTPLLSSGTPTALIGTGSSCPGAMWLSTATGSRSDSESEEEDLPVGEEVCKRGYLRKQKHGHRRYFVLKLETADAPARLEYYENARKFRHSVRAAAAAAAAAASGAAIPPLIPPRRVITLYQCFSVSQRADARYRHLIALFTQDEYFAMVAENESEQESWYLLLSRLILESKRRRCGTLGAQPDGEPAALAAAAAAEPPFYKDVWQVIVKPRGLGHRKELSGVFRLCLTDEEVVFVRLNTEVASVVVQLLSIRRCGHSEQYFFLEVGRSTVIGPGELWMQVDDCVVAQNMHELFLEKMRALCADEYRARCRSYSISIGAHLLTLLSARRHLGLVPLEPGGWLRRSRFEQFCHLRAIGDGEDEMLFTRRFVTPSEPVAHSRRGRLHLPRGRRSRRAVSVPASFFRRLAPSPARPRHPAEAPNNGARLSSEVSGSGSGNFGEEGNPQGKEDQEGSGGDYMPMNNWGSGNGRGSGGGQGSNGQGSSSHSSGGNQCSGEGQGSRGGQGSNGQGSGGNQCSRDGQGTAGGHGSGGGQRPGGGHGSGGGQGPGDGHGSGGGKNSGGGKGSGSGKGSDGDGERGKSLKKRSYFGKLTQSKQQQMPPPPPPPPPPPPAGGTGGKGKSGGRFRLYFCVDRGATKECKEAKEVKDAEIPEGAARGPHRARAFDEDEDDPYVPMRPGVATPLVSSSDYMPMAPQNVSASKKRHSRSPFEDSRGYMMMFPRVSPPPAPSPPKAPDTNKEDDSKDNDSESDYMFMAPGAGAIPKNPRNPQGGSSSKSWSSYFSLPNPFRSSPLGQNDNSEYVPMLPGKFLGRGLDKEVSYNWDPKDAASKPSGEGSFSKPGDGGSPSKPSDHEPPKNKAKRPNRLSFITKGYKIKPKPQKPTHEQREADSSSDYVNMDFTKRESNTPAPSTQGLPDSWGIIAEPRQSAFSNYVNVEFGVPFPNPANDLSDLLRAIPRANPLSLDSARWPLPPLPLSATGSNAIEEEGDYIEVIFNSAMTPAMALADSAIRYDAETGRIYVVDPFSECCMDISLSPSRCSEPPPVARLLQEEEQERRRPQSRSQSFFAAARAAVSAFPTDSLERDLSPSSAPAVASAAEPTLALSQVVAAASALAAAPGIGAAAAAAGFDSASARWFQPVANAADAEAVRGAQDVAGGSNPGAHNPSANLARGDNQAGGAAAAAAAPEPPPRSRRVPRPPEREDSDNDDDTHVRMDFARRDNQFDSPKRGR

SEQ ID NO: 89 - protein, 647 aa, Human
IVTRGVCVAEEAGGTVYPQRGTMPGTKRFQHVIETPEPGKWELSGYEAAVPITEKSNPLTQDLDKADAENIVRLLGQCDAEIFQEEGQALSTYQRLYSESILTTMVQVAGKVQEVLKEPDGGLVVLSGGGTSGRMAFLMSVSFNQLMKGLGQKPLYTYLIAGGDRSVVASREGTEDSALHGIEELKKVAAGKKRVIVIGISVGLSAPFVAGQMDCCMNNTAVFLPVLVGFNPVSMARNDPIEDWSSTFRQVAERMQKMQEKQKAFVLNPAIGPEGLSGSSRMKGGSATKILLETLLLAAHKTVDQGIAASQRCLLEILRTFERAHQVTYSQSPKIATLMKSVSTSLEKKGHVYLVGWQTLGIIAIMDGVECIHTFGADFRDVRGFLIGDHSDMFNQKAELTNQGPQFTFSQEDFLTSILPSLTEIDTVVFIFTLDDNLTEVQTIVEQVKEKTNHIQALAHSTVGQTLLIPLKKLFPSIISITWPLLFFEYEGNFIQKFQRELSTKWVLNTVSTGAHVLLGKILQNHMLDLRISNSKLFWRALAMLQRFSGQSKARCIESLLRAIHFPQPLSDDIRAAPISCHVQVAHEKEQVIPIALLSLLFRCSITEAQAHLAAAPSVCEAVRSALAGPGQKRTADPLEILEPDVQ

SEQ ID NO: 90 - protein, 438 aa, Human
QLTPCIDSTLLYKYRLRSLPQPYSSAPETSMNTTDNGVNCLCAICGDRATGKHYGASSCDGCKGFFRRSIRKSHVYSCRFSRQCVVDKDKRNQCRYCRLRKCFRAGMKKEAVQNERDRISTRRSTFDGSNIPSINTLAQAEVRSRQISVSSPGSSTDINVKKIASIGDVCESMKQQLLVLVEWAKYIPAFCELPLDDQVALLRAHAGEHLLLGATKRSMIYKDILLLGNNYVIHRNSCEVEISRVANRVLDELVRPFQEIQIDDNEYACLKAIVFFDPDAKGLSDPVKIKNMRFQVQIGLEDYINDRQYDSRGRFGELLLLLPTLQSITWQMIEQIQFVKLFGMVKIDNLLQEMLLGGASNDGSHLHHPMHPHLSQDPLTGQTILLGPMSTLVHADQISTPETPLPSPPQGSGQEQYKIAANQASVISHQHLSKQKQL

SEQ ID NO: 91 - protein, 404 aa, Human
GNCRSKMWLLLTMASLISVLGTTHGLFGKLHPGSPEVTMNISQMITYWGYPNEEYEVVTEDGYILEVNRIPYGKKNSGNTGQRPVVFLQHGLLASATNWISNLPNNSLAFILADAGYDVWLGNSRGNTWARRNLYYSPDSVEFWAFSFDEMAKYDLPATIDFIVKKAGQKQLHYVGHSQGTTIGFIAFSTNPSLAKRIKTFYALAPVATVKYTKSLINKLRFVPQSLFKFIFGDKIFYPHNFFDQFLATEVCSREMLNLLCSNALFIICGFDSKNFNTSRLDVYLSHNPAGTSVQNMFHWTQAVKSGKFQAYDWGSPVQNRMHYDQSQPPYYNVTAMNVPIAVWNGGKDLLADPQDVGLLLPKLPNLIYHKEIPFYNHLDFIWAMDAPQEVYNDIVSMISEDKK

SEQ ID NO: 92 - protein, 499 aa, Human
ITAMGTQKVTPALIFAITVATIGSFQFGYNTGVINAPEKIIKEFINKTLTDKGNAPPSEVLLTSLWSLSVAIFSVGGMIGSFSVGLFVNRFGRRNSMLIVNLLAVTGGCFMGLCKVAKSVEMLILGRLVIGLFCGLCTGFVPMYIGEISPTALRGAFGTLNQLGIVVGILVAQIFGLEFILGSEELWPLLLGFTILPAILQSAALPFCPESPRFLLINRKEEENAKQILQRLWGTQDVSQDIQEMKDESARMSQEKQVTVLELFRVSSYRQPIIISIVLQLSQQLSGINAVFYYSTGIFKDAGVQEPIYATIGAGVVNTIFTVVSLFLVERAGRRTLHMIGLGGMAFCSTLMTVSLLLKDNYNGMSFVCIGAILVFVAFFEIGPGPIPWFIVAELFSQGPRPAAMAVAGCSNWTSNFLVGLLFPSAAHYLGAYVFIIFTGFLITFLAFTFFKVPETRGRTFEDITRAFEGQAHGADRSGKDGVMEMNSIEPAKETTTNV

SEQ ID NO: 93 - protein, 510 aa, Human
AALCPSRASMEQQDQSMKEGRLTLVLALATLIAAFGSSFQYGYNVAAVNSPALLMQQFYNETYYGRTGEFMEDFPLTLLWSVTVSMFPFGGFIGSLLVGPLVNKFGRKGALLFNNIFSIVPAILMGCSRVATSFELIIISRLLVGICAGVSSNVVPMYLGELAPKNLRGALGVVPQLFITVGILVAQIFGLRNLLANVDGWPILLGLTGVPAALQLLLLPFFPESPRYLLIQKKDEAAAKKALQTLRGWDSVDREVAEIRQEDEAEKAAGFISVLKLFRMRSLRWQLLSIIVLMGGQQLSGVNAIYYYADQIYLSAGVPEEHVQYVTAGTGAVNVVMTFCAVFVVELLGRRLLLLLGFSICLIACCVLTAALALQDTVSWMPYISIVCVISYVIGHALGPSPIPALLITEIFLQSSRPSAFMVGGSVHWLSNFTVGLIFPFIQEGLGPYSFIVFAVICLLTTIYIFLIVPETKAKTFIEINQIFTKMNKVSEVYPEKEELKELPPVTSEQ

SEQ ID NO: 94 - protein, 396 aa, Human
GLSPSAQTEVQWHNHSSLQPRPSRLKRFSHLSLSSCWDHRSLCMASSWPPLELQSSNQSQLFPQNATACDNAPEAWDLLHRVLPTFIISICFFGLLGNLFVLLVFLLPRRQLNVAEIYLANLAASDLVFVLGLPFWAENIWNQFNWPFGALLCRVINGVIKANLFISIFLVVAISQDRYRVLVHPMASRRQQRRRQARVTCVLIWVVGGLLSIPTFLLRSIQAVPDLNITACILLLPHEAWHFARIVELNILGFLLPLAAIVFFNYHILASLRTREEVSRTRCGGRKDSKTTALILTLVVAFLVCWAPYHFFAFLEFLFQVQAVRGCFWEDFIDLGLQLANFFAFTNSSLNPVIYVFVGRLFRTKVWELYKQCTPKSLAPISSSHRKEIFQLFWRN

SEQ ID NO: 95 - protein, 517 aa, Human
AGERRSHARRHPRTRRSQSHQRSAAMEPSSKKLTGRLMLAVGGAVLGSLQFGYNTGVINAPQKVIEEFYNQTWVHRYGESILPTTLTTLWSLSVAIFSVGGMIGSFSVGLFVNRFGRRNSMLMMNLLAFVSAVLMGFSKLGKSFEMLILGRFIIGVYCGLTTGFVPMYVGEVSPTALRGALGTLHQLGIVVGILIAQVFGLDSIMGNKDLWPLLLSIIFIPALLQCIVLPFCPESPRFLLINRNEENRAKSVLKKLRGTADVTHDLQEMKEESRQMMREKKVTILELFRSPAYRQPILIAVVLQLSQQLSGINAVFYYSTSIFEKAGVQQPVYATIGSGIVNTAFTVVSLFVVERAGRRTLHLIGLAGMAGCAILMTIALALLEQLPWMSYLSIVAIFGFVAFFEVGPGPIPWFIVAELFSQGPRPAAIAVAGFSNWTSNFIVGMCFQYVEQLCGPYVFIIFTVLLVLFFIFTYFKVPETKGRTFDEIASGFRQGGASQSDKTPEELFHPLGADSQV

SEQ ID NO: 96 - protein, 1377 aa, Human
ERGISSQIKGMKSGSGGGSPTSLWGLLFLSAALSLWPTSGEICGPGIDIRNDYQQLKRLENCTVIEGYLHILLISKAEDYRSYRFPKLTVITEYLLLFRVAGLESLGDLFPNLTVIRGWKLFYNYALVIFEMTNLKDIGLYNLRNITRGAIRIEKNADLCYLSTVDWSLILDAVSNNYIVGNKPPKECGDLCPGTMEEKPMCEKTTINNEYNYRCWTTNRCQKMCPSTCGKRACTENNECCHPECLGSCSAPDNDTACVACRHYYYAGVCVPACPPNTYRFEGWRCVDRDFCANILSAESSDSEGFVIHDGECMQECPSGFIRNGSQSMYCIPCEGPCPKVCEEEKKTKTIDSVTSAQMLQGCTIFKGNLLINIRRGNNIASELENFMGLIEVVTGYVKIRHSHALVSLSFLKNLRLILGEEQLEGNYSFYVLDNQNLQQLWDWDHRNLTIKAGKMYFAFNPKLCVSEIYRMEEVTGTKGRQSKGDINTRNNGERASCESDVLHFTSTTTSKNRIIITWHRYRPPDYRDLISFTVYYKEAPFKNVTEYDGQDACGSNSWNMVDVDLPPNKDVEPGILLHGLKPWTQYAVYVKAVTLTMVENDHIRGAKSEILYIRTNASVPSIPLDVLSASNSSSQLIVKWNPPSLPNGNLSYYIVRWQRQPQDGYLYRHNYCSKDKIPIRKYADGTIDIEEVTENPKTEVCGGEKGPCCACPKTEAEKQAEKEEAEYRKVFENFLHNSIFVPRPERKRRDVMQVANTTMSSRSRNTTAADTYNITDPEELETEYPFFESRVDNKERTVISNLRPFTLYRIDIHSCNHEAEKLGCSASNFVFARTMPAEGADDIPGPVTWEPRPENSIFLKWPEPENPNGLILMYEIKYGSQVEDQRECVSRQEYRKYGGAKLNRLNPGNYTARIQATSLSGNGSWTDPVFFYVQAKTGYENFIHLIIALPVAVLLIVGGLVIMLYVFHRKRNNSRLGNGVLYASVNPEYFSAADVYVPDEWEVAREKITMSRELGQGSFGMVYEGVAKGVVKDEPETRVAIKTVNEAASMRERIEFLNEASVMKEFNCHHVVRLLGVVSQGQPTLVIMELMTRGDLKSYLRSLRPEMENNPVLAPPSLSKMIQMAGEIADGMAYLNANKFVHRDLAARNCMVAEDFTVKIGDFGMTRDIYETDYYRKGGKGLLPVRWMSPESLKDGVFTTYSDVWSFGVVLWEIATLAEQPYQGLSNEQVLRFVMEGGLLDKPDNCPDMLFELMRMCWQYNPKMRPSFLEIISSIKEEMEPGFREVSFYYSEENKLPEPEELDLEPENMESVPLDPSASSSSLPLPDRHSGHKAENGPGPGVLVLRASFDERQPYAHMNGGRKNERALPLPQSSTC

SEQ ID NO: 97 - protein, 1316 aa, Human
SARKLRSGSLLGSAAASSFSCPSPARGAAWISESGFLLPPALFACAGPRRGASAPHPVVFRSLPLLSVGGGGGSMASPPESDGFSDVRKVGYLRKPKSMHKRFFVLRAASEAGGPARLEYYENEKKWRHKSSAPKRSIPLESCFNINKRADSKNKHLVALYTRDEHFAIAADSEAEQDSWYQALLQLHNRAKGHHDGAAALGAGGGGGSCSGSSGLGEAGEDLSYGDVPPGPAFKEVWQVILKPKGLGQTKNLIGIYRLCLTSKTISFVKLNSEAAAVVLQLMNIRRCGHSENFFFIEVGRSAVTGPGEFWMQVDDSVVAQNMHETILEAMRAMSDEFRPRSKSQSSSNCSNPISVPLRRHHLNNPPPSQVGLTRRSRTESITATSPASMVGGKPGSFRVRASSDGEGTMSRPASVDGSPVSPSTNRTHAHRHRGSARLHPPLNHSRSIPMPASRCSPSATSPVSLSSSSTSGHGSTSDCLFPRRSSASVSGSPSDGGFISSDEYGSSPCDFRSSFRSVTPDSLGHTPPARGEEELSNYICMGGKGPSTLTAPNGHYILSRGGNGHRCTPGTGLGTSPALAGDEAASAADLDNRFRKRTHSAGTSPTITHQKTPSQSSVASIEEYTEMMPAYPPGGGSGGRLPGHRHSAFVPTRSYPEEGLEMHPLERRGGHHRPDSSTLHTDDGYMPMSPGVAPVPSGRKGSGDYMPMSPKSVSAPQQIINPIRRHPQRVDPNGYMMMSPSGGCSPDIGGGPSSSSSSSNAVPSGTSYGKLWTNGVGGHHSHVLPHPKPPVESSGGKLLPCTGDYMNMSPVGDSNTSSPSDCYYGPEDPQHKPVLSYYSLPRSFKHTQRPGEPEEGARHQHLRLSTSSGRLLYAATADDSSSSTSSDSLGGGYCGARLEPSLPHPHHQVLQPHLPRKVDTAAQTNSRLARPTRLSLGDPKASTLPRAREQQQQQQPLLHPPEPKSPGEYVNIEFGSDQSGYLSGPVAFHSSPSVRCPSQLQPAPREEETGTEEYMKMDLGPGRRAAWQESTGVEMGRLGPAPPGAASICRPTRAVPSSRGDYMTMQMSCPRQSYVDTSPAAPVSYADMRTGIAAEEVSLPRATMAAASSSSAASASPTGPQGAAELAAHSSLLGGPQGPGGMSAFTRVNLSPNRNQSAKVIRADPQGCRRRHSSETFSSTPSATRVGNTVPFGAGAAVGGGGGSSSSSEDVKRHSSASFENVWLRPGELGGAPKEPAKLCGAAGGLENGLNYIDLDLVKDFKQCPQECTPEPQPPPPPPPHQPLGSGESSSTRRSSEDLSAYASISFQKQPEDRQ

SEQ ID NO: 98 - protein, 1674 aa, Human
APVSQTQEPARWQKGNDEKTWNLGLSNAKLSYYDGMIQLNYRGGTPYNNERHTPRATLITFLCDRDAGVGFPEYQEEDNSTYNFRWYTSYACPEEPLECVVTDPSTLEQYDLSSLAKSEGGLGGNWYAMDNSGEHVTWRKYYINVCRPLNPVPGCNRYASACQMKYEKDQGSFTEVVSISNLGMAKTGPVVEDSGSLLLEYVNGSACTTSDGRQTTYTTRIHLVCSRGRLNSHPIFSLNWECVVSFLWNTEAACPIQTTTDTDQACSIRDPNSGFVFNLNPLNSSQGYNVSGIGKIFMFNVCGTMPVCGTILGKPASGCEAETQTEELKNWKPARPVGIEKSLQLSTEGFITLTYKGPLSAKGTADAFIVRFVCNDDVYSGPLKFLHQDIDSGQGIRNTYFEFETALACVPSPVDCQVTDLAGNEYDLTGLSTVRKPWTAVDTSVDGRKRTFYLSVCNPLPYIPGCQGSAVGSCLVSEGNSWNLGVVQMSPQAAANGSLSIMYVNGDKCGNQRFSTRITFECAQISGSPAFQLQDGCEYVFIWRTVEACPVVRVEGDNCEVKDPRHGNLYDLKPLGLNDTIVSAGEYTYYFRVCGKLSSDVCPTSDKSKVVSSCQEKREPQGFHKVAGLLTQKLTYENGLLKMNFTGGDTCHKVYQRSTAIFFYCDRGTQRPVFLKETSDCSYLFEWRTQYACPPFDLTECSFKDGAGNSFDLSSLSRYSDNWEAITGTGDPEHYLINVCKSLAPQAGTEPCPPEAAACLLGGSKPVNLGRVRDGPQWRDGIIVLKYVDGDLCPDGIRKKSTTIRFTCSESQVNSRPMFISAVEDCEYTFAWPTATACPMKSNEHDDCQVTNPSTGHLFDLSSLSGRAGFTAAYSEKGLVYMSICGENENCPPGVGACFGQTRISVGKANKRLRYVDQVLQLVYKDGSPCPSKSGLSYKSVISFVCRPEAGPTNRPMLISLDKQTCTLFFSWHTPLACEQATECSVRNGSSIVDLSPLIHRTGGYEAYDESEDDASDTNPDFYINICQPLNPMHGVPCPAGAAVCKVPIDGPPIDIGRVAGPPILNPIANEIYLNFESSTPCLADKHFNYTSLIAFHCKRGVSMGTPKLLRTSECDFVFEWETPVVCPDEVRMDGCTLTDEQLLYSFNLSSLSTSTFKVTRDSRTYSVGVCTFAVGPEQGGCKDGGVCLLSGTKGASFGRLQSMKLDYRHQDEAVVLSYVNGDRCPPETDDGVPCVFPFIFNGKSYEECIIESRAKLWCSTTADYDRDHEWGFCRHSNSYRTSSIIFKCDEDEDIGRPQVFSEVRGCDVTFEWKTKVVCPPKKLECKFVQKHKTYDLRLLSSLTGSWSLVHNGVSYYINLCQKIYKGPLGCSERASICRRTTTGDVQVLGLVHTQKLGVIGDKVVVTYSKGYPCGGNKTASSVIELTCTKTVGRPAFKRFDIDSCTYYFSWDSRAACAVKPQEVQMVNGTITNPINGKSFSLGDIYFKLFRASGDMRTNGDNYLYEIQLSSITSSRNPACSGANICQVKPNDQHFSRKVGTSDKTKYYLQDGDLDVVFASSSKCGKDKTKSVSSTIFFHCDPLVEDGIPEFSHETADCQYLFSWYTSAVCPLGSWEASTGGWALTARIPGTTGRCTRGCQNGARQSARCSACCWWRSPAACWPCCSTRRRGGKQ

SEQ ID NO: 99 - protein, 314 aa, Human
IGHRHPIQRASAAAPPPPSQRALATAPPSLAQSLGHRPPPPAQRASAPVCCSRLEMSEVPVARVWLVLLLLTVQVGVTAGAPWQCAPCSAEKLALCPPVSASCSEVTRSAGCGCCPMCALPLGAACGVATARCARGLSCRALPGEQQPLHALTRGQGACVQESDASAPHAAEAGSPESPESTEITEEELLDNFHLMAPSEEDHSILWDAISTYDGSKALHVTNIKKWKEPCRIELYRVVESLAKAQETSGEEISKFYLPNCNKNGFYHSRQCETSMDGEAGLCWCVYPWNGKRIPGSPEIRGDPNCQIYFNVQN

SEQ ID NO: 100 - protein, 255 aa, Human
LASFRSWMAWDMCNQDSESVWSDIECAALVGEDQPLCPDLPELDLSELDVNDLDTDSFLGGLKWCSDQSEIISNQYNNEPSNIFEKIDEENEANLLAVLTETLDSLPVDEDGLPSFDALTDGDVTTDNEASPSSMPDGTPPPQEAEEPSLTENSWSNKAKSICQQQKPQRRPCSELLKYLTTNDDPPHTKPTENRNSSRDKCTSKKKSHTQSQSQHLQVCFYKCAISSSDPKGSPFENKTIERTLSVELSGTAGK

SEQ ID NO: 101 - protein, 579 aa, Human
VGSDTFYSFKYEIKEGDCPVQSGKTWQDCEYKDAAKAATGECTATVGKRSSTKFSVATQTCQITPAEGPVVTAQYDCLGCVHPISTQSPDLEPILRHGIQYFNNNTQHSSLFTLNEVKRAQRQVVAGLNFRITYSIVQTNCSKENFLFLTPDCKSLWNGDTGECTDNAYIDIQLRIASFSQNCDIYPGKDFVQPPTKICVGCPRDIPTNSPELEETLTHTITKLNAENNATFYFKIDNVKKARVQVVAGKKYFIDFVARETTCSKESNEELTESCETKKLGQSLDCNAEVYVVPWEKKIYPTVNCQPLGMISLMKRPPGFSPFRSSRIGEIKEETTVSPPHTSMAPAQDEERDSGKEQGHTRRHDWGHEKQRKHNLGHGHKHERDQGHGHQRGHGLGHGHEQQHGLGHGHKFKLDDDLEHQGGHVLDHGHKHKHGHGHGKHKNKGKKNGKHNGWKTEHLASSSEDSTTPSAQTQEKTEGPTPIPSLAKPGVTVTFSDFQDSDLIATMMPPISPAPIQSDDDWIPDIQIDPNGLSFNPISDFPDTTSPKCPGRPWKSVSEINPTTQMKESYYFDLTDGLS

SEQ ID NO: 102 - protein, 362 aa, Human
VGSDTFYSFKYEIKEGDCPVQSGKTWQDCEYKDAAKAATGECTATVGKRSSTKFSVATQTCQITPAEGPVVTAQYDCLGCVHPISTQSPDLEPILRHGIQYFNNNTQHSSLFTLNEVKRAQRQVVAGLNFRITYSIVQTNCSKENFLFLTPDCKSLWNGDTGECTDNAYIDIQLRIASFSQNCDIYPGKDFVQPPTKICVGCPRDIPTNSPELEETLTHTITKLNAENNATFYFKIDNVKKARVQVVAGKKYFIDFVARETTCSKESNEELTESCETKKLGQSLDCNAEVYVVPWEKKIYPTVNCQPLGMISLMKRPPGFSPFRSSRIGEIKEETTSHLRSCEYKGRPPKAGAEPASEREVS

SEQ ID NO: 103 - protein, 1674 aa, Human; identical to SEQ ID NO: 98

SEQ ID NO: 104 - protein, 362 aa, Human; identical to SEQ ID NO: 102

SEQ ID NO: 105 - protein, 579 aa, Human
VGSDTFYSFKYEIKEGDCPVQSGKTWQDCEYKDAAKAATGECTATVGKRSSTKFSVATQTCQITPAEGPVVTAQYDCLGCVHPISTQSPDLEPILRHGIQYFNNNTQHSSLFTLNEVKRAQRQVVAGLNFRITYSIVQTNCSKENFLFLTPDCKSLWNGDTGECTDNAYIDIQLRIASFSQNCDIYPGKDFVQPPTKICVGCPRDIPTNSPELEETLTHTITKLNAENNATFYFKIDNVKKARVQVVAGKKYFIDFVARETTCSKESNEELTESCETKKLGQSLDCNAEVYVVPWEKKIYPTVNCQPLGMISLMKRPPGFSPFRSSRIGEIKEETTVSPPHTSMAPAQDEERDSGKEQGHTRRHDWGHEKQRKHNLGHGHKHERDQGHGHQRGHGLGHGHEQQHGLGHGHKFKLDDDLEHQGGHVLDHGHKHKHGHGHGKHKNKGKKNGKHNGWKTEHLASSSEDSTTPSAQTQEKTEGPTPIPSLAKPGVTVTFSDFQDSDLIATMMPPISPAPTQSDDDWIPDIQIDPNGLSFNPISDFPDTTSPKCPGRPWKSVSEINPTTQMKESYYFDLTDGLS

SEQ ID NO: 106 - protein, 1277 aa, Human
FFVLRGPGAGGDEATAGGGSAPQPPRLEYYESEKKWRSKAGAPKRVIALDCCLNINKRADAKHKYLIALYTKDEYFAVAAENEQEQEGWYRALTDLVSEGRAAAGDAPPAAAPAASCSASLPGALGGSAGAAGAEDSYGLVAPATAAYREVWQVNLKPKGLGQSKNLTGVYRLCLSARTIGFVKLNCEQPSVTLQLMNIRRCGHSDSFFFIEVGRSAVTGPGELWMQADDSVVAQNIHETILEAMKALKELFEFRPRSKSQSSGSSATHPISVPGARRHHHLVNLPPSQTGLVRRSRTDSLAATPPAAKCSSCRVRTASEGDGGAAAGAAAAGARPVSVAGSPLSPGPVRAPLSRSHTLSGGCGGRGSKVALLPAGGALQHSRSMSMPVAHSPPAATSPGSLSSSSGHGSGSYPPPPGPHPPLPHPLHHGPGQRPSSGSASASGSPSDPGFMSLDEYGSSPGDLRAFCSHRSNTPESIAETPPARDGGGGGEFYGYMTMDRPLSHCGRSYRRVSGDAAQDLDRGLRKRTYSLTTPARQRPVPQPSSASLDEYTLMRATFSGSAGRLCPSCPASSPKVAYHPYPEDYGDIEIGSHRSSSSNLGADDGYMPMTPGAALAGSGSGSCRSDDYMPMSPASVSAPKQILQPRAAAAAAAAVPSAGPAGPAPTSAAGRTFPASGGGYKASSPAESSPEDSGYMRMWCGSKLSMEHADGKLLPNGDYLNVSPSDAVTTGTPPDFFSAALHPGGEPLRGVPGCCYSSLPRSYKAPYTCGGDSDQYVLMSSPVGRILEEERLEPQATPGPSQAASAFGAGPTQPPHPVVPSPVRPSGGRPEGFLGQRGRAVRPTRLSLEGLPSLPSMHEYPLPPEPKSPGEYINIDFGEPGARLSPPAPPLLASAASSSSLLSASSPASSLGSGTPGTSSDSRQRSPLSDYMNLDFSSPKSPKPGAPSGHPVGSLDGLLSPEASSPYPPLPPRPSASPSSSLQPPPPPPAPGELYRLPPASAVATAQGPGAASSLSSDTGDNGDYTEMAFGVAATPPQPIAAPPKPEAARVASPTSGVKRLSLMEQVSGVEAFLQASQPPDPHRGAKVIRADPQGGRRRHSSETFSSTTTVTPVSPSFAHNPKRHNSASVENVSLRKSSEGGVGVGPGGGDEPPTSPRQLQPAPPLAPQGRPWTPGQPGGLVGCPGSGGSPMRRETSAGFQNGLNYIAIDVREEPGLPPQPQPPPPPLPQPGDKSSWGRTRSLGGLISAVGVGSTGGGCGGPGPGALPPANTYASI

SEQ ID NO: 107 - protein, 485 aa, Human
PGISLRTRFRRWQRWPSPELPAMAGAPGPLRLALLLLGMVGRAGPRPQGATVSLWETVQKWREYRRQCQRSLTEDPPPATDLFCNRTFDEYACWPDGEPGSFVNVSCPWYLPWASSVPQGHVYRFCTAEGLWLQKDNSSLPWRDLSECEESKRGERSSPEEQLLFLYIIYTVGYALSFSALVIASAILLSFRHLHCTRNYIHLNLFASFILRALSVFIKDAALKWMYSTAAQQHQWDGLLSYQDSLSCRLVFLLMQYCVAANYYWLLVEGVYLYTLLAFSVFSEQWIFRLYVSIGWGVPLLFVVPWGIVKYLYEDEGCWTRNSNMNYWLIIRLPILFAIGVNFLIFVRVICIVVSKLKANLMCKTDIKCRLAKSTLTLIPLLGTHEVIFAFVMDEHARGTLRFIKLFTELSFTSFQGLMVAILYCFVNNEVQLEFRKSWERWRLEHLHIQRDSSMKPLKCPTSSLSSGATAGSSMYTATCQASCS

SEQ ID NO: 108 - protein, 178 aa, Human
FRPKKPILGRKMHWGTLCGFLWLWPYLFYVQAVPIQKVQDDTKTLIKTIVTRINDISHTQSVSSKQKVTGLDFIPGLHPILTLSKMDQTLAVYQQILTSMPSRNVIQISNDLENLRDLLHVLAFSKSCHLPWASGLETLDSLGGVLEASGYSTEVVALSRLQGSLQDMLWQLDLSPGC

SEQ ID NO: 109 - protein, 209 aa, Human
DQHQGPGGAEGQEGAPVPMPVGQRVSCRQVGCAVPHGGHSGPEPAVLLHPRQRGQLPDGPGRRGEGQSQIPRAAGLLLLLRTSGERNQRPIPAPLRAPGPPLLPLLAHLPADRWPPHYRHGEEQPVPVHPGGPEVEPSIHAIPLVRAQGTGWAPRAAPHLQHNAFSTCPPTLPVQSTLSSVAGLTFEKSFCEVIACSRMYSGSPMPWRP

SEQ ID NO: 110 - protein, 507 aa, Human
LGLTPPTTPPHKANQDNPFRASPKLKSSCKTVVPPPSKKPRYSESSGTQGNNSTKKGPEQSELYAQLSKSSVLTGGHEERKTKRPSLRLFGDHDYCQSINSKTEILINISQELQDSRQLENKDVSSDWQGQICSSTDSDQCYLRETLEASKQVSPCSTRKQLQDQEIRAELNKHFGHPSQAVFDDEADKTGELRDSDFSNEQFSKLPMFINSGLAMDGLFDDSEDESDKLSYPWDGTQSYSLFNVSPSCSSFNSPCRDSVSPPKSLFSQRPQRMRSRSRSFSRHRSCSRSPYSRSRSRSPGSRSSSRSCYYYESSHYRHRTHRNSPLYVRSRSRSPYSRRPRYDSYEEYQHERLKREEYRREYEKRESERAKQRERQRQKAIEERRVIYVGKIRPDTTRTELRDRFEVFGEIEECTVNLRDDGDSYGFITYRYTCDAFAALENGYTLRRSNETDFELYFCGRKQFFKSNYADLDSNSDDFDPASTKSKYDSLDFDSLLKEAQRSLRR

SEQ ID NO: 111 - protein, 469 aa, Human; identical to SEQ ID NO: 82

SEQ ID NO: 112 - protein, 473 aa, Human
SGTLDRMLIFWTITLFLLGAAKGKEVCYEDLGCFSDTEPWGGTAIRPLKILPWSPEKIGTRFLLYTNENPNNFQILLLSDPSTIEASNFQMDRKTRFIIHGFIDKGDESWVTDMCKKLFEVEEVNCICVDWKKGSQATYTQAANNVRVVGAQVAQMLDILLTEYSYPPSKVHLIGHSLGAHVAGEAGSKTPGLSRITGLDPVEASFESTPEEVRLDPSDADFVDVIHTDAAPLIPFLGFGTNQQMGHLDFFPNGGESMPGCKKNALSQIVDLDGIWAGTRDFVACNHLRSYKYYLESILNPDGFAAYPCTSYKSFESDKCFPCPDQGCPQMGHYADKFAGRTSEEQQKFFLNTGEASNFARWRYGVSITLSGRTATGQIKVALFGNKGNTHQYSIFRGILKPGSTHSYEFDAKLDVGTIEKVKFLWNNNVINPTLPKVGATKITVQKGEEKTVYNFCSEDTVREDTLLTLTPC

SEQ ID NO: 113 - protein, 493 aa, Human
RGGGVGRRPTRRHLWSSAVAAAAVAAATAAVKEEEEPSGRWHRGLTMDEEYDVIVLGTGLTECILSGIMSVNGKKVLHMDRNPYYGGESSSITPLEELYKRFQLLEGPPESMGRGRDWNVDLIPKFLMANGQLVKMLLYTEVTRYLDFKVVEGSFVYKGGKIYKVPSTETEALASNLMGMFEKRRFRKFLVFVANFDENDPKTFEGVDPQTTSMRDVYRKFDLGQDVIDFTGHALALYRTDDYLDQPCLETVNRIKLYSESLARYGKSPYLYPLYGLGELPQGFARLSAIYGGTYMLNKPVDDIIMENGKVVGVKSEGEVARCKQLICDPSYIPDRVRKAGQVIRIICILSHPIKNTNDANSCQIIIPQNQVNRKSDIYVCMISYAHNVAAQGKYIAIASTTVETTDPEKEVEPALELLEPIDQKFVAISDLYEPIDDGCESQVFCSCSYDATTHFETTCNDIKDIYKRMAGTAFDFENMKRKQNDVFGEAEQ

SEQ ID NO: 114 - protein, 511 aa, Human
DEMPSGFQQIGSEDGEPPQQRVTGTLVLAVFSAVLGSLQFGYNIGVINAPQKVIEQSYNETWLGRQGPEGPSSIPPGTLTTLWALSVAIFSVGGMISSFLIGIISQWLGRKRAMLVNNVLAVLGGSLMGLANAAASYEMLILGRFLIGAYSGLTSGLVPMYVGEIAPTHLRGALGTLNQLAIVIGILIAQVLGLESLLGTASLWPLLLGLTVLPALLQLVLLPFCPESPRYLYIIQNLEGPARKSLKRLTGWADVSGVLAELKDEKRKLERERPLSLLQLLGSRTHRQPLIIAVVLQLSQQLSGINAVFYYSTSIFETAGVGQPAYATIGAGVVNTVFTLVSVLLVERAGRRTLHLLGLAGMCGCAILMTVALLLLERVPAMSYVSIVAIFGFVAFFEIGPGPIPWFIVAELFSQGPRPAAMAVAGFSNWTSNFIIGMGFQYVAEAMGPYVFLLFAVLLLGFFIFTFLRVPETRGRTFDQISAAFHRTPSLLEQEVKPSTELEYLGPDEND

SEQ ID NO: 115 - protein, 495 aa, Human
SMHLNRQVIISHYRHVLGVPLDDRKAINNYVINSTDELPTISYSMNPKPTPWAEEETVAAAQLITMLWSLSVSSFAVGGMTASFFGGWLGDTLGRIKAMLVANILSLVGALLMGFSKLGPSHILIIAGRSISGLYCGLISGLVPMYIGEIAPTALRGALGTFHQLAIVTGILISQIIGLEFILGNYDLWHILLGLSGVRAILQSLLLFFCPESPRYLYIKLDEEVKAKQSLKRLRGYDDVTKDINEMRKEREEASSEQKVSIIQLFTNSSYRQPILVALMLHVAQQFSGINGIFYYSTSIFQTAGISKPVYATIGVGAVNMVFTAVSVFLVEKAGRRSLFLIGMSGMFVCAIFMSVGLVLLNKFSWMSYVSMIAIFLFVSFFEIGPGPIPWFMVAEFFSQGPRPAALAIAAFSNWTCNFIVALCFQYIADFCGPYVFFLFAGVLLAFTLFTFFKVPETKGKSFEEIAAEFQKKSGSAHRPKAAVEMKFLGATETV

SEQ ID NO: 116 - protein, 494 aa, Human
FPAPALPPPRQPGRWPWTAGPRPAPAGTMVFLSGNASDSSNCTQPPAPVNISKAILLGVILGGLILFGVLGNILVILSVACHRHLHSVTHYYIVNLAVADLLLTSTVLPFSAIFEVLGYWAFGRVFCNIWAAVDVLCCTASIMGLCIISIDRYIGVSYPLRYPTIVTQRRGLMALLCVWALSLVISIGPLFGWRQPAPEDETICQINEEPGYVLFSALGSFYLPLAIILVMYCRVYVVAKRESRGLKSGLKTDKSDSEQVTLRIHRKNAPAGGSGMASAKTKTHFSVRLLKFSREKKAAKTLGIVVGCFVLCWLPFFLVMPIGSFFPDFKPSETVFKIVFWLGYLNSCINPIIYPCSSQEFKKAFQNVLRIQCLCRKQSSKHALGYTLHPPSQAVEGQHKDMVRIPVGSRETFYRISKTDGVCEWKFFSSMPRGSARITVSKDQSSCTTARVRSKSFLQVCCCVGPSTPSLDKNHQVPTIKVHTISLSENGEEV

SEQ ID NO: 117 - protein, 125 aa, Human
GCIRRGHQADHCPSAMALWMRLLPLLALLALWGPDPAAAFVNQHLCGSHLVEALYLVCGERGFFYTPKTRREAEDLQVGQVELGGGPGAGSLQPLALEGSLQKRGIVEQCCTSICSLYQLENYCN

SEQ ID NO: 118 - protein, 381 aa, Human
SNHLHACQGLSGAAMKSLVLLLCLAQLWGCHSAPHGPGLIYRQPNCDDPETEEAALVAIDYINQNLPWGYKHTLNQIDEVKVWPQQPSGELFEIEIDTLETTCHVLDPTPVARCSVRQLKEHAVEGDCDFQLLKLDGKFSVVYAKCDSSPDSAEDVRKVCQDCPLLAPLNDTRVVHAAKAALAAFNAQNNGSNFQLEEISRAQLVPLPPSTYVEFTVSGTDCVAKEATEAAKCNLLAEKQYGFCKATLSEKLGGAEVAVTCTVFQTQPVTSQPQPEGANEAVPTPVVDPDAPPSPPLGAPGLPPAGSPPDSHVLLAAPPGHQLHRAHYDLRHTFMGVVSLGSPSGEVSHPRKTRTVVQPSVGAAAGPVVPPCPGRIRHFKV

SEQ ID NO: 119 - protein, 1103 aa, Human
GMELENYKQPVVLREDNCRRRRRMKPRSAAASLSSMELIPIEFVLPTSQRKCKSPETALLHVAGHGNVEQMKAQVWLRALETSVAADFYHRLGPHHFLLLYQKKGQWYEIYDKYQVVQTLDCLRYWKATHRSPGQIHLVQRHPPSEESQAFQRQLTALIGYDVTDVSNVHDDELEFTRRGLVTPRMAEVASRDPKLYAMHPWVTSKPLPEYLWKKIANNCIFIVIHRSTTSQTIKVSPDDTPGAILQSFFTKMAKKKSLMDIPESQSEQDFVLRVCGRDEYLVGETPIKNFQWVRHCLKNGEEIHVVLDTPPDPALDEVRKEEWPLVDDCTGVTGYHEQLTIHGKDHESVFTVSLWDCDRKFRVKIRGIDIPVLPRNTDLTVFVEANIQHGQQVLCQRRTSPKPFTEEVLWNVWLEFSIKIKDLPKGALLNLQIYCGKAPALSSKASAESPSSESKGKVQLLYYVNLLLIDHRFLLRRGEYVLHMWQISGKGEDQGSFNADKLTSATNPDKENSMSISILLDNYCHPIALPKHQPTPDPEGDRVRAEMPNQLRKQLEAIIATDPLNPLTAEDKELLWHFRYESLKHPKAYPKLFSSVKWGQQEIVAKTYQLLARREVWDQSALDVGLTMQLLDCNFSDENVRAIAVQKLESLEDDDVLHYLLQLVQAVKFEPYHDSALARFLLKRGLRNKRIGHFLFWFLRSEIAQSRHYQQRFAVILEAYLRGCGTAMLHDFTQQVQVIEMLQKVTLDIKSLSAEKYDVSSQVISQLKQKLENLQNSQLPESFRVPYDPGLKAGALAIEKCKVMASKKKPLWLEFKCADPTALSNETIGIIFKHGDDLRQDMLILQILRIMESIWETESLDLCLLPYGCISTGDKIGMIEIVKDATTIAKIQQSTVGNTGAFKDEVLNHWLKEKSPTEEKFQAAVERFVYSCAGYCVATFVLGIGDRHNDNIMITETGNLFHIDFGHILGNYKSFLGINKERVPFVLTPDFLFVMGTSGKKTSPHFQKFQDICVKAYLALRHHTNLLIILFSMMLMTGMPQLTSKEDIEYIRDALTVGKNEEDAKKYFLDQIEVCRDKGWTVQFNWFLHLVLGIKQGEKHSA

SEQ ID NO: 120 - protein, 543 aa, Human
KGTMPLRDETLREVWASDSGHEEESLSPEAPRRPKQRPAPAQRLRKKRTEAPESPCPTGSKPRKPGAGRRGRPREEPSPDPAQARAPQTVYARFLRDPEAKKRDPRETFLVARAPDAEDEEEEEEEDEEDEEEEAEEKKEKILLPPKKPLREKSSADLKERRAKAQGPRGDLGSPDPPPKPLRVRNKEAPAGEGTKMRKTKKKGSGEADKDPSGSPASARKSPAAMFLVGEGSPDKKALKKKGTPKGARKEEEEEEEAATVIKNSNQKGKAKGKGKKKEERAPSPPVEVDEPREFVLRPAPQGRTVRCRLTRDKKGMDRGMYPSYFLHLDTEKKVFLLAGRKRKRSKTANYLISIDPTNLSRGGENFIGKLRSNLLGNRFTVFDNGQNPQRGYSTNVASLRQELAAVIYETNVLGFRGPRRMTVIIPGMSAENERVPIRPRNASDGLLVRWQNKTLESLIELHNKPPVWNDDSGSYTLNFQGRVTQASVKNFQIVHADDPDYIVLQFGRVAEDAFTLDYRYPLCALQAFAIALSSFDGKLACE

SEQ ID NO: 121 - protein, 1316 aa, Human; identical to SEQ ID NO: 97

SEQ ID NO: 122 - protein, 1213 aa, Human
RRRGGLEGLARPSGRARVVPPAGRAGQCLAGAMNPRQGYSLSGYYTHPFQGYEHRQLRYQQPGPGSSPSSFLLKQIEFLKGQLPEAPVIGKQTPSLPPSLPGLRPRFPVLLASSTRGRQVDIRGVPRGVHLGSQGLQRGFQHPSPRGRSLPQRGVDCLSSHFQELSIYQDQEQRILKFLEELGEGKATTAHDLSGKLGTPKKEINRVLYSLAKKGKLQKEAGTPPLWKIAVSTQAWNQHSGVVRPDGHSQGAPNSDPSLEPEDRNSTSVSEDLLEPFIAVSAQAWNQHSGVVRPDSHSQGSPNSDPGLEPEDSNSTSALEDPLEFLDMAEIKEKICDYLFNVSDSSALNLAKNIGLTKARDINAVLIDMERQGDVYRQGTTPPIWHLTDKKRERMQIKRNTNSVPETAPAAIPETRRNAEFLTCNIPTSNASNNMVTTEKVENGQEPVIKLENRQEARPEPARLKPPVHYNGPSKAGYVDFENGQWATDDIPDDLNSIRAAPGEFRAIMEMPSFYSHGLPRCSPYKKLTECQLKNPISGLLEYAQFASQTCEFNMIEQSGPPHEPRFKFQVVINGREFPPAEAGSKKVAKQDAAMKAMTILLEEAKAKDSGKSEESSHYSTEKESEKTAESQTPTPSATSFFSGKSPVTTLLECMHKLGNSCEFRLLSKEGPAHEPKFQYCVAVGAQTFPSVSAPSKKVAKQMAAEEAMKALHGEATNSMASDNQVRKIGELVRYLNTNPVGGLLEYARSHGFAAEFKLVDQSGPPHEPKFVYQAKVGGRWFPAVCAHSKKQGKQEAADAALRVLIGENEKAERMGFTELPLTGSTFHDQIAMLSHRCFNTLTNSFQPSLLGRKILAAIIMKKDSEDMGVVVSLGTGNRCVKGDSLSLKGETVNDCHAEIISRRGFIRFLYSELMKYNSQTAKDSIFEPAKGGEKLQIKKTVSFHLYISTAPCGDGALFDKSCSDRAMESTESRHYPVFENPKQGKLRTKVENGEGTIPVESSDIVPTWDGIRLGERLRTMSCSDKILRWNVLGLQGALLTHFLQPIYLKSVTLGYLFSQGHLTRAICCRVTRDGSAFEDGLRHPFIVNHPKVGRVSIYDSKRQSGKTKETSVNWCLADGYDLEILDGTRGTVDGPRNELSRVSKKNIFLLFKKLCSFRYRRDLLRLSYGEAKKAARDYETAKNYFKKGLKDMGYGNWISKPQEEKNFYLCPV

SEQ ID NO: 123 - DNA, 5416 bp, Human
cggccgacaacactggcaaactcctactcatccacgaaggccctcctgggcatggtggtccttcccagcctggcagtctgttcctcacacaccttgttagtgcccagcccctgaggttgcagctgggggtgtctctgaagggctgtgagcccccaggaagccctggggaagtgcctgccttgcctccccccggccctgccagcgcctggctctgccctcctacctgggctccccccatccagcctccctccctacacactcctctcaaggaggcacccatgtcctctccagctgccgggcctcagagcactgtggcgtcctggggcagccaccgcatgtcctgctgtggcatggctcagggtggaaagggcggaagggaggggtcctgcagatagctggtgcccactaccaaacccgctcggggcaggagagccaaaggctgggtgtgtgcagagcggccccgagaggttccgaggctgaggccagggtgggacatagggatgcgaggggccggggcacaggatactccaacctgcctgcccccatggtctcatcctcctgcttctgggacctcctgatcctgcccctggtgctaagaggcaggtaggggctgcaggcagcagggctcggagcccatgccccctcaccatgggtcaggctggacctccaggtgcctgttctggggagctgggagggccggaggggtgtaccccaggggctcagcccagatgacactatgggggtgatggtgtcatgggacctggccaggagaggggagatgggctcccagaagaggagtgggggctgagagggtgcctggggggccaggacggagctgggccagtgcacagcttcccacacctgcccacccccagagtcctgccgccacccccagatcacacggaagatgaggtccgagtggcctgctgaggacttgctgcttgtccccaggtccccaggtcatgccctccttctgccaccctggggagctgagggcctcagctggggctgctgtcctaaggcagggtgggaactaggcagccagcagggaggggacccctccctcactcccactctcccacccccaccaccttggcccatccatggcggcatcttgggccatccgggactggggacaggggtcctggggacaggggtccggggacagggtcctggggacaggggtgtgaggacaggggtcccggggacaggggtgtggggacaggggtcccggggacaggggtgtggggacaggggtgtggggacaggggtccggggacaggggtgtggggacaggggtgtggggacaggggtgtggggacaggggtgtggggacaggggtgtggggacaggggtgtggggacaggggtcctggggacaggggtgtggggacaggggtgtggggacaggggtgtggggacaggggtgtggggacaggggtcctggggataggggtgtggggacaggggtgtggggacaggggtcccggggacaggggtgtggggacaggggtgtggggacaggggtcctggggacaggggtctgaggacaggggtgtgggcacaggggtcctggggacaggggtcctggggacaggggtcctggggacaggggtctggggacagcagcgcaaagagccccgccctgcagcctccagctctcctggtctaatgtggaaagtggcccaggtgagggctttgctctcctggagacatttgcccccagctgtgagcagggacaggtctggccaccgggcccctggttaagactctaatgacccgctggtcctgaggaagaggtgctgacgaccaaggagatcttcccacagacccagcaccagggaaatggtccggaaattgcagcctcagcccccagccatctgccgacccccccaccccaggccctaatgggccaggcggcaggggttgacaggtaggggagatgggctctgagactataaagccagcgggggcccagcagccctcagccctccaggacaggctgcatcagaagaggccatcaagcaggtctgttccaagggcctttgcgtcaggtgggctcagggttccagggtggctggaccccaggccccagctctgcagcagggaggacgtggctgggctcgtgaagcatgtgggggtgagcccaggggccccaaggcagggcacctggccttcagcctgcctcagccctgcctgtcacccagatcactgtccttctgccatggccctgtggatgcgcctcctgcccctgctggcgctgctggccctctggggacctgacccagccgcagcctttgtgaaccaacacctgtgcggctcacacctggtggaagctctctacctagtgtgcggggaacgaggcttcttctacacacccaagacccgccgggaggcagaggacctgcagggtgagccaaccgcccattgctgcccctggccgcccccagccaccccctgctcctggcgctcccacccagcatgggcagaagggggcaggaggctgccacccagcagggggtcaggtgcacttttttaaaaagaagttctcttggtcacgtcctaaaagtgaccagctccctgtggcccagtcagaatctcagcctgaggacggtgttggcttcggcagccccgagatacatcagagggtgggcacgctcctccctccactcgcccctcaaacaaatgccccgcagcccatttctccaccctcatttgatgaccgcagattcaagtgttttgttaagtaaagtcctgggtgacctggggtcacagggtgccccacgctgcctgcctctgggcgaacaccccatcacgcccggaggagggcgtggctgcctgcctgagtgggccagacccctgtcgccaggcctcacggcagctccatagtcaggagatggggaagatgctggggacaggccctggggagaagtactgggatcacctgttcaggctcccactgtgacgctgccccggggcgggggaaggaggtgggacatgtgggcgttggggcctgtaggtccacacccactgtgggtgaccctccctctaacctgggtccagcccggctggagatgggtgggagtgcgacctagggctggcgggcaggcgggcactgtgtctccctgactgtgtcctcctgtgtccctctgcctcgccgctgttccggaacctgctctgcgcggcacgtcctggcagtggggcaggtggagctgggcgggggccctggtgcaggcagcctgcagcccttggccctggaggggtccctgcagaagcgtggcattgtggaacaatgctgtaccagcatctgctccctctaccagctggagaactactgcaactagacgcagcccgcaggcagccccccacccgccgcctcctgcaccgagagagatggaataaagcccttgaaccagccctgctgtgccgtctgtgtgtcttgggggccctgggccaagccccacttcccggcactgttgtgagcccctcccagctctctccacgctctctgggtgcccacaggtgccaacgccggccaggcccagcatgcagtggctctccccaaagcggccatgcctgtcggctgcctgctgcccccaccctgtggctcagggtccagtatgggagctgcgggggtctctgaggggccaggggtggtggggccactgagaagtgacttcttgttcagtagctctggactcttggagtccccagagaccttgttcaggaaagggaatgagaacattccagcaattttccccccacctagccctcccaggttctatttttagagttatttctgatggagtccctgtggagggaggaggctgggctgagggagggggtcctgcagggcggggggctgggaaggtggggagaggctgccgagagccacccgctatccccagctctgggcagccccgggacagtcacacaccctggcctcgcggcccaagctggcagccgtctgcagccacagcttatgccagcccaggtccagccagacacctgagggacccactggtgccttggaggaagcaggagaggtcagatggcaccatgagctggggcaggtgcagggaccgtggcagcacctggcagggcctcagaacccatgccttgggcaccccggccatgaggccctgaggattgcagcccaggagaagcagggaaccgccagggccacaggggcagagaccagggccagggtccccctgcagccccttagcccaccccctcccagtaagcagggctgcttggctggcttcctttgctacagacctgctgctcacccagaagggcccacgggccctggtgacaaggtcgttgtggctccaggtccttgggggtcctgacacagagcctcttctgcagcacccctgaggacagggtggctccgctgggcacccagcctagtgggcagacgagaacctaggggctgcctgggcctactgtggcctgggaggtcagcgggtgaccctagctaccctgtggctgggccagtctgcctgccacccaggccaaaccaatctgcacctttcctgagagctccacccagggctgggctggggatggctgggcctggggctggcatgggctgtggctgcagaccactgccagcttgggcctcgaggccaggagctcaccctccagctggggacctggccactggggcagccctgttcctgaagctctgagctcaccccttccccatgaccacatcagcccccctccacccagagatgtcacagcccccagctagccccgcctccagagtgggggccaaggctgggcaggcgggtggacggccggacactggccccggaagaggagggaggcggtggctgggatcggcagcagccgtccatgggaacacccagccggccccactcgcacgggtagagacaggggcgccctgctggagctgaggtatgtgagctcgcgcggggctgggccaaagcggggcccggtgggccggctgggaggctgcccaccagtcagccatcggccaagctgttgccctggctgaccctgatggccaacaaggccgtagggagtgatgggcagaggccccttctgggaggggagggtcagtgctctgtgggggaccgtgtgttggagtggagggcagcaggaggagccctttggtgtccagggactcctggagctgccccagccttccaggacttgcagggcagctggcactggctggtgctgggggctgaggagtgtcttttgaggggccaaattttctgtgacttctgtcctgggggacctctgacctgaggcctcaggagagggcaaggccgcccacccaaaagagatgcagccatggttcgcggtgccctcggctgccctgggccagagctggggctagctttcaccttgttgagacccaggactctgtcccccaagcc

SEQ ID NO: 124 - DNA, 20348 bp, Human
atgtctatcctacgcaatggagataaggactgagatacgccctggtctcctgcagtaccctcaggcttactagggtggtgaaaaactccgccctggtaaatttgtggtcagaccagttttctgctctcgaacactgttttctgttgtttaagatgtttatcaagacaatacgtgcaccgctgaacacagacccttatcagtagttctcctttttgccctttgaagcatgtgatctactccctgttttacaccccctcaccttttgaaacccttaataaaaaacttgctggtttgaggctcaggtgggcatcacagtactaccgatatgtgatgtcacccccggcggcccagctgtaaaattcctctctttgtactctctctctttatttctcagccagctgacacttatggaaaatagaaagaacctacgttgaaatattgggggcaggttcccccaatatctggtgcccaacgtgggatactgagattacaagcatgagccactgcatctggcctcttcttttgatttttttttttcaaacttttacaaatgtagaaaccattcttagcttttgggcattaccaaacccggcagtggcaggctcggttcaccaacgtcatttgcagttccccgctttatgttatgggttttgttttgttttgttttttttattgagacagagtttcactcttgttgcccaggctgtagtgcaatggtctgatcttggctcactgcaacctccacttcccaggttcaagccattctcctgcctcagcctctcaagtagctgggattacagacactcaccaccacacctggctaattttgtatttttagtagagatgaggtttcaccatgttggccaggctggtctcgaaatcctgacctcaggtgatccacccaccttggcctcccaaagtgctgggattacaggcttgagctaccacgcctggctgggttggttctcaatggagtggtttgtttttggagctgctctgcgcagtggggaccagaataggcctgggttcctagcccattgctattccttaccagctgtggattctaaggaaagtcatttaacctcgctggaccttagattcctcatccctgaagcccaagggtaaaacaaaacaaaacaaaacaaaacaaaccaacccatcatgtaaagcggggaactacaaacgatacaggtgaaacatgcctaccacaccactcacaggctatgatgacaaaaacgtggctacatctgggaccaccccccaacccccactttgtacgtaggaaatacggagttgaggatggagacccacagtatgtccagagtgtccccaaaggccacagtgcccgcctggagccctccagagagcgtgcactccctggggtgccagccagagacaacttgccctgaggcttggaactcgattctccgcgtgccagagaaggggtgggacttcagaacccccaaccccgcaatctgggtcggggagcctggcgcactgcgggccgctccctctaaccctgggcttccctggcgtccagggccgtcggggccgagtcccgattcgctcccaccccgaagccgcgccaggaccaacgagggcgcagccgtatgccccagcccgctccgcggagcccctcacagccacccccgccccgaccgcgccccgcgcggctcgaagcaccttcccaaggggctggtccttgcgccatagtcgcgccggagcctctggagggacatcaaggatttctcgctcctaccagccacccccaaatttttgggaggtacccaagggtgcgcgcgtggctcctggcgcgccgaggccctccctcgaggccccgcgaggtgcacactgcgggcccagggctagcagccgcccggcacgtcgctaccctgaggggcggggcgggagctggcgctagaaatgcgccggggcctgcggggcagttgcgcaagttgtgatcgggccgctataagaggggcgggcaggcatggagccccgtaggaatcgcagcgccagcggttgcaaggtaaggccccggcgcgctccttcctccttctctgctggtctttcttggcaggccacagggccccacacaactctggatcccggggaaactgagtcaggagggatgcagggcggatggcttagttctggactatgatagctttgtaccgagttctagccagatagaaggttaccgggagctggggagcgttggatttgctgctgggctgtgccggtgcccagaaggcaggaccttgcagaaccagccaggtccctgggagactgtcagacccaccaacctggtggcattcgcagagctgagatgcattggaaattgccttgggcacatccccaaagatcaggatgtcccaccccagtctgaaggagataaagttgggggtaggagagacgcagatgcaagtgatcagtctcagtcccagacattgccttgctctgcgggtaggaattcaggattcattttccagggaagttcctgacctctgaatgagaggggctgtgtaaggccaatgcctgggaggaaggcaaggatgagtagaggtggggggaaacaagtgtcaggaagactcaaaatcttccagagaaattgtgcagggtcttaccagatctgtcctcaaagccatgcaaattgccttctttgcaatgcatacaatgaggtgtctctgggggtcagaactggttattagggaacttctagccaggactgctaaatacgcgctgttggcccaccaggctcacctatagccttccttcagtctgggcttggtttggatttcactgtgggtgccatcgcctttacactcctgtttctatagtttaaagatagtggtgctttgggaaagtgactccttaaatacagttaggtccaagtgagacaagtggcctggctgtcatttcagaatagcagcttccaagaggtgattaatttctgttggaagggtgatctttggggaggtgggtgaagagcagagacttggtggtaccgttccaggagcacaggctctcttcctttgcagtgcagaatgacctctggcagccggagttgtgtttgttctgtaggattctgaggtgggccatgggcagctggaactggggaattttgccaatctctttcatattaggattgtctgcagaaccagatatggaggcttctagcaacgtgagtgctcctgttctaatgcccttagaaacaagaaggccacactgatcatttctctcacttaggcagggagacaaggcaagagagaaacagtggatgcttttaggttctttcccttcccaagcagttgtggacattgggctgaggggaacatttccacattggctaaaggagcgtcctcctcatattttgtacattttatacccaaaataactcttcttggtatttggggaaatattttcctccccgtccattccaggaaatggctccaagtgccaaggacagagccagggaagttgcaatgaattcctgcccgtcagccccaggcagatgccttgcacgtctgagtggcccatgcagagcgtggaggtggccgccacggaacctgggtcaatgtcccacccccgcttagatgccaccaggggcgtgggagccaaggagagaagaggggctccaggaaggtagagtccttgtgtcttgtgcatctgtgaacagcactggtatgatttaaaggaaaattgagccaaattttccggcagtcagttaccccatccccaccggggtaggagtctggcagccgcagctccattctggccagtcggcagagagccttgaaattcttctttgtccacacagttgtctcagagaaacagagaggttgtttctgcttaaaaacaacacacttggtgtctgggcccacagactcctttgcacttattccacgtgtgacagccaatgtgcctcgttgcttagcagacagcatgttaccgtctttcctgctcagtttgttagctctatggaatggaatctataatcaatgcccataccaacatttcactaatatcataggagatttagtctccatctgggtgtacattacatttgctctggggtgctccaggctggggggttgccaaggaagagaagagaaaccgcagagaagacgggagggcagggcaggggtctctgagaaggggaggggtcccagagtgcaggagcaggagccaggctcatgaaaggggccacgggcgggagtatccagggacggcagtcaagatggagcacagcttaggaagctgaagggaatcctggcccacctgggtgctagagggcacataggaagtgcaggaagcagaccaaggtccccaagagagggagacctggacgctgaagcattttcagtctttattaagacaactccgtaagaattcctgctgggccaaagtgaattctaggatgcgactttaagatgggagcaagcgaaccattgaggaggcaggttaccctagttagccaatgcagatcgagaatgggaaatctttcatttattcatgcaacagatatttaacgaagccctgccgtgttccaggcctgtgatagatgctggaacaggtacagagatacaggtgtcattaattgatcagggcaacctctccttctgagtcttgctggagcttcagatgcccctcacacagagctcgagggagcctcaacaattgatcagaagtcaggcaccatggctcacgcatataatcccagcactttgggaggccaaggcaggtggatcactggagcccaggagttccagatcagctggggcaacatggcaaaaccccatctctattaaaaaaaaaaaaaattaactggatgtgatggtacacacctgtagtcccagctacttgggaggctgagaggtgggagaattgcttgagcccgggaagtcgggggtccagtgagccttgatcacaccactgcactccagcctgagtgacagagcaagaccctgacacacacacacacacacacacacacacacagattagagctgaaacaggagtagaaacctatctgtatctctgatgagatcagatttttctgatgaacagaaagaatgtaacccctgtactcacaccctctctgctggttacatatgttaacacgatttctcaaatgaggcttttggttgcaaataagagaaaatcactcacgctggccctgtgtttttcaaattgtttattgtgatcaacatttgaaaaaagagccgagactctcaagagtgcattacccacggtaagggtgaattttacttcttgacacttatttctcttacatgtatctatctgtctcaaatgaaaaatatatttagaaagttgaaagctatccaagtgagtataagaaaagagtatctcaccctgaaggctaaggacagggagggccaccaggcctcacgaggacccaggaaccacaaagaaggctaggaaggagcacaggcggtgaccatactctggctcagtggctatgtgggctctggtctctctcagctgttccatgcatatgaggccaaatgtggctaccctagagcttctgagccctcaacagagatgaactggactctctgcagccccactctaaattcctaagagagaagttgattgacccaatcagggtcaggagaaggaagggaggaggaaagggaggagagaagagcctcttcgtctcttgcctaccactggccaggcaattgtagccaagggggctggagtgtaaatgcaaacatagccatcaagggttgtgtatgtgtgtgtgtgtgtctgtgtgtgtgtatgtgtgtctcttgggtaggttagatctcccaggaggtccctactaaacagacttaagcccgcaaaattttagctctccagcctcacacactccacccctctaccatattgaatcttcccaaaccaactatggctttccctaactccggagcttggcctggaatgccctgcttcccctctttcccctggggaacgcctgtccttcaggcctcagttcacacactgcctcccttgcaaagctctcctcccatccccggagtccctcttcccctttgttctttgggttctatgcttcttccctcataactcccaccaggttgtgttaaaatgagttgttcaaggtcctgtctgttccactagattctgagcaacttggagaacgaagatccaaacttcgctgcctttatttcctcctttgttcttttctcatccccaagtcccttccaacttggagttatgaagaaaggaaggaaggaagggtgggagggaagaacaggaggggatcccacaggagaatgtgtatagggagaggactcagactagctaaagcttttccctcataattaatagcaaataccatgttacctgaatttaattcacagtagcatacaaaagactcgctttgttctccccattgatgtcatcagagggctgtgggcaggcctaatcttggctcaggaggccctccagcctggatctaaagagcagcagatgggccaggctcggtggctcatgcctgtaatcccagcattttgggaggccgaggcgggtggatcacgaggtcaggagtttgagaccagcctggccaagatggtgaagcctcgtctctactaaaaatacaaaaattagccaggtgcggtggtgggcgcctgtatttccagctacccaggaggctgaggaggctgaggcaggagaatcgcttgaacccgggaggcggaggttgcagtgagccgaggtcacgccactgcactctagcctgggcaacagagcaagactccgtcaaaaaaaaaataaaaaaataaaaaaataaaaaaaataaagaggagcacacatctctgcccatcctaactcccactttgacattgaggtccccaggatggagggtctgcctccatctgccttgtcccctgcaatggtgggaaggtgatggagctcaagtctagaggccaccagcttcttagggaggtaggaggtggagggtggggtgcgggccctgcacacaactgccaagtgaggatgggggtggggtccacctgaggataagtaacagtgaggctggtgcagaggacccaggtggaggtagacagcagaatttgtggtggggtggatggcacattatataagcctctcttgctgccctgtttactgagattgtttcattatcttttttggcttttgtttttaagagatggggtcttgctgtgtcacacaggctggagtgcactgtgtgatcatacctcactgcagcctcgacatcctgggctcaggcaaacctcccaccttggcctcccaagtagctgggaccacaagcgtttgccaccacactcagctatttttatttttatttttattttttttagagatggggtcttgctgtgtcgcccaggctggtcttgaactcctgggctcaagcgatcctcctgccttggcctcccaaagccctgggattataggctgagccaccacacccagccacatttcatctgtgcagctccaggggctccacattctactcttctcatttcttctccagggtacccatggcaagggatgagggtagaagatggggcagccaggccttgattaaaggagaaggaaggcagcctgtggagagggcagcccagggagtgcagagagaagtgggccatgagggagacagcagagtgcaggctgcgtcccaaatgagcacacagcccactgtgagcccaccatcttcctagagaccccgctcctctccaggagctgcttcagtagcactcagaggaaagaatgatgctgtatcaacatttcagcagctcgtcttttaactctaagaaaatggcagctcctaaatgttcaaaactgctttggaaacttctggagagaggttttgcagctcaggcagacagctgatcgcggcctttcttccaccccaacccatgctctccccatgctctcctgccacagctgcagcgggcccctgggtcctacatttgcagccctttgtctctgagctcagacttccaattccaagcggcagctgggcaggctcaccagcatgtccagccagtactaggacatcagcaggagcccaaccacctctttccaaaatctctcctcatgtctctcctagtttccatctccatccttctagtcagccaggctgaaaacatttgctcctcagggtgcagaagggaaagctttgcctcccttcctggtgctcactgcccctgcgattccagcccaagccctccccggctcctcaccctggtgtcagctggaagccaccatctcctaaacccacctgtgttcttccacctctgccagggctgccctctcctccaccttcacaaactcaattcctacccattctcaggtcccttatcaaatgccatctcctccatgatgcctccctgattcccctgctggaaataatggtgataacagctaaggcattggggttggctacgtgccaggcaaggagttggcactttacatgctttatctcatttcagccacataacatcgacaggtggcattatgattcatatcatccccatctgatagccaggaaaactgagtcccagagaggttagccactttcctagggccctgtgctctgactcaagcatagctctgaggaactctagcattcatcagtttaagcaccatgactttctttgctgagtcacccaaggcatttcttcatttaaatgttcttccttggccaggcgcagtggctcaggcccaatgcggtggctcacgcctgtaatctcaacactttgggaggccgaggtgggcagataatctgaggtcaggagttcaagaccagcctggccaacatggtgaaaccccatctctactaaaaatacaaaaaaatgaggctgggcgtgatgactcacacctgtaatcccagcactttgggaggccgaggcaggtggattacatgaggtcaggagttcgagaccagcctggccaacatggtgaaatcctatctctattaaaaatacaaaaaattagccaggcatggtggcaggcacctgtaatcccagctacttgggaggctgaggcaggaaaatggcttgaacccgggaggtggaggttgcagtgagccaaggttgcaccattgcactccagcctgggcaaaaagagggaaacatcgtctaaaaaagaaaaaaaaaaaattagccaggctgggtggtgcatgcccgtaattccagctactcaggaggatgaagcaagagaattgcttgaacccaggaggcagagattacagtgagctgagatcacaacactgcactccagcctaggtaaagaacaagactccatctcaaaaataaataaataaaaataaatgttcttccttgcaatgaagttaaatatgtaaattctcaaaccagttgcttaagggcacagttttgttctttacctatatttttaacaaatattttatgtaagtagttgacaaaatcaaatactgtgtacactaccgaggcttccctgggaaagccatcagcctctgccccatcccttcccactcctgattccactttcctgtgtttccatatctttttcatgtctgtttctggcccacagtgggcgatcaatacatgttagccaccaaccatcaaacctatattgagtaattatggtatgtcaggcactatgctcaatgaaattgtattaggcttgtacaaaagtaattgtggtttttaagagtaatggcaaaaacggcagttactttcgcaccaactatttgctgccttgaattattcctcctctcctcatccctaaaccctgctcctcccagccattcttcctccccttcttgggccatggccaggccccacccaggtactaagactcaggtgaaccaaggaagacttaatgcccactcttttctgatgcccatgttggcatgtgttaagtcggttagcattaagtttggctgcatttagcagagacccaaaagaacagtgccttttaaaaggcagaggttatgtctctcacacacacccagcacaagtccaagaccagcatggcatctcagctccatcaacctcaggaaccgagctcctgcagctccctgccctgcagttgataaggtgaggtctttgtcctcctggttcaagatggtgctagaatgttggctaccatatctatagtccaggcatcagaatggagcaagggatgaaaaaggaagagatgaaggcacacgacaggttcctgagagctggcacaggacacttctgcttatatttcactggccagaacttagtcacatggtcacacctagttgggagactctgagaagtaaagtatttattctagatggccatatccctacctaagacttggagttttctatgactggggaagaacggaagacaagatattgggaaagactagcagcctctactaaaagggtgatctgtgttgatgtgcgtgtgtgtgtgatgtttgtatgagcatgtgtgttatgtgttgtgtgttggtggggcagattcttgcgagcactttggtctcagatggacctgctaccagttctctctgcagacccccataggtttctcctaaacctggcctctcctattaggcagccttactcagcggcagcttctcagctccatgttttcaaggaaccacaatttatttccagcatccactgaagcatattatcagtggtgatagagggggcttgtaaaactgtttttccacttaggtattagagggtggccattatttgagagtgactatgaccacagttaatctggtaataaattctcttgggtaggaggaaaggaaaggatgctttaaggaagcatcttgccgggagacacaaagctaacaagagtggagcctgcagctggagccgcagagcctaatcactacacccgcccatctctgctagggtttcatgacttcgtatcggggattagcagtatttaactctgttgcacaaacatttggtgtattattcaggtaacaagtagctaatagaggaagttttacttttttaagacataaatttgccttttcccaaattacttggtacatagtacttttcatgtttgaagttgagatgtgggtacaataccatagctttattccagagcagggtatttgtttccaaatgccatgttcccagcagctgcccttgactgggaattggggtgtgatttgggcttttccttaaatccttgaggagctggaggggtgggtggctcgcactcctgctttctggatctgaatcctgactctgtcatggacctgtttgactttgggcaagttgactcctattcctgagccccatatttttctcttctgtaaaattcagattaaaaaaacatggctttgatcaaacattataaataatatatagacagactgcttgtttttattgtattgccagaaatgaatcctactaatattgccatctatggacagaaaatgtattacctgtcttcatcaagacccagacgaggaagaacacgaaaagcggagattaattttactgccatctccagaaccgtcatcctaatatttacttacattttattattatttcaggctcatgcacatatacttagcatggatcattggccacagactcgcatacatttaactttattaccttttgcctcatgtatctcattaaaattttgctgcttaatcaaggatctgcatattattttaattttagaattcacagttccaagactttgaaagtttcaagcgttctgggtgaatgtgttatgctctctcccgccaccatgtctttataccccctgatttctcagccactatggcaaccactttctactcttagtagcccatatttagtccaatccccagctcaggagacacttcttccagggagccccctgtgccttccagtagtatcttgtacctgccctttttgcaaagctctttcctcctggcttagaatggcccattgacctgtttgtttctcctattaaactgtaagccactcgagggtagagagcatctgttgttcaccattgcatcctcggtgctgagcactgcgtctgacatattatttagaaggtcagtaagtgctagtgggattcaggctcccagtgggtgggagagaaaggacgtaaggaagcaagtggtaaaggccctcacagagtatcagcaggctggtgtgagggagaaatgcagaggatgggtgagtagcataatcgctaatgatagggtaatgatagagcacatttcacaacacctttaagccctttcacgtgcatcagataatttgatcctcataaaagcctagagatagatatattacagggatgaaggtggagtattttgtggttatgtgatatgtttaaaattatgcagtgagtaaatgactgggttcaaaccagaccttaaaagtctgttatctttccctcgagcatgcaatgaagtctacatcatccctaccatgtccatttgatcacaccctggcctcacagctctgtggtctacaggatacctcatggtggttttattgaccagacaataatcctctttctaaggggatgcatttcattaatacatatgtagatcatgaattgtctttgactttgaggggatggtagccagagcagaaagcaaagctgattttcatccccgtctggtaatgtggttggtaatgtgaagatgggtgtattctgagataccggctccttgcagtgtgtggttccttctgttttcaggcccaagaagcccatcctgggaaggaaaatgcattggggaaccctgtgcggattcttgtggctttggccctatcttttctatgtccaagctgtgcccatccaaaaagtccaagatgacaccaaaaccctcatcaagacaattgtcaccaggatcaatgacatttcacacacggtaaggagagtatgcggggacaaagtagaactgcagccagcccagcactggctcctagtggcactggacccagatagtccaagaaacatttattgaacgcctcctgaatgccaggcacctactggaagctgagaaggatttgaaagcacagggctccactctttctggttgtttcttttggcccctctgcctgctgagattccaggggttagtggttctaattctaaaccactccaagaacatttgattttgctacatgtttccatttaaaaatcataggatttgggctgggtgtggtggcttgtacctgtcatcccagcactttgggaggccaaagcaggaggatcattcgagcccaagagttcgagaccagcctgggcagcatagggagaccccatctctacaaaaataataaaaaatgttagctgggcatggtggtgtgtacctgtggtcccagctaggggaggctgagatggaaggatcacctgagcctgggaggttgaggctgcagtgggccctgatcatgccaccgtgctccagcctgggtgacagagtgagaccttgtctcaaaataaataaataaataaataaaagtcataggatttgatcaggcatgatgggtcacatctgtaagcccattgctttaggaggccaaggtaggaggatcagttgaggccaggagttcaagaccagcctgggcaacatggcaagacctctctctctaatttttaaaaaaataaaaattaaagataagaaaaaaatcataggattctcatgaggcctcacgtgcttattttcaacctaccaaggggaaacccaggcctcagcgattagctgagccacatgcaggcacagccactgtctctttccttcctgtcccctctgtccccaccttctgcgctcgccttcctccctgacttcacttccttgaatcttagtgcctacgaccagagggagctgtgaagttccttgtgtcccattggcaggtacaagacccccagaagcatctcctcagggcctctatcccatctctagatgtgcttgtcattagggttcttgtagttccagctgatctctggccctgccgctcaaagatacccaaaagagcgagtctaccctttttcacattcaaccctctactgatttgcaaatagcagtcagtgcccaccctggtcttttctctggggtccagcaggcctagaccttcagccattttcctgatgaggtctgtatttgaaattaggaagattaagtttgaatcttcacacttctgatgtctgtgagatcttcagcaagttccttactgtctttaagccttgttttcatcatctggataatggggatatcacacactattcacaaggttgttatgaggcctaaattagctaaagcaattgaatcctccttaccccctgcatggagctctctggagacttccacgtctcctggtcattgtgggtgtcttatggtagtcttgggcagttagggagaagttaggtgtctggaagcaaagatggctcagaactagatagagtcttgggcattttatagataaaaactcttgtctcctttaaaaataataaaaaaaaattagctgggcatattagccactcagcaagactgcacgtgatagatcccgagtgccccaccttgggtggtgtaatacacgatatcacgggagccccgggtagtaaccacggaggtgtcagcctcagtgctgtgggcagatggatggggagagcctcccggaactggagtcactggagcagggttggggggcctcactgagggtacggccttgatctctaaggaggagggactgcctggaaaagctgactgggagggaggactcggctgggggtagaagggactagggaaggctgggggtgggggtgcttatggaggacctcagatgcctggggaacagactccactaaataaaacatatgaaaccatggctggttcttcagcagaggccatgtagagaaaggaatgacctaggaaagttggcctggaagtggagggaaggatggtgtgggaaaagcaggaatctcggagaccagcttagaggcttggcagtcacctgggtgcaggatacaagggcctgagccaaagtggtgagggagggtggaaggaggcagcccagagaatgaccctccatgcccacggggaaggcagagggctctgagagcgattcctcccacatgctgagcacttgttctccctcttcctcctgcatagcagtcagtctcctccaaacagaaagtcaccggtttggacttcattcctgggctccaccccatcctgaccttatccaagatggaccagacactggcagtctaccaacagatcctcaccagtatgccttccagaaacgtgatccaaatatccaacgacctggagaacctccgggatcttcttcacgtgctggccttctctaagagctgccacttgccctgggccagtggcctggagaccttggacagcctggggggtgtcctggaagcttcaggctactccacagaggtggtggccctgagcaggctgcaggggtctctgcaggacatgctgtggcagctggacctcagccctgggtgctgaggccttgaaggtcactcttcctgcaaggactacgttaagggaaggaactctggcttccaggtatctccaggattgaagagcattgcatggacaccccttatccaggactctgtcaatttccctgactcctctaagccactcttccaaaggcataagaccctaagcctccttttgcttgaaaccaaagatatatacacaggatcctattctcaccaggaagggggtccacccagcaaagagtgggctgcatctgggattcccaccaaggtcttcagccatcaacaagagttgtcttgtcccctcttgacccatctccccctcactgaatgcctcaatgtgaccaggggtgatttcagagagggcagaggggtaggcagagcctttggatgaccagaacaaggttccctctgagaattccaaggagttccatgaagaccacatccacacacgcaggaactcccagcaacacaagctggaagcacatgtttatttattctgcattttattctggatggatttgaagcaaagcaccagcttctccaggctctttggggtcagccagggccaggggtctccctggagtgcagtttccaatcccatagatgggtctggctgagctgaacccattttgagtgactcgagggttgggttcatctgagcaagagctggcaaaggtggctctccagttagttctctcgtaactggtttcatttctactgtgactgatgttacatcacagtgtttgcaatggtgttgccctgagtggatctccaaggaccaggttattttaaaaagatttgttttgtcaagtgtcatatgtaggtgtctgcacccaggggtggggaatgtttgggcagaagggagaaggatctagaatgtgttttctgaataacatttgtgtggtgggttctttggaaggagtgagatcattttcttatcttctgcaattgcttaggatgtttttcatgaaaatagctctttcaggggggttgtgaggcctggccaggcaccccctggagagaagtttctggccctggctgaccccaaagagcctggagaagctgatgctttgcttcaaatccatccagaataaaacgcaaagggctgaaagccatttgttggggcagtggtaagctctggctttctccgactgctagggagtggtctttcctatcatggagtgacggtcccacactggtgactgcgatcttcagagcaggggtccttggtgtgaccctctgaatggtccagggttgatcacactctgggtttattacatggcagtgttcctatttggggcttgcatgccaaattgtagttcttgtctgattggctcacccaagcaaggccaaaattaccaaaaatcttggggggtttttactccagtggtgaagaaaactcctttagcaggtggtcctgagacctgacaagcactgctaggcgagtgccaggactccccaggccaggccaccaggatggcccttcccactggaggtcacattcaggaagatgaaagaggaggtttggggtctgccaccatcctgctgctgtgtttttgctatcacacagtgggtggtggatctgtccaaggaaacttgaatcaaagcagttaactttaagactgagcacctgcttcatgctcagccctgactggtgctataggctggagaagctcacccaataaacattaagattgaggcctgccctcagggatcttgcgttcccagtggtcaaaccgcactcacccatgtgccaaggtggggtatttaccacagcagctgaacagccaaatgcatggtgcagttgacagcaggtgggaaatggtatgagctgaggggggccgtgcccaggggcccacagggaaccctgcttgcactttgtaacatgtttacttttcagggcatcttagcttctattatagccacatccctttgaaacaagataactgagaatttaaaaataagaaaatacataagaccataacagccaacaggtggcaggaccaggactatagcccaggtcctctgatacccagagcattacgtgagccaggtaatgagggactggaaccagggagaccgagcgctttctggaaaagaggagtttcgaggtagagtttgaaggaggtgagggatgtgaattgcctgcagagagaagcctgttttgttggaaggtttggtgtgtggagatgcagaggtaaaagtgtgagcagtgagttacagcgagaggcagagaaagaagagacaggagggcaagggccatgctgaagggaccttgaagggtaaagaagtttgatattaaaggagttaagagtagcaagttctagagaagaggctggtgctgtggccagggtgagagctgctctggaaaatgtgacccagatcctcacaaccacctaatcaggctgaggtgtcttaagccttttgctcacaaaacctggcacaatggctaattcccagagtgtgaaacttcctaagtataaatggttgtctgtttttgtaacttaaaaaaaaaaaaaaaagtttggccgggtgcggtggctcacgcctgtaatcccagcactttgggaggccaaggtggggggatcacaaggtcactagatggcgagcatcctggccaacatggtgaaaccccgtctctactaaaaacacaaaagttagctgagcgtggtggcgggcgcctgtagtcccagccactcgggaggctgagacaggagaatcgcttaaacctgggaggcggagagtacagtgagccaagatcgcgccactgcactccggcctgatgacagagcgagattccgtcttaaaaaaaaaaaaaaaaaagtttgtttttaaaaaaatctaaataaaataactttgccccctgctctttgtttcctgtcgccgttcctggaggggcttcgggagagctgtttgtgtgtgacagggcaaggcctggctggcccccatccatcactggggtcagctccgccccaggcttggccacagccagccgccagttattcaggcaaaaggattaccctgtaaagaaaacagagctgggtttggacgctgagaggactgggaaacaggttgcagggaggcacaggaagcacacaccaagagccagagagaggcctctgtgccatcccaaggaatgaggacaaagagaggggtcctcgggaagaagggatccactttggagaggccccttaacacgggacagagcaaggacagaaagaggcatccactgggatggaagaaggacaggatccacagggaaagagggatgaggggaatgaagagagaagaaataaagagttcagcatcacctcatgatgcaactaatttggcacaatgcccagcacaatgtacccctccattctgatttggtggccagaagaattgagattcttgggccaggcacgatggctcatgcctataatcccagcactttggaaggtcaaggtgggtggatcacttgagaccaagagttcgagacaagcctggccaacatagcaaaaccccatctctactgaaaatacaaaaagtagccaggcatggtggcacgtgcgtgtaatcccagctacttggcaggctgaggcaggagaatcgcttgaactcgggaggcagaggtggcagtgaaccgagatcatgccactgcactccagcctgggtggcaggtgagactctgtctcaaaaaaaaaaaaaaaaaaaaaaattgagattcttggatagcaagcccattatttaacatgtaagcaaattattcaaaaagcttaaaacatacctatcaaaggttagactccttattagtattccgcttaatcttaatttgttcaacaaaccattctgagttcaaatagaggtccaaatcaactgtataaaagataactttgagatgaggaaaatttaaatgggggctctgttttctttctttctttctttctttctttctttctttctttctttctttctaacttttttgccggtgacacaacctcagaagttcctgagaacatgtgtcccaattccatttcagatgctgataagaaattctagttaattttactaggtataatgatggcatggtggtgtagttattcttcagtgcttccttatgcattcgtgatagatgcaaacagaagtttagggtgaaatagcacaatgcctgggattaaccttaaaaaacttcagcaaaacaatttatcttataattttttataaatattatataaactttatataaataactatatatctatatatatatatcaacaagatcagcaaaatgttgagaattgctaaagctaagtgacagatacatgggagtccattataccagaccctttccttttgggtgaaatttccagaagaaacactttttggaaatgtccagttcagcctggcccgtcccctgcctgggcaatgttgcattcctgggaaggaaggagaggaggtggggagagaagagggagaaggagaatatgacgtggagctgagctgtatttaaagagcacatttgatttcactgcctggcagatgtcccagggccttggggggacagcagactgtcagtgcgggtgtgaaacagtgaactaagacagggatttagcaaatcaaacaaggaaggaatggtaagaaccagctgcaaggggcagggagaggcatgtcctgaagctcacaggaaaaagccaaagcagcagacatcagggcctcaagctctgccccagtcctgctgggcctcaggtgtcccacagaagccaactccccccacccaagggggcatcgtggtattcctgctgtgcagctgttcctccatattaaataacactgtgtaggcagagaagcctttagaccatttgtaaccacgcaatgggttcacct

SEQ ID NO: 125 - DNA, 34604 bp, Human
tcctgtcaccacctagaacttctggcatccaccaagattacattaatcagcgaagtaatccgaatgtgacctagagggcttaaaagtatgaagcctaaagaacaaccacacagaactggtttcgccctgcccagtggaaatctccgggtgattgcaggcactggtgcacgttattgaatagcgcccactccaatggcaaagtgcgaaaagactgacttcaccacagccaggagtgcaacgacctgcagctcctcggtgggcgccaagacacgctctcctgaaaggctggaatcgcttatcagttctccgcgggcaaaagcaatcagagcatcaatgtaaatgaatcgcaccccctccccgcacggagataaagttttagcatatcccagatggtgcagagattactcattcatttctgagaaagagcagaaccacagaggccttggctgaacctgaggaaactgatcagggtgccccgaaggcccgctagtgaatggcgggtcgcgctcccaatgggagaagagaatggtttcctgccgccgtgctccgcgccggcaggccggggctgagcacaagaagttaaaggctcactggccgcccgcgcactcaaggcaaattccgtttctgaaaaggcaggttcaaaagacaaaggttggtaaaccacaccggtatcatttacgacgcggcacagagacgctttcctgcagaatgtcatgtcactggcaaatgccatggaaccgctcctgactgtggaccgctctggcaatggggcgtgctcatcaccagccaaaactgatgcggaaagtcagcgtggctaactgggcgctttaaagtctgacttcaaagctgctccccaaagcttggcactatgacacagagcacctcatgttatgactaaacgagttaatccatgtcaagtgctgagagcagcacctggcacccggcaagacctcagtaaagattaaccatcattactattaatatttgctcacgcttttccactatgaaattattgtattgtgtctgcattacatatgtctcatcttatatgttataaacacctagaaagaggaggctgtgacttatttatctcagtcatctcggagcatggaactgtgctggactcagtaaaagtttgtagtttgattgaattaccttctcaaaccaaacatttcaggtgtgtcaccttgcagaggtgacagaaatgaaaacagggtggcaaaataaaaaggtgaaatctgaatctcctctaatccttcattttctcaccctgtttcttcataacacccctcattgtgttgctgcttgttacatttttgttccgctgggaactggttccatttgagcctcagtgcaatctgtggccccagttgccacacacacttaaagctcaataaatttgatatctcctgaacccccacagggtttggatatcataagggatacttaggcccaagatcaagccatatgagcaggtttatttgagaactctacgttaaagcctccagcaagtgcttcttgacatatatgaagcaataataataacaaccgctatttgctaagtacttattatatgttgagatatgccaaacactttcacatattatctcatttaatccactcaacaaaacaaaatgtgtgttatttctattttatcaggcaaaaataaaaaactaatcagagaaaagtcacagtgagccacttgcttaaggttatactccccagtaaaatgttgagattcaaacccaagtccctaacaatccaaagctcatccaggtaaccattcaagtcaacaatggtctccggccacacagctcagctctaaacagaaacaccacagcactaattatctgtggagcagagtgcagtgtgcctcccatgctccacagcacagcacggcagctcagcatatctcatcttctacaaaagactccaaagatttctcttttcaccagctcccaattactgccacataacacatgccttgaaatgtgattgcctctggtttgtaacttatgcctaagggacctgctcccattttctttcctagtggaacaaaggtattgaagccacaggttgctgaggcaaagcacttattgattagattcccatcaatattcagctgccgctgagaagattagacttggactctcaggtctgggtagcccaactcctccctctccttgctcctcctcctgcaatgcataactaggcctaggcagagctgcgaataaacaggcaggagctagtcaggtgcatgtgccacactcacacaagacctggaattgacaggactcccaactagtacaatgacagaagataaggtaaagcagcattatattcatttcaagtctggttttcaggagatagttaggggaatacagtcaagtcatacagaggatttgggggaggttgggtgtagctaccacagatcaaaattaattctctttactttgccaattgaagaactgtttcttattcagtaattggggttttaaggatttttgctctgttaactgactagtctgcataagttttttcaagtaattgtgcataaccatattactaaagaaatatgtcccctcctaaccaaaaaaaaaaaaaaaaaaaagggggcagattgacctaaatttaatcatgaaaactcatcgggaatcttcaaaaacgtcaatgcaggagagacaaaagaggtagaagggttgttctctagattaaaagggattaagacaaactgacaaccaaatgcaacaaatgatttagattgtggaaggaagaaaaaaatagcaataagggaactatggagacgttgggaaattttaaatatgggctgcatcttaaataatattactgtatcaatttcacactcttggatataataatggtatctaattatgtaggaggatgtctttgttctttgtacatgctaaagtatttaggggtgaaatgacacaaatatctacagcttatttgtaaatggttcagccaaaacaacacacacacacaaacactacagagcgagagatcaacaaattggtgaatgttaaccagtggtgaataaaggcgaaggttatggaatgatcacttcactactgtttcaacttctctctagatatgatactttaaaaaaaaacttaaaaatataaaggatatagtgtccttgctcccttatacgtggtttctaaactcacccacccctgtacacacaatcatataagttgatcaatctgtgccctgtagggtctcacctttaagttctcatctggtgcaacttactctgctgaacattccttcatgtcattagatggcatggttagctgcactggctttggagtcagccagacttggatctgggttctagcaatgccactaaactgctgtgaggcctgggttaagttatttaactgagctttgggttttctctattgtgagaaaacaaaaacatattaggatacaatataccctttataggcaaagaaacttgggctcagtgatataatatgggatattcagggattatactagtactttagagttagggagtaattaaatgagattatattagagaggcttagacaacaattttaatgttaatagttatataattattaatagtgttaaatacatatttaaatagtatttataaattataaaagataaattatattataatgtataaacactttaaatacatattatataagcaccatttatatgtttgatatttaaagttaaatataaaatgctatttatatagcatttatatagtatgtatttaaagaataattagcacatcatgatttcatgagtattatagcccaggataaagctaaagtagttagaactttaaggtcaatataaagacaaacattaagttaacaactacatagatggtatgtagatttggcaaaattcatgaaggtagtaatcaaataactaaagtttgaaagctactgcaaaaaggaaggtaatgtgcttaacatagtgtctggcacatcgcagatgttcaagattcattcaaaactatcattaattttcttaggggcttttgaaattacgttgtagatcttttcttgataaccaaggaactgcctaacaatggaacccagaaagaatgagaactgaggtagtgcaatgtttttcagctttgtgaatctatccagactttgaaagaagtaggataagcaaggaactggggtcaagagacctgagttgtcacactgaatatgcccaaaatgctcacagaaatcagacaaatgacataaacaacttggcctgtgagacctcagtttctacaactgaagaatggaggaattagacaagaatccattgttctctaaggtctctttcaacttaaaaattctgtgacttgataagcccctggctttttccaaagttgcatgcaagatcacctttggtttaggttttggagacatgtagtttaaagaaaagggtataagcttctcctccctacctagtcaatcagtaattgctggaaaaatctgctcttcaggttagcagtggcgtttaagaccatcagctctcggttcccacactagagtatctgtcaccagctgtgtagtgttaggtatgctccttaatcctctctgatccctggcttcctcacctctaaaataggaataatttcatgtactttgtggtattgcaaagagtatcggtaaagtatgaaaagttgacacatggctgtttgacaaaagaaatgaatgagatgataaagacatgattaaagatgcatttgttctgtagcccttttactgtttataggaagaccacattatttatcttagtttttacagtaatcctatgcattaactagttttatacccattttataggcaaagaaacttaggctcagtgacgttaggagcctagctgggactcttttggagcttttctgactcccacatctatttgtttttttctaatagaccctatatgacttatgagccacaatataaacactacattgttttatgttgaagttcagccatttgcttattctacccttccacatttatccagcagcatattttaaattggatatgaaatctagtttctctaacttaaagttattaagctcctaatgaaggtagcattttttaaagtgcaagctgaacaccttatagcctatgaggaagttaggagaaaaggcttgaagatcttctgcacttactaggttatgtggactttggacaagctgtttactctttccatgtgagctcccccatatgtgaaatgataataataattcctacctactgggttgttgagaaaacaggcaaaccatctagaacctcagaacttggacaggttaagatcctctctaatttcttgctattttcagtagcacttatgtacttcttcttgtgtcaacttcttggacattagagtggatgaatgaaggttgacggggcttattaagacttggtcgtgttcagaaatttccccttagaaacaaaacctcctttgaccaagtctagagccaagccacatacaaggctgactataaacattacttcttttcatttcacaacattggagaaagaaaagatgaaggagtgggagccattttaacatggagttcagagagggcaattaaacctgaaaataaaagataaagaaaaagaaagcaaaaggaaatgccattaaacagtttcagagattttgatatttgggataatcacttttgttggaaattctcagaaattcaaatgacctgcttaaaatggatgagattgctccttatctgaccaacctggtaaaattctatcttgaggagttaaaataaggaactgcaggccctggggtggcaggaccacagtcaaccctcaaaaagaaaccaggaaggccagaggataaggactttaataacacgctaagatttctaaatgtttaaaaactctcctatctccttcatagttgctatttttgttattctaataaaatgagaaactgatcttagaggcagctccagaatttctatactatagaacaatttgattggaaagaaataggatgggagatccagcatctttaaaaattagctttcatttttgtcaaagtaatgtgggactttgtgacttaggctgtgtatgtaaagtgacaggggtgaactaatggagacgacaggggagtacatgtgctgcagctatcgctatcaccccaacttcaatttctgtgtcgcccctgctcaccattagcatggctactgattggactcttaaaataaggagaaataaattatatgtttgtatggtagagggacagggagagaacccccagagaacagaaatccagggatgaagcaggaggtgacagtcactaataaaccaagtgccacagaagaaaagaaaatgcagggatgagactgggaaagtatattgtggtcttgggcttggtggtgggaagaccctgaggttcctcttcagctcagctaccgatgagcaattgagtaggctttgcctttttggacttttgtccagagacctcaccaaaagtttctactggtaagtgggggaaaagggatttgtgtggtaggtggtgggaaaatgtggttgagatttctgtgtgtttgaagccaaacagctaaacacccacaagtggtaaattctgtggatatgtatgctcttagcttttttaatttataaagattatggtcctagatttttcagatgtgcttcgcttttgaatgtctgtatctgactaatgagggatgcaaaataaccaagaagttaaaagcgtaagatctggaaccaagtcattgttctttaatttactaactgtgagatgttaaactaatctagttatctataaaatggggacattaatggtgctgccatgaagaatgtggtagacagaataatcgtcctccaaagaagtccacagctgcattgccagaacctgggaatatcttgccttatgtggcaaaagactttacagatgagattaaggtaatagacctagagatgagattttcctggattaccctgatgggtcaaatctaatcctatgaattctcaaaagggaagaactttcccagctacttgtcagtgccagagagatgtaacatgagaaggacctgacctgcccattactggctataaagaggaaagaaagataccagtagccaaggaaatttggtggcatctagagctgggaatggcccttaatttataaccagggcaaaacgacagactttagacctataaccaagaggaactgaattccatcatcaacccaaattttctccaacagcctccagaaaggaacacagcctaccaacaacctgattttagtccagtgatacttataccagacttcccatctatagatgttgttgtagagatggggatctcgctatgctgcccaggctggtcatgaactcttggcctcaattaatcctccagcctcagcctcccaaacgctgggactataggcatgagctgccatgcttggctatactttaagataaataaatttgtgttgtttaagctgctgcactggtggtaatttgttacggcagcaatagaaaactaatttaagaagtaaatgagataatccacatagtgaacaggcatgcagtaagcataagtagtattaggctttgaatctgtttgtgttgcatctcacatgagattgtcctggtttcagtgatggagagtatgagggaagtgggttaaagccctcccagggtactccttatcccatcacttctgacaatggctaccacctgtaaaaaggatgaaaatccctatccttggaaatagcttgaggggaaaaaggatttgaggagaaaccaccaactaagtaaataaaattccatcttagatttggctatctaagccactgagttttagatgtcgagttacattttagattttaaattcaaaatctttcatactcacatagaccatatatcatatagtgtgtgtatgcattttatgtataatatatataattcacgtgtaataaacataaaatgttaatatatcttatatgtaagatataaatgatatatataagtgataaatatcagatgtaaatgatatataaatatataaaataaatatatatattttgagacagggtcttgctttgtcacccaggctggagtatggtggtgcaatcatagctcactgcagcagcaacctcctgggctcaagcaatcctcccacctcagcctcctgagtagctgggactacaggcatacaccaccatgccctgctaatctttgtatttttttgtagagacaaggtcttgctatgctacccaggctggtctcgaactcttaggctcaagccatctgcccacctcagtccctcaaagtggtgggattacaggtgtgagccactatgcctggccaatttatatctaataaacatattatgcaatattatatatcacatatatattattcttttgggcaatatatatgtatcatataaccatgtcttttgggtcaactttgaagtcctttctttcagagaaagaagtgttaggagggaaagtctgacagataccccctatattagtgaaaggggtggaagctttgtaaacctacagattccctatccccaccccagagattctaatccagtagaagatctggggctgtctccaagaagctacatgtgtaacaggctctccaagtagggtctggttttagaaccactggactaaataatttcaagggctcccaggatggttctgtgacaatactttgtgaaatttctgatctctagcttttcagggtaatgaagggttctggctaatttgctattctttatactggggctttacaccagggtagggagatttactatcaccccacaatttagagaaaaactgctcctataagggaagtggcttgggtcacatacctactaagagagtgagaactggaatccatgttgatgtgactcattcatttacacaacaaagttcctactatatcccaagctttttaaaaatttatgtaaatgtacatgaaatatcttccttatgaaatgtctaatcatatgaatacaagaaaaaatttccttcactctccttctccaacctcacattcctcctcaaggaccatcaactcatttgttcttcaagaaaacattctataaattatatacgtcatgcacaaatcaaataactgtttgattttttaaatcaaacaaactcatgtttaagcctttaaaaacattagattacataacttccttcgccacttaaaaataagtcagtacacatgatcatattattccttttaactgctgcatagcatattacatgtatctgatgtatgtattatgatgtatctgaatctatttgactatttcccattgaacgatatttgggttctttctacaattttgctatcacatgcacaaaaaaatgctaaactaagtatccgtatgcatgatgtgatttctctaagatagttagacatgtaaatatgagttcaaggggatgaatgttctgccccttttctacacagtttcattgtaactacatggagttggggagttggggagaaaataatggcccttatcctacaactctaggctgaactagatgcaaatcctgaaaagtacccttccctggatgttgatgcggaacatgataaaggctagctaatgcctcttatatgagtatttttgtcaccatggcaacatccaacagagctccccatctctttattactggtatcttattttaccgctcccaatgatataatggctctatcttggcggctcccttccgtcagcagctattctagttctcagtcctgattctgaatatatatacatacgtatatatatatatatatatatatatatatacacacacacacatatatatatacacacacacacacacacatatcaacaaatatatatatataaaacaaagtttggattttctgcatgaggactatttgggtggatttttttaatcaagtaatttcaatcatttttctcatatattttatgcatccctattctggtatccggtgaatagtcaggagaggtatgctattctcatacacatatatggaaaagaatgtttgtttcctcccctggaagaagctgtcccaaacttctttgagttttagcagcataggggaaatgatgaatggctcacattcttgtatgaacaacacctgccagcctggagcacagggcatactgcaaatcgatattgaggggaaagaaccagcctgtggagcctgtaagaagtttaagctgcagcctgacagaaagatgggaaactaaaattgcctggtgtttccctgccctgtgtctcgccccctgcaggtcactgggaccctggttttcactgtcatcactgctgtgctgggttccttccagtttggatatgacattggtgtgatcaatgcacctcaacaggcaagtgaaatatgtagaagttctctttttggcaagttctgtcagtgatagatatcatatgttcctcatacacagagataaagggtgtccacgtgggagacacaaggccatcctggcctgtcaggtacgatgtgcactgttccaaagctgataacttggccttgactccctaattaacaatcacgggggaaaaaaaaggaggcaataaataattcttaatctctgactctgctgtttgctgagctcacagaaaactccaggcagaatatcatgtgctgaaggatactttagaaaaaaaaaagaaaaaaagagcttattgcaacattcattcagagatctcagccatacatgaatgaaaagtgccagggaataaggatatgtttcactcaggggacattttttgagcacctgcttatttgcatcaggtactttaacatatgatctccccagctggatcctctcaacaaccttattatgcccatttccagtctacattaaaaccttaagaagccctaaactaaaagagattatggtccttccccctccattcctgtctcccataggtgacccaaagtaaaataatgtaaaactttagaataatattcaagaagctcaacaaagtttggattttctccacgatgactccttgggtgaatttttaatcaagttatttcaaccatttttctcatatatttcgtgcatccctattctggtattcagtgaatacatgggagaggtatgttattctcagctcccacagcccataagtcggggaaccaggacttcattcccctctgctctaactcagactgtgaggtcattgagggcaagactgatgaattgttcctcttcctatcactggtgccaagcacagtagttggcataaagaaggtactcaataaagaggggtgaattaatgaaagacagagaagaggaacctggggaagaggtggcataaagtgaaggtacaaacattttttcggtgccttctgtaagtccattatatttcctctgcttcttttagaacattgagccccaaggaaaatgaaagatactgcagggtgtggatatgtgaaatatgcgctgaccataatccatcacctgaaaagggctgcttcctgctgaaagacgtgctccgattaggtgctacaatcatcaggagtgtggcaggctgagagatccagggcatagtgctgggggtcaagagacaagggtcatatcttttttgtgtgggtgatgacaacacatgccaatttagcaggtttcctggaatttaacatcatttaacaatttaacattcaacatcaccatgacttgattaatagagccccttctctttttgtggaagaccttatcacatcattaattgaaccatccctggccgggcgcagtggctcactcctgtaatcccagcactttgggaggctgaggttggcggatcacctgaggtcgggagttcgagaccagcctgaccaacatggagaaaccctgtctctactaaaaatacaaaattagctgggcgtggtggcacatgcctgtaatcccagctactcgggaggctgagtcaagagaatcacttgaacccgggaggcagaggttgcgatgagctgcaatcgcacattgcacttcagcctgggcaacaagagcaaaactccatctcaaaaaaaaaaaaaaaaaagaaaaaattaaaccatcccctccagtcttagacggaagcttaggctaaggtttcacctccttcaatccaagtcccagagccagagctgaaaacagcgatccccatactggcgtccaggttagtgctctctctctatataggcccttccttttgtatttaaagagctgctgaaacaccattacataagaatgattttttaagcctttttttaatcagctgaatgacatttgggattatttggaaggattttaaaatcacactttcatatggttatgaaaattacacatgcctactgaagacagtattagaaaaaaaaatacccataattatttgctgagaacattttggatatttccttcagcttttttttctatgcatattattcatataaggcagccttctagtgaggcaaatgtttttgttttagttttttgagacaaagtctcactctgtcatccaggctggagattttcacttcaacctctgcctcctgagttcaagcaattctcttgcctcagcctcccaagtagctgagattacaggctccagccacaatgcctggctaatttattgtatctttagtagagacagggttttgccacgttggccaggctggtcttgaactcctgacctcaagtgatctgcccaccttggcctcccaaagtgctagattacaggcatgagctacggcacccagtctgagacaaatgtcttgatcagacttcttttataagaggatgctcaattcttcccctccctcagctggcattaccaaacaggcctttgcccataactagtaacccagagcagctgcattccaggtccttttcagagagtaccctcccagctcactgatgctaaatagtgaccaaatcatcattgagaggaatgacatgggaggaagatggcctcgtcttcctcccatgtcctataattcatctgaattatatgaagcatattacaaaatatggctccatgaaatttagtttccaatgttgtccattctgttacacagttaactctatgaggacccacaggagaaacttcctttgggtctcaataccttctcaagggccactaacttattgttatcttaggaattcatcaataatatacccggttgttttcctctctgccctggtggctaggaagtttactggtaaatctatagctcacttccaacaaagatacaccatctagtgtttgaattctgtatgctaacttgatttttgaccctcatcttaactttcccagtcttttttcttatatccacttttatgattctgttaaaatatgtataagtcaatttaaatcctgctgtgcagaagtaacactagcatgaaaatgtatctttttagcctgcagaatatatatattttttgagacaaggtcttactttctcacccaggctggagtgcagtggctccatcttgactcactgcagcctcaacctcgcaggctcaagcaatcctcccgcttcagccccctccaagtagctgggactacaggcatgtgccaccatgcctgggtaatttttagtattcttcgtagagacagggtttcaccatgttgcccagcctagtctcaaactcctgagctcaagcagtccgcccacctcggcctcccaaagtgctgagattataggtgtgagccaccgcgcctggcctagcctgcagaatagtttcaatttcaatagttgccaatatttaaaactcgaaaaaatttacataaaaactcagatttctgactttctgttaaaaagttaaaggtcatccaacaccagtttcacgtttgcagcttcctcttgctcctctagttccacaatcctgaccattccctattagtcccaaatagtagaaaatgtattttagtcccctagtcatcaaagtattacatgttcccttcatttatttgttcctgcctggttcttgttggcaatgtaatttataacctttcttttataggatatggccaactgtaaacaaatctatccatgtttatatgtatataaaacacataattgagatggtactatttaaacacgtaacaaacactttaaagacaaaaacaaaaatacatagaatgtttgaaatagtaaagctatttttctttatctcctaggtaataatatctcactatagacatgttttgggtgttccactggatgaccgaaaagctatcaacaactatgttatcaacagtacagatgaactgcccacaatctcatactcaatgaacccaaaaccaaccccttgggctgaggaagagactgtggcagctgctcaactaatcaccatgctctggtccctgtctgtatccagctttgcagttggtggaatgactgcatcattctttggtgggtggcttggggacacacttggaaggtaggcaaatttcataaataagcataaacagaaactttcatattttcattttcctaacacttgtttagaaaaatattatctttcttcttgtggaatagctttagagttgttttttcaactcatgaccctatgaggcatatcagtgttagatcaaatcaatgaaaaaagctgttgcgacagtttggttaattgttcagacatttataccaaacatgagttttgtgtgtatttctagataattgctttgatcctctagctttgtaagttataaaatatactaggagaccactacacaaacggttaactcaggaactcagcagaagagactaattagagtttttaacctgggagtccattgtttgcttcaccaaatcacactatgtctcaaacatccagttttccctttttaaattagaatttggcattcggatcagtcaagttcaaaggttcagtcaacatccccaactcccaattgcccaatgtatttgttatgcggtttctggctgctggtactgcttgctatctcaaagccccaaccagagatgaagcaagagatacccccatttatcacttgagtttctgttaggttttttggattaaaaacatcagtggaactcctttaccctcaaattttacttattcatgcaatggactacagctgttaggatttcccaccctatataaagaggagataaaaccagaatatcaaatgattattttttagattttctcctatttgagcccaccttttgtgcattacctttttttctcatgataaaaataatatatgaaaaatttagaaagtgaaaatgcctttaaagatgtaaataacaatttaggcaactagtttaataattctggattataattcacttagtttttcaattcctattataaattataatttttagctctctggttattaaaattctgataactcttcctcttatactggagcttttatataatatgactataagttttcttaactacaatatcatggtaacccaagttttattattatttttatttgaaatggagttttctccaccataaaagacagtggtcaatttcttatattttaatcaacttgctgatgttcagttgaactttaaatacgaatctgtaaaatacggattaataaactgaatttcatcatttaaaaaaattcaaaaataatttcaatgtgtatcaagttggtttaagtagtaaatggagaattctctagattaattatttattgctaaagtaaattatttcctagcaagtgggctcagacaaaaggaaaaaggaaaaataattttaaaaaaaatttttaagtaaatcaaattaagcaaaattaaattacgttctaaaatatgcacaaatcatttagcaactactgatattttatactacttctcattcctgaagaaaaaatgtaaaccctggttgcctctcatttagaggtaagattctgatgagttcagtgacttaacctaaaacatttaattagtgttaacatttaattaacatttaatggagccaatatacaaaccctctgaagtcttaggatttggcatcaacaatggttataccccaaaacaatgtcaaatgaccacgtatcaaatgacctatggtaaacaaaaagtgaggtttctcctagcttttagtaataaaatgatcccccttgaaaagcagcccaaaagtccataacttcaacatcaaaattaagacaaagttatcagtatccccataaaattatctttctagagagattcattgagaagtgacatgattttcattattaccagtgtcatttatctaccagtcaaaagtaaataaataaaaatgtaatacttccattattgcctttaaaaaaaaaagtgtttccttgcaattgtgtaatagtcaacagatgtctgtggccaccattttatagttttgggtttgcaaggccaatttttccaacctatgcatttacagtttaattaccagggtacggtagagaagactatggtctgtgcaatccacactaccatgagtaaaggaagcgatgcatagcttgcctttgaaggcatgcattctttcccatcaaaaatggaactcattaaaatgatacattaccctttggtttcacacagatcaagtccaagatctgtcacttaatagctgtatgaaaatgagcaagttattaggttctctaagacgttttcctcccatctgcaatgtgaaaacaaaaataatacctacctcatggcattattgtgaggatttaatgacaacaaatataaaaggtttaaaacaatgcctgacatttattaagcaaacaccaaatgtggcctcattttgatgatgatgatgatgatgatgatgacgacaatgaccatgaccacgacaataatcgagcctatactatctgaagtatttagagtcagattttaagaaatatgcttacatagaattaagcttctttttccctgattcagctatttcatgtattttttaaagtatttatttgtggccatttctaatatctgaacagaagttaaaagaatttaaattacataaagtgttcctgcatcctttggtggtagggaaaggggactttagggcatcaaagattcttccaggctatttcttttatgactttttatcttttttcccctaataaaagagactattagctaggtggtaacaacttgttaaggtcaattattgaatttgcctgccctctgtccctgtgtagataaaaagcatttcacaatagtctaaactactaaacaccccttaaactatttttctactctgtagctctggggctagccagctctaaatcactctgtttccctatactcatttcacattgctgctgtaatgaattatccccaatttagtggcttaaaacaacacaaatatgttttcttatagttttggaggtcaaaattccaaactcagttttagttagctaaagtcaaaatgccaataaggctggttccttctggaggctttgagggaagaatgcattccttgcccttttccagcttgcagtgaccaactatagttctctggcttgtggccccttcttccatctttgaagcacaacattctaatctctacttctgtcatcatatcacctgctcctcttctaccttactcttatcaggacatttgtgattacatcattggattcactcagataattgaagataatctccccatctcaagattctcaatcacatctgcaaaacctcatttgctatgtgacgtaacatttacagagtctggggattatgctgtaggctgccaggggacatgatttagcctatcacgtggatgttggacaatcactgcagtatgtgactttatagttttatgctccagaaaaaaaaaattctgtttggttggtgttaaagatacttgcatggaaaaggcccacctatcaaagtttgaagcagtgaaatagaatataacaaggacgtttacatttcttttggcacaaacattttcacacctgtctactcaggcatttattggccttaccattatctgcttgactgcaaaaaaggttttctgtgtacctcgctttcccattaattagaaataaaagtaacagatatctgcaaatgttgtcaattttcatctgattaattttgaaagtgtttttgttgctattgtcagctctattatgtattttacattggtcactaataatttatagattttggaaatatgctggcatacaatattaaaatacagataattataattctctagataaggcttaaaagtatgttttaaattacttccaaataatttatacaaaaggaaatttaactttgaaagttcctttcctatctagattaaaaacctgtgccattgaaagaaaaaaaaagttgtaggttacaactatagaattgaatttagctatcaccagacaattattctttaaaacaatcaacttagagaaaacttagttaactctttgaaaaactgtcataagtgttatcttaagcttgtcctcaccaggattgaatcatctctatcaaaatgtagagattaggcttgagcctgggaggtcaagacttcaatgaaccatgatggtgcctttgcactccagcctgagtgacagagcgagtgagaccctgtctcaaaataaaatagaaaaatgtagagatcaggtggatgcaacctaggttatcccatcataagtcttgcttattagtaatactttagtccatagatgagtcaaattagcaatcttggttcaagattccccaactagcttttacagcaaaattaaaataattgctcttaggttaaaaaaaatctcaacatgctctgaaagcgaataattttagcaagttttgatgctgaatttatattccttgctttttaaaatttcagaatcaaagccatgttagtagcaaacattctgtcattagttggagctctcttgatggggttttcaaaattgggaccatctcatatacttataattgctggaagaagcatatcaggactatattgtggtaagtcacacacacacacacacacacacacacacacacacacacctacctttgtctgaaagtaactctaaaggcggatgtggtagcactcagggatatttttgagtctagggtgacatcacagagggaaaggcaatagcataaagttgaaatcctgagttgggaggtttgggaccagtaagtaggaattatgatgctatcaaggttctcgtccatggcaatgacatcatttctagttgtatgatcacagacaaattatttaactctgactctcagttgcttcatttattaaatgaagtggataataatatctaccttatagggtgattgtgagaacatatgtaaaacgttccgcatagaatctgacatacagtaagctaccagtaaatgctagccgttgttattactgctgtggtatagcagacagtgggagactgctataccacgacccttaattctgcccttatggactacctggctgccatgtctccatctcttctatctgacaagaccttaacactctgaacccatctcttagaccacattccccagccctgtatgattctagacatgaccgagtgaagcattacagtggtggtgtccatagggaaagtgaatcagagagaagcagctgatatttaaaagttcagaataaaggaaggaggttcctcccacaaactttattctgaatagtgggaatcgctagttcttggagacagcttttcaaacattcagaggcaactaattagcagacatctgaagaaagggagaatcattcaatctctctctaaaacaaatggctaaatctgtaacttctgccaatgaagctctgattttgacggtgctaggttgagattttaacccattttcacaagacgtagttgcctttcaaggcacctctatccatggggatggggaaggagtggtgaggacgtaagatttgtatataaaagtatttttaacacttttacctacagaaaagacttgaattccatgtatcttcaatgatcagttgaagcaaaagactaaaatatcaagttaacagtctaattaaatctctttttattattttcattgttaataaaaataactgaagatcagtgtagctttatcaaggtaaagagtcaaccccaaatgtggaaagggctttgaattcagagcaaataaattctggcactgtctctgcatggccttaaatattaaatctgagcctcagtttcttctcccataaaatgcagataataacactatgaacgaagtcccaattatgattcttctttcttttctctccatttaaaaaaatacagtgtgaaaaaaatatacaaaatgtttttggtaaaattgaaaacaaatgctataaatatattgtaaaacaacctctaagtagcatagccaaccaacttgtactccctaactatcttctaaaattatgtttggccctattctgagcattaaagttcctaaaaattataggaaatataatttgacttcaagttcatgtgacttcagacctgtgagcttatctacattattctgtttttcaggtatagtattagctattacagaaagatagtacaacttagaattgagccaaataaatgatttttttcttacttaagatcaacaggctacacattaaaagtcacctgtaaaattcagctgaaatacagataccttatcacacatgtaaatgttcatttgagacattaagaacaatttgaagcattaaaaaatatattttgaaaacaattgtcaaagcatcttttacacaaagatcatccatttcaatttgataggcaggtagtttctaagaagaagcctctgcaaatcctatttttaaatagttaagaaaatgccaaacatttaattcagccttgcctgtcgatagtctctgaactttttatgcagtcagcaaatggctggacattccaccatttccagcacgactgattacatgtgcatttaagaaagcttcagaaggcagaatgagctagtgctttccaatgttttgtattcgtttaagtaccaaaagtctttcttcaaataaaattttttcgaagcctaatatttgaatagaataaagaagctgggtttccctggtttctaactggggaagagtccttaagatccttaacctcttctacctctctgcacctcccctcgcccctcgtcaccaccttaacagtgatcttgagggccctctacgttgtggaaattcagatagggcatgctgttctcacactaatgctctgttgcttgtgatctttggcaagttgttactcaacatctatcaagaggttggtggagatatgttctgatttcctttaatcccatgagccctaattaagaatattattaaaacattcttcaatttcttttctgaagataacctaaggcattatgatgtaaactaaaaattaacatgaattttaattaaataagatgatgtaatgaagaactgtcaaatacatgactaagcatttctttctattcatgtttccaactacaactgcatatgaggtcatatcaaatatctcctgcacaaactatgtctatacctaggaacaagggttcatccttccagtgaattcagggaggggctttcattcaagatatatactgtacttaaaccaaattgttattattgagatagtcctggttgcactttaacatttatgtttatgtttcatgcagggctaatttcaggcctggttcctatgtatatcggtgaaattgctccaaccgctctcaggggagcacttggcacttttcatcagctggccatcgtcacgggcattcttattagtcaggtaaaaactccccatccttatcccctactgcacccatctacttcatcctctacagtaccactactactattgcatcccctactgtacttcctccacttcatccatctcgtccctccctgactgtccattctcactgtagaccagcacagagagaaaagccaattctaccagtggtagtggaggtggtgtagagacatagagtttttcgttcaaaggtaaattattatcactcctcacttttccccttggaattgttggtgggatagcactggaggtgacctggcaagccaggtcttaactttagagctattctagagttaaattattccatttagatgtcaagaaatagaaaacttcgtgtttgactgcctgggtttcctttgttttaaacatcttacttgggaatctaatatgtaagtgattgccacaggaactcctgttcagctgagtctatccttcccttctaccctatggtgtcaaagggagtctgggaccccacacctacgacaatccagagggtagtctataaactgttgccataggaatcgccaagacagttctcatcacagtaattgttctatctataaaacccctttctataagttctgggtaatataagaaggaaatatcaagcaaaggtccaaagtcatggatgattttaacacagtattattctatctggttgcctggagaatacagctatgtgttgctttagatatcaagtacgtatttttgcctaagcttggttgattctcatcctgactgtccaattggagttaatgaaacctagggtaattccttatataacaaatagttcctaatttagttaaagtgagataaaaaaacctaggttaattccttatataacaaatagttcctaatttagttaaagtgagatacaatagtaacagtttccgtttttacttgaaccaaagttgtcagagactactattaaatagccaaagtactttttcaacaaactagtgtaaaaggtagatccaaagtattatgtagttgatatacttcctccttgcattttcagattattggtcttgaatttatcttgggcaattatgatctgtggcacatcctgcttggcctgtctggtgtgcgagccatccttcagtctctgctactctttttctgtccagaaagccccagatacctttacatcaagttagatgaggaagtcaaagcaaaacaaagtaagtctgtggatggtttttctttcttcctattgttttggcattatcagctaatgtaaaacagtgctttccacatgaagttggtgattaaatgtaagaagaatgtgcaaaatcgcttttatatgactggtgcatgtcatttggcacccataggcattcacttaagccgaaaccagaaatccatacacacggtattagactcaaccagaggtttctaaaagatccctccagcattatgcttctaatataatgaggatcatagttttatttgtcataagatgaagccaaatgttctatttttcttttaaatcaaagagcaggatctaatttaacaaaaaaagaatttccaacacccatgctattaagtaatacaatggggcatgcagaaatgtagctctttcattaacataaaaataaatttctttttgttttggcctgagttgtttcaacctgatcattttcttggacaggcttgaaaagactcagaggatatgatgatgtcaccaaagatattaatgaaatgagaaaagaaagagaagaagcatcgagtgagcagaaagtctctataattcagctcttcaccaattccagctaccgacagcctattctagtggcactgatgctgcatgtggctcagcaattttccggaatcaatggcgtaagtttaagaacacccactaactcttaagagcacagtgaattaaaatagggaaggcaaggggtacaagtttaaatagctaaaagatattttaaggtattggcatcatgggtcttgctataacaaacgtacattgagtaagcattaatttccattttgcttcaaaagttttctaaaattacttaacaattttttaaagtgtcaacagtcaatggtactatatatctattaaggtgaaggcaaaaagcaaaaatcttaatacatacaaggagggaaaaggagaataattatacaaccctcccccaaaaaactgcaaggagcttctacagttgagtattgaatttaggatttctgatagcccaagccaaatggagtcaagggttccctttatctatttaaatgaagtataccagatagccaggtgcaaagagcagttcctgccatctaagaaattttcactccatttgaggagatagcacacaaaataaataatagagtaaactggcatgatattgttgactaaggacggtagacaatacatgattgaaaaacatactgagcattaaactagctagcttttaggtcttacactgaaacccctgcatcatgcagaccaagatggttctactgacaattgactactagaggaaaaaattaagcatttgttaagaaactagattaaaaaaaaaaaaacaccacttctccccttttgttgctgttaaaaatgtaaactggacatttgctgtagtgagccaatgccaaatccacatgggacactttgtgggtgattgagagatgggcaaacacttgggggaggcaaaggaagtaattcccatccattgaaacaaaatgagacctgaacctcactccacaaactccactgtggtctccgtcctcctttaagaggtccttgatgtttatttttattaatactctgtataactttgaggctcagagaccaaactcatatctcccatctcagctctgtctgtatattcaatggcataaaatttaatttctctgaaccttactgtttcagcttccatcccagtgcctgacttaaagaggaatctaggaaatgttgaacctgaggctgttgggcagcctaaaaatggtgggatagtgtgaagcgtgctgtaggcctctatgcactgaacacagttggcacagtcctctacctcagtcctgtctgcaggaagaggtaccagcaataggacacgttaggtggggaaggaatgacaaaggatgatggatagcagaatgacctaaaagacataaatatataaacataactaaattttaaaaggctattagaaaggttgtgaacaaaatttctccatgtctactgagactagtgaaattttctggattaaatgcaatagcaactagacctcttatacatgctggtgagactgtaaaattgtcataacttctttcaaaaactatctggcaatatctatcaaagttgagcacatgcctacaccatggtccagcaattctattcctagttataaatgcatacatattccaccaaaaggattgtactagaatgttcctagcagcactattcataatcactattcattattactattcataatcaatagctaaaagacatttaaaaatgttgacatcatgatgtgtcttgctacaacaaatatatattgagtgagcattaactttcgttttgcttcaagttttctaaaattacaatttttaaaaacgtcaatagtcaatggtactatatgtctgtttaatattaaggtgaaggcaaaaggcaaaaatcaaaataaatacaaggagggaaaaagaataattacacccgcctcccaccctcccccccaaaaaaaactacattgcaagtggcttctagagttgagtattgaattgaggatttctgatagcctaatgaatagtaaattattcatttaggaatggcagctacctaaatactcatcaatagaatagtagtaaatcgtggtatattaatataataaaatactacatagtaatgatagtgaactgtctacaatacacaataaggatgattctcacaaaggtaatgttgactaaaagaagccaggcacaaaatgatacatattatgtggttccattcacatcaagtacaaaagtagacaaaatttatctatgatgtcaggagttgtaagagtggtttccttgggataagtgataaagggagatttaagaagtttctggaggggtggaaattatttatctcttgatctgggtgctagttacataggtgtgttcagtttgtgaaaattaattaagctgcatatttatgtgtacttttctatgtatattatactttaacaaaacgtttcaatttatttacaaaaataaagaaaatgcagtagcagagttctcaactaaatataaggaggacgtttaagcaatcagaagctttaaacactaaaggaagactgagggttctcttccttggaaggagaaaatctgtacgaagttctagggtgcatgccgctatagaaacaactaaaaataaacaatctaaaatatttcttgctttaaagatatcagtgccagacttcttaagattaaggctaacctgtttttactttgcagattttttactactcaaccagcatttttcagacggctggtatcagcaaacctgtttatgcaaccattggagttggcgctgtaaacatggttttcactgctgtctctgtaagtcaatgccctagataaatactctgcttgttccttagtccagaaattgcaggaggggtggggaacttcggctctaaaagcaatcaatgacttattgtacacatgctctaagtgtgtaaacccaagtgagtcatgagaagagtcctgtttgaataagccaaccactgcattgagattaggcataactgaggtgaatcgctgattctctgcactgctgggatgccatttagtcactcatttgtgaatttttaactcacttggggacacagagaacttcctccttgtgcagattcctaggttccttcttttctctgtacataaaccccttgggagtagctgacagcttgtcatttctattgatattggatggtctacttagattcctctttttacatagttcaaattcttttttttaccatgtgccttgggggaaacatataaaaataaataaacaaggccctctctaacagacatttaagcctttaagcaaagttaaacagactcagcaaatggtattaagccattgagcagagcttccaagtagttcacaaggttgtggcttccggtgatgcatgagagtatgtgtgagattatgagggaagtgacatagtaactagaaatgttattgttttcttccaacaaaaaaaaaagtcatatactcttcttaaaaccaaataactttatataagaagtgatggttcttatatattaaggatatataagaagtgatggttcttatatattaaggatatataagaagtgatggttcttatatattaaggatatataagaacctgacaacaagaatatctaacataataatctaagaagtaaacaaacaacaataaagacaaaaactccccaactaatgtaattcactgtagaatgagagtcattgagcttatttttatctttgttcaacaagataaaaacagcaaaaagtttattcttttcaattttagtcacaatactatactcaatataatttagtcacttgttttttattctctgcacatgaactcttaactattaccttagggtgatcaataaattacagcctggctacccagatcaaaaggcaggtttgtccagaccacattaaacagtgctggaccttggaaagagcaggaaaaacagataataacgaaacaccaatggttctgtagacatacctttagagataaggcctgtttaaaccaaaaggccactctaaatcaatcaagacctgtttctgaagtgcaatccaagggactattcacccttttgtctcctggaatattttttacaaattcttcaacatattttttatgatagattattattaaaacattttgtgtataataggattttctatgtaaagcatcaaattgtcaagattgggtagcctaaattctgaaaaaatctaaagaggaaacttctgtaaagtttcatttttgcaccctgctcccaaccccactgatgtgggaggagttgtttaagacagtgtcctaattattttgaatgtacctttttagagtccatcctttgattctgtttaagtttttgaacagggaagtgacataatcttttaaaaccagtccaaatcattaattaagcctccaggactacagatcacatttaaaatttttaattatattaatttttgaaacattgttttaaagttcaaaaagtataaaaaggatagtccctccgtcacccagtttctctccccaaaattaaccaatgttaccaaattgtgtgtgtactttcaaataaaaatatgcaaatagaaatatgcactgaatatattaatgtttcaccaaattggaagaacatcagtttgtttttgggaagagagactttcccaactccacactaattgtgttccacatcctatattttcttccacactaatgggctggtagaagagggcctgtaatcttgagagaaaaaaagcagaaagaaaatggagggatctaggaagcaggatgacactgagaaagaagcggtgactaccaaattggaactaagagcccaggatttgcgtgaggccctggggcaaagatgagcgttctaattgggaagacatctccagccactgaccatgtctcactccttgtcacactcatcctgagtgtacaccaggcctcagggacagaggccaactcaattttcaagatgttcagttttagagtttatagtaagggagcttattcacaaagaaatgcttctattttcttggtagcttgacgtggtggcaccaagccagttttgaacatcataataaaagagttaaaatatagagagaaatttaatgaacttgagaaaagtctgttttttccaacttccttctcaataattaaatatgtgctcttagcttatcatcttatctgaagtgatttaaaactctgatatgagtgtgcctctgagaaacaggctttcactgtaggtgaaatgtttctaagatgtcttcagagccagagctcactatactaaagacattggattgctattgatttactgataggctgatgagccagccaacttgctcaccaggtgccaaagtgagaaattatgacaggaagttttgtggggggtgagggggagagtgactcaccagccttggtaatattccaaggatcaggcaagagtataacaaactctggtcttggctaattgtaaaacttaaccattaatgcaaaggtccacaaaactaaaggaatcaatgacgtatctcctcagttaagataagaaagcattttaaccctttgctttaaagtgctaacttttaaaacgaatagttcactcccagcacaagatacaattaagcataccagaaaaatgcaggcctattttggttcaattatcaaattccacatgttgctaggtgagtggtcataataggactttattaagcagtgagaaaattggatgagaatagttgacacctgaacagttgtactgtttccggtgtcaatagtgcacagacccttgtaattataacttaggataactattagaaaataagttaatgtcatgtttaaatgtggaaccttcaaattttaaatgtacaggacatctattggaagagaccccagctgtacagtctgtgaatattgtacccaaagtgataatcctggagtagtggtaacattatggttctatctctataatggtctattcaaaccaatgtgactaaattaagcagatatttgatcattacccgctgtccactgaaactagctctgccacctggggctagagtcactccccaccttgatctcactcctgtaaaatggaaggatggaattgcctcttatctgttatataaattaaaatgacctctttggcagtaaaaatgatttaagtaaacagtcaatattttgtgactcacaaaactgagataatttctttaaaattgtcctaggtattccttgtggagaaggcagggcgacgttctctctttctaattggaatgagtgggatgtttgtttgtgccatcttcatgtcagtgggacttgtgctgctggtaagtttggtgcctgcactgaggtttttcattaacatatgatggtacctggcacctctgtggtccaggttaaagtgctttgtattcaaaaatatttgagactgacttacgaaataaagccagagcaacagcataaaatcaaaggagatatataaagaaaagatgaactagtttcttgggtttaagactgaatatcagcatgtaaattctggttgtcatccagggaggccatgtacccatggttagagcataggctctggattcaccgccaactgggttttaatgctgactctgccacatggcttcctgtgtgaccttgggcatgtacctgaacctctgccctcctggcattgtcatccactacttcacagggagctaaacatcttgtctggaaaccttagtatgagcagaagcaaaggtcactggatccttgccctgcctcttttacaggaaaatcctaatccagaggatttccttataagaaatctaaagagttatgcatgattcagactagaataatttctctcagaatagaataacttatacttgcttgaacaaaatacattagaaaaagttgtatgccgcctgtgaactcagaggctacttagctaaaggaaaaagcagccaaatgatctcagtcccactattgtttttgtttttttcctcagaataagttctcttggatgagttatgtgagcatgatagccatcttcctctttgtcagcttctttgaaattgggccaggcccgatcccctggttcatggtggctgagtttttcagtcaaggaccacgtcctgctgctttagcaatagctgcattcagcaattggacctgcaatttcattgtagctctgtgtttccagtacattgcggtaagcagcctaatattccacagatttactgaacagaagagagggtcaaaaaactgctaactcaaagtctgtgtttgctttctatccaggacttctgtggaccttatgtgtttttcctctttgctggagtgctcctggcctttaccctgttcacattttttaaagttccagaaaccaaaggaaagtcttttgaggaaattgctgcagaattccaaaagaagagtggctcagcccacaggccaaaagctgctgtagaaatgaaattcctaggagctacagagactgtgtaaaaaaaaaaccctgctttttgacatgaacagaaacaataagggaaccgtctgtttttaaatgatgattccttgagcattttatatccacatctttaagtattgttttatttttatgtgctctcatcagaaatgtcatcaaatattaccaaaaaagtatttttttaagttagagaatatatttttgatggtaagactgtaattaagtaaaccaaaaaggctagtttattttgttacactaaagggcaggtggttctaatatttttagctctgttctttataacaaggttcttctaaaattgaagagatttcaacatatcatttttttaacacataactagaaacctgaggatgcaacaaatatttatatatttgaatatcattaaattggaattttcttacccatatatcttatgttaaaggagatatggctagtggcaataagttccatgttaaaatagacaactcttccatttattgcactcagcttttttcttgagtactagaatttgtattttgcttaaaattttacttttgttctgtattttcatgtggaatggattatagagtatactaaaaaatgtctatagagaaaaactttcatttttggtaggcttatcaaaatctttcagcactcagaaaagaaaaccattttagttcctttatttaatggccaaatggtttttgcaagatttaacactaaaaaggtttcacctgatcatatagcgtgggttatcagttaacattaacatctattataaaaccatgttgattcccttctggtacaatcctttgagttatagtttgctttgctttttaattgaggacagcctggttttcacatacactcaaacaatcatgagtcagacatttggtatattacctcaaattcctaataagtttgatcaaatctaatgtaagaaaatttgaagtaaaggattgatcactttgttaaaaatattttctgaattattatgtctcaaaataagttgaaaaggtagggtttgaggattcctgagtgtgggcttctgaaacttcataaatgttcagcttcagacttttatcaaaatccctatttaattttcctggaaagactgattgttttatggtgtgttcctaacataaaataatcgtctcctttgacatttccttctttgtcttagctgtatacagattctagccaaactattctatggccattactaacacgcattgtacactatctatctgcctttacctacataggcaaattggaaatacacagatgattaaacagactttagcttacagtcaattttacaattatggaaatatagttctgatgggtcccaaaagcttagcagggtgctaacgtatctctaggctgttttctccaccaactggagcactgatcaatccttcttatgtttgctttaatgtgtattgaagaaaagcactttttaaaaagtactctttaagagtgaaataattaaaaaccactgaacatttgctttgttttctaaagttgttcacatatatgtaatttagcagtccaaagaacaagaaattgtttcttttcagtgtgatttgtttttcatttgggccaatttgggataaactattttcacttgggatttcaggatacagtcaaaataagcttaaataactcaggacatctttgtgctaaactgtgaactctggacaaaaatagagagtctctgaatagggcaggagcaggaaaatggctcctgggtggctcttgtatgcttcttcaggatgctgatggcctttgggaagcccagtgtaaacaatgataaaggagcttaacacttttataggtgatacatgtgatttaatcaaatcactattcctgatctcatttactaacagaataaagtggtaaatatttaaattaaaaattccaaagaccacttttaagtgcttcttcactattttgactggcccacaaacaccagaaattcagaccctgaagttttctgcctcagagaaatttaagtaccttatattgttccccttctacaactttttccttgcagagatacatgtgagttgacaagaaacattaaagggaaataagaagaagctgataaagctttataggaggaccaaagaactagcttactataataaaaaaattttaagtcttcaagggtatacatcataataaaaaatcaaattgacagtaattaattaaatttaatcccagggaaattagatgtgaatttgaacacctaactttccatgtactctctcatttttgtggaagtgtttctatactctaatgcctttacaaatgtgatttttctcttagctcatttgaagtatgagaattagagtttttggtctcgcattcacctgctacatctaggattgcccactgtcatgactcccaggaaaaggtcctatcttagcttcctcctccctactttcctctacatggtcagcactgtaatgtagctaagatatagtaaggcattgctccctccccctacacttcaaggagttcacagtctaatggggagttcaggaaggccagagtattaatatccccatctgtgtcttttgccttccatgaacctgggttttgagccctctcttgtaaaatgggcacagtaatattacctacctcagggagttgtgaggattaaacatgaagtgctaagcatagtgcctggtacaaagacagtactcaataagtgctacctaaaactagtattcatagcaatactgttaggataaagaattatcatatatgagatagttccaaatttttgtttttttaaaaaaaaaagagttttataagttcaagataatattttcttacttcaaagaaacaatctcacaacgagggaatggtaagaatcaggagagattactaacctggcagaggagctatcacaatcacaaaggtggtttttccagggcacggctcatccattacactccagatgtgctgacccctgccatttccccaaatgtgggaaacccaactgcacagtttgtagtagtgggtgactgtgttcatgcgctcccctgaaaacaacaacaacaacaaagaatcagaagagatactaggctatctaattcctaaatccaaacctgatatttctaagtaagattataagaatttttattgcattttctgaatttgcttttgcataagttatgttatttttacagggtctatattactattatttcttagaataatactaattataaaacaaaattctgtatatcacatttaaatgtaatttaatagaattataatcacaagacaagaccaaactttgttgataatcctcagtaattgcgaaaggggtatatacatgtaggccagcatacatgcataaactacttcttattgctagtctaattgttccatatgtagcaaatacagcagttcagcaatatcttgtgcttacagggtcctaagcagaggtgatgagtcaagtgtaaatatatatatatattttttttatttttcatggcaattgtatattagtaacctggggagaaaaggtttattgacaaccactctgatccatctgctgctat

SEQ ID NO: 126 - DNA, 9173 bp, Human
tgagccactgagcctggccccttggttattctttagattgataatgtaacagacagtgtaaatacatctacaaattcagaaggttaagaaagggtatgcaaggaaaaccggtctgtccctcagtcacatttttcaccaccacccacaagaaggcattgctatcaatttatgtattcctcccaaaacattcaataaatgtagaatcagttgcatacattcatcttgcttttattgtacacaaacagtaccacactctgtactttctcatttgtacttagctaggagattttacttcagttgaatcactttacttttagagatttttctctataagaaaatcagagttgctctttcttgttgatagctgtctatcttccagtggaaggatgccccaggatttatgtatccagcacctagagatgggcatttaggttacttgcagtatggcttccagatagggattggttcgcgtattttttcacataagtttaaaatgatctctcacgtctgtctcatcatctgtaggataaacagctgagggtggcattgttagcacagaccattctacctccagcttcagaatttcagggtagttattattttcacctgcccttacaccttccctgaagggagcagcagggatcatttccttgaatgtaagaatgactgtcacttgaggtgattcagcaatgctctactgttttagagtgttttagccagattacagagaaaggcatttacttagggcttgcttacagtaaacaggactgtatgggcatcagaaatgtgaattcttgttcaggatccaccgttatagcctctgtgactttgacctggcaatagccttccttctctggcctcagtgttctcctctataaagcaaggggctggacaagccatctccagtttcccagtttggcaacaccactcctaaaggatctgaagggacaacaggaggcccaggcctggaggtagggtagccctgagcctgtgcctagaatgggaggcaaagatggtggcaggtgggtgggaaaatgtggggtttgggggtcacaggagagaccaaggggcaggcctggagcatggcacgctccctgatcacagctctccactggaaggccatggagggagtgatggggagagcctgcaactcctggagataagcctgattctgactttctttgaaggatttttttctttcgacttctttcctgtgaaagagaatatccgagaaatgagaattttaactaaagagaaaacctttgcatttgctactgataaatatctggcctatgcgggaaagtcatgggtgccctgggattctggctccactgctaacaagaccttgttagaccttcttaactgcccctccagagaggagaaaggctcttggaggtagagtgagattggggagcttggcagagccctaggatgaactgtgtttttgttttgttttgttgcaggttggagcctttttcctgcagaaagagaagcaattccgggcttttccacagataacctgctagggctcgcagagacctggattctaaccccatctcgcctttcctcacctggggcattgttttctgcgtttgagaactgctgggtgggctggtgttacccaggatttttaaatttttgcaggagacgctttgcaggagatctctagggcttttttctgtgtcaattaaagagcctggccagctggacctgggctgtctttttgacaaaaacaaacgtcatccccctcccagctgagcacttgttagaactggactttaactgagggcctgaaccccctaacaacgggacaaacagtatgaaatcaaaaccgtttaccctcctcccaccagcggtttgcgtagggccttgggtgcactagcaaaacaaacttattttgaacactcagctcctagcgtgcggcgctgccaatcattaacctcctggtgcaagtggcgcggcctgtgccctttataaggtgcgcgctgtgtccagcgagcatcggccaccgccatcccatccagcgagcatctgccgccgcgccgccgccaccctcccagagagcactggccaccgctccaccatcacttgcccagagtttgggccaccgcccgccgccaccagcccagagagcatcggcccctgtctgctgctcgcgcctggagatgtcagaggtccccgttgctcgcgtctggctggtactgctcctgctgactgtccaggtcggcgtgacagccggcgctccgtggcagtgcgcgccctgctccgccgagaagctcgcgctctgcccgccggtgtccgcctcgtgctcggaggtcacccggtccgccggctgcggctgttgcccgatgtgcgccctgcctctgggcgccgcgtgcggcgtggcgactgcacgctgcgcccggggactcagttgccgcgcgctgccgggggagcagcaacctctgcacgccctcacccgcggccaaggcgcctgcgtgcaggagtctgacgcctccgctccccatgctgcaggtaccacagtcccgcccctgctccagcacctcctgccgcccgcccccgcccggcacctcccgcccccactcccctaactactgggtggggctgcagccgggcaggggcttgtccacaactagagcttgaaaccagagcacgtagttggggaaggagcttgggtcacccagtggagcccgctcattgcacggtcttggcaggacgtgctctgggagaagaaggaagatgttccagggcacacatagcttagtggagactcaaggaggaagctcccacttggccctcgtagcccagagatctttagagacccagacagcaagagtagagggaggcggtggggctgcctccgcagttgggatgccaccctgggtcccccaccagtctccttgccagcacgtgggcagccccagtggctggagcatccgggaaggcctaagaagggaatccctcctgctggcctccccaggaggtgtttggaatgtcctttgtaatatacgtcctggatacagtatgtgcttcccagatgtttacagaacataatgtgagagttgaggctaaaagcttcacttccattcattgccatagaaaaacaatgtttgatgtgtatgttgccccctaagaacatgacaatcaggttctttcctggatttaagcaggcatttgtttgtagcgggaagtggaggaaatgcctctttctctactccagcccctatctcctcatctggactgcttgcacgtcctgtcctgtgccattcttggaggaattaggacttccataccctgatagggtgttagagtgagtgtgtgagagtcagtgacccttccaaggagggaacagggatttcctgcggattctctgcccttcagaggaaatgaaagggagtcgtctcactgatcctcaaggagatggatttccacagggggtcccttataggccagtgtgctgattctgttcatgtacctttggactctatctgcaagatcctcttgccatgggggtggagggggtgttgcagagaagtccattaggacgtgggaaggcaggggccccaaaatagaagagggtagtagtttgggtcaggagagctgcattctagactccacttctagatgaactgtaccatccattcagggatattagtaaaatccccattttaaggatggagaagctgaggtttcgaggctccctactaatgcggttaggaactgaactctaatcctggcttctttagggttgttctcaacctcagcaaatgcatttgttgctctgctcccctgctgctttaaaagcagaaacgtggggcacccttgccaggccctgaaacttactattgtcaggaacagagctggcatgctgttgggacataactcttcctggaaaccattacaaggtcctttacagtgagagtcagtgaaaatcaggttagggaatgtggccatcctcatggcccagcctggttttgagggaaggaagtgatctcctgggggcccgaaaggggcagatgctttgggagggctcatggggtctgcaatgtttcctttccagaggcagggagccctgaaagcccagagagcacggagataactgaggaggagctcctggataatttccatctgatggccccttctgaagaggatcattccatcctttgggacgccatcagtacctatgatggctcgaaggctctccatgtcaccaacatcaaaaaatggaaggtgaggcccagcaggtgggtggtgggaactctcctgtcagaggatgtagcttgagtcggctgtgacaagcagacctggcccactccttcctggtcctgatgccctggaaagaaatgcttttcccccaaaacctagtggccatttctcagttaaactttgtcaaactgtgaacacatggactttcaggagaggagcccactggatgcaaagaaaatgtagttccggacgataggttacttcatgtctctgagctcctctctaaagggtgtgagaacattgagttacattgttccaaaacttagtacaagggcctaactgctttcacccccattgtatgatttgcctccctttaaaaaagttgtcataaaatagacataaaatgtactgttttaactattttgaagcataggtttctgtggcattaagtaacaataagtaatgcatgttattctgcaaccactaccaatatctaccttcagaattttcatcttcccaaactgaagctcggaactcattaaacatcaactctccattatcttaattatgtctgttttgaattctaccacttgagggcgacagagaatcaaagtcggagtgatttgatttgagaaaataaattacttccacaaacatgcctacccagaaaaagggaggattaaaccattttctcaacattttggaatttcatctgagaataacgataaatggaggaaagttaattcttaaattatccaaatgaatgccttaatcctcacttgatttagtttatgtaaaagaaccttgtagattgcagaggaaagttattcaaaatctagaaatgtcttctgctaaattcttaattaagagttatgcccactcttctaaccagatggcgggtgccaaaagtattcagtaggtggcaggaagagttgggaagagttttgtggtgttggtgaggctcttgccaggggatgtctctgtgcaggtgttgagagagtgattggtgagggagagaatggtgttcttgttctttatctgaacaacttaagacagactaactgcaggtgggaaaaagaggcccagagggagcacatcacatgacacctagtcccaggtccccgtggccagatcgtagggccactcctgcttctacaaaacctcttccatcagtcattgtctaggctgataattcactgtgtcttgttagatatgctaatgtcaagttattctcttaggagccctgccgaatagaactctacagagtcgtagagagtttagccaaggcacaggagacatcaggagaagaaatttccaaattttacctgccaaactgcaacaagaatggattttatcacagcagacaggtaggtggccttgccagtgtgcgtcgtcagggtgaaagggactactgccctacattcctgccaagccacggtcattcatgtcaaagaaggtccactccaaagtagacaccagaagtggttgtattgagccagatccacccctctgggaacctggaacagctaggtgaagaaagcctattgaacaggtcaatatgtcaccaccagaggtggaaaacctgcgctggaccaggggccctggggctaagcctgagctccatcactcagcaagccaatagctatggaagactttcctaggccccctaacgcttggatcttgggttcctcacctatacaagagaggaagggaacaaacttaacttagaaaagcaagtatctatttggacagctcttaacacttttttctccttgaactgtctaataaaacacaacaacatttttgtggcttgccagataataaatgagatcaaacagaccaagatttcatattgaggagtgctttaggtctcagtgaagtacaggttctgtagattttattgggagaaactgaggactaggccctgcttcacaggcaatgaacagtggggcacacacgagacatgttccctctgggttgggctcccctgacatcaggctatgaagcagacagctgtgcacacactgtactgtttaacacacatgggaagtcattattgcacatgccactcggtcactgtctctattttatgatgagaaccaggagggtgtgagatttgcctgcatcatgggcagctggtttcacagccgggactcttggcttggctctgcagtgctcggctgcactgaaaaaagggccagctatggctctactttccctgtcagcttgtcatctgctgctcttgaccttggtcttgtctttgcagtgtgagacatccatggatggagaggcgggactctgctggtgcgtctacccttggaatgggaagaggatccctgggtctccagagatcaggggagaccccaactgccagatatattttaatgtacaaaactgaaaccagatgaaataatgttctgtcacgtgaaatatttaagtatatagtatatttatactctagaacatgcacatttatatatatatgtatatgtatatatatatagtaactactttttatactccatacataacttgatatagaaagctgtttatttattcactgtaagtttattttttctacacagtaaaaacttgtactatgttaataacttgtcctatgtcaatttgtatatcatgaaacacttctcatcatattgtatgtaagtaattgcatttctgctcttccaaagctcctgcgtctgtttttaaagagcatggaaaaatactgcctagaaaatgcaaaatgaaataagagagagtagtttttcagctagtttgaaggaggacggttaacttgtatattccaccattcacatttgatgtacatgtgtagggaaagttaaaagtgttgattacataatcaaagctacctgtggtgatgttgccacctgttaaaatgtacactggatatgttgttaaacacgtgtctataatggaaacatttacaataaatattctgcatggaaatactgttatctctgtggatgtttatttagtgatattatctttttgaaatccctttgtccttcaccctcaccttccttatgcattttgtgcttttgtgataccaagatggtgttttgggtctgcagagccccttgtcctaactaccctagatcttgccccggctgccccagggtttccacttcccagtggcattgggaccttcctcctctgcctggccaggctgggcattcctgtgtcccacctctccattagtccccatcctccccagggtcctcagcctcttcctcttggtttggtttgtcccttccgttcaacttataaataggaacagggtttctttcctcttaaacacaagacagaagtgcttccttggttttgctccctagcctttcccttgcttgccctcccttcctgctagcctccttcttccacagggctcccagcatccttttgtcacttctgtttccatgactgagccctgattgcatctctcttctctgctcctcagagctcttcttccttaacactgtgccctgcttggtgtgcccaacgctgcccctcctaactcttgctcaccctgttgactgcttctttcctcccctccacatctttcctagcaccttgcccatcccaggggattccatctcggtctgctggctgcctccagccctgtctcttggactccccctgctctatgtcggggtgaaagcccacacttctccttgcctcaggccacctcttggaggcttggcatccatggctgcttctctcatctgtggggctggtggcctccctgacattctggtttttcctggagactctagctccctatcttgggtcccccctttaaccctccaaccccatagctgccaggctgccatcctctctgccatgaccctagggctggtgtgtaaactcagcactcagactcatcaagaggagcagccagaccgatgtgggacagggacagactgatagctgcagcccagggccaggaggtgtgttcatttgctcaagcaatgaaaccacatctggcacagcagctgcaattggagtcaccactccattaagcttataataattcactgttattgtctaagatccaactgtcttctgcacaggccaaatagcagagttcagtggggatgtggtgagaatcaccactcctgcatctttcaagtccttgatggtggcactaatttctgccatctctctgggattgcaatatggcttctgaactgatcaatgacagttcagagccagtgccctgtagttcctgaaaggtctgattacttcctttccctcaatccacaattgccccagtgaaagcctctaggtccctttggagaacactggtagaaatattttcaacagtgtactggggccctttctcaagggggcccagcccctccttcattcaaggggttctgggtctgtaaactggcttaagtctgagaattgattgaggtgccaagactctgtttttgtgattcaaattagatttttgttcacttgtccttgaactttcctgcttatacaagtcaataacaatttagtaggcttcctatcagtttcacttctaggaatgtcatgatcaagtagccaacgtcatagatccacaggagtctgactattctgagtgctgccttggctctgctgtccattagagtagctgtacctaccttgcctttgttggttgagtgcctccacttggtccctgccacccttggactctcattatttccattgcatttatgtttcccagttcagcagctgcagttcccactgtacggtctggcctacagagaagagcaatgccagagctcttctagtatgctgaggctcccctcataaatgtattccttatggtcaaggtgcaagataatgccctttggacctgcccatggtgggtaagaaagtcttaaatgacaaattccctctaacattctagtgtccctaagcctttgagttcatttctactgtaaatcaatgcagatctt

SEQ ID NO: 127 - DNA, 99656 bp, Human
  misc_feature (1)...(99656): n = A,T,C or G
acacacaaacctttttaaagaaacgctagaacccaaccccctctaggccagaggaaaacattacagctgtatacgcacttgtgcctgttgccgtagagtaatacggtagcagcaggagattacggtactagctgggctactgcctgagttacgtcagcgagagctgcaaagttccttgctattcttttctggtgtcggggagctgaatattaaaagggtgattgtggagttaccggttatctgcatttttttttcttttcttattttgactctttttaaaaaatgcaggtaaagtgacagcggttcaggagcttaaagacatcagtggtggaggggtgagtcagcgggtgcaaaaggacaaggatttggtgcctcggagacacggtcccctctccgcctccagagaagagcaggcaggcagctcccgggaccgaagccgggtccgcatcccccgcgcgcgagctggtggctcagcagcggcgcttcaggtgagtgcgccggggccggcgtcccgcagggccgagtgggtgagggcagacctcccccgccgtctggtgagacggaacccccacttttcccagcgcctcccgctttttccaccaggttttataccggcccctctaccccacccccgattcccttacatcttctgcgaagttgccttctactgaacaagtgtctttttaaccctgtgtttatcaccctcgaggtaggaggaaaagggtttctgcagtggcacgtttttaataccacctgtgaggtctccaacttgcgattttaacaagagtctttgcccgaggtcccacctcagggcccaaccccagaaggcaaggtgggcacttcctcacgccgcgctgtcctgccgagtccctgcggtaggttcgcagttgtggaaacccaggtttcttacgcagatggtggcccccagcccagaaaatcgaaggcggcccctgcccgctggcatgccggcttaatgtttacgcctgcaaaatccgcagtgactgtcgcttgcaaagctccctctgcagagggacgtcctccccaccccgtcccccgccagtcccgctacggctggcagctggagcccctcgggtggccaacagtgaggcttggaaaggcgtcatggacagacctgggtcgctttctgtcttcgggtccctcccggcttcgctcgggacctggctctcaagccagcttggctggtggacagaccggtgcgctctgcacacccgagtgcgaattccaccggcgtgagaatgagcgtgctcgtggtcctggccctgaggtccctgggtcgcagctgttccctctcccaggccgccccctccaggtgactgcgaggcaacctgttctaacggaaaccgagtacatcctccagaattccccggctaggatccgtgcgacacactcgccagccgcagtcgcccctccggggcttcgaggattttaatttcgtggtacctgcgctcgaaatccagacttcgagcgctggagcctggggttttggggatttgttttttttgtttgtttttcgcttcggatcctgaactcgggcagaggtgactcagtagagtgcgctaggcaggttcccagtggtgggggcgcgagatgagctccgaagtcgcctccaccgctgccgggcgaagcagcttctggaccgcagaaccaacccggctcccaactggtgtcccccaacccgtcaagctcagcacagcctctttccctggggcgcctagctcaaagccgcctttctctttgcgctctttcaggtggacgcggtcaaacgatgccccgcagcctcctgggtctcagcacatattccacacctacgtcccctgacctgtgctcctagaagctggagagagcaggagccttcggtggggcagctcaaaatgtaggtaactgcgggccaggagcagcgcccagatgccatcggtccctgcctttgagcgtcgacggctgatcttttggtttgagggagagactggcgctggagttttgaattccgaatcatgtgcagaatgctgaatcttcccccagccaggacgaataagacagcgcggaaaagcagattctcgtaattctggaattgcatgttgcaaggagtctcctggatcttcgcacccagcttcgggtagggagggagtccgggtcccgggctaggccagcccggcaggtggagagggtccccggcagccccgcgcgcccctggccatgtctttaatgccctgccccttcatgtggccttctgagggttcccagggctggccagggttgtttcccacccgcgcgcgcgctctcacccccagccaaacccacctggcagggctccctccagccgagaccttttgattcccggctcccgcgctcccgcctccgcgccagcccgggaggtggccctggacagccggacctcgcccggccccggctgggaccatggtgtttctctcgggaaatgcttccgacagctccaactgcacccaaccgccggcaccggtgaacatttccaaggccattctgctcggggtgatcttggggggcctcattcttttcggggtgctgggtaacatcctagtgatcctctccgtagcctgtcaccgacacctgcactcagtcacgcactactacatcgtcaacctggcggtggccgacctcctgctcacctccacggtgctgcccttctccgccatcttcgaggtcctaggctactgggccttcggcagggtcttctgcaacatctgggcggcagtggatgtgctgtgctgcaccgcgtccatcatgggcctctgcatcatctccatcgaccgctacatcggcgtgagctacccgctgcgctacccaaccatcgtcacccagaggaggggtctcatggctctgctctgcgtctgggcactctccctggtcatatccattggacccctgttcggctggaggcagccggcccccgaggacgagaccatctgccagatcaacgaggagccgggctacgtgctcttctcagcgctgggctccttctacctgcctctggccatcatcctggtcatgtactgccgcgtctacgtggtggccaagagggagagccggggcctcaagtctggcctcaagaccgacaagtcggactcggagcaagtgacgctccgcatccatcggaaaaacgccccggcaggaggcagcgggatggccagcgccaagaccaagacgcacttctcagtgaggctcctcaagttctcccgggagaagaaagcggccaaaacgctgggcatcgtggtcggctgcttcgtcctctgctggctgccttttttcttagtcatgcccattggtaagtcttgaacacccctcactttagcatctgggggtcttcaccctcctcggcttctgttaccccagactcccagtccgggatggaagaggaaggattagcatttcaaacagcacagctctagggcaattagaaaaggctcccttgtagaaaagtgaattttcattctctttctactccagtctcatttatattaggtcctagagcactttttcgactgtaaagtggcttccaactgatgcagattaattggtctctttaataagaatgtcaacttttcttaatgcctataagcacgtgttcaattaaaatgcatctgctccctctagtctcagagtctccaccaagtgcttaggctgactgtggaatgccattttcactctgctacagaatgcaaattctcttggcctgaaaataagtaccatgcttattctggacaaatgtgtgattttattattgcattaggttattcataagggtttgttataatggtctgtttatgttctatatctgtgctaattttattttctggattcagtatggaaggaattatggtcagccactaagaaaaaaaaatgattttatgtccaaaccaatttaagccttaaataattaatcatagtatttccaataagtaaatacttatttttttattttaataataagtattaaaacaaacacttctcttatccaaaatcatccgggaagttgcagataacactgtttgaaaataatacagtacacataatgttacaaatccaatttttgcagatgctaaattagctgttgtcaaaattaattagctcattataagtatcagcaagctgatccacttggaatagacatctatctccttcaatgagatcccaaaatggttgtgtgctatttttagtttgtaagctcaaatacagacccaaacatcgattatccaccaactctaaaaaacaaaacattatgcctaacattaataaaagtccatttcaagtgctttacagcctaatttaaatggcatatacttaaagtactttaatttgcaactctgtggaataatagcaactattatttttttgtgccacttatgttccagacattttcctaagctttttatttcatcagtcccctcgacaactcagtgagttatacacaattatcctgcaatcacaagccatgggaagggattcttcaggttctaataccatagccaccagccatggatagctatttaaatgttaattgaaattaaataaaattctttcagttcctcaattcctcagtcccactgaccacatctcaagtgctccatagtcacacgtggccagtgactactgttttagacagcagagatataggtcatttctatcattgcagaaatgtctgtcctgtagggctgccagagaggccctccttaatccaatacctggccttccattgtgcttgcccatcattattacttactctgctcctggaagtacatcacagctttgaaattatagaaattacactctttacctgagcccctttgcacacgtattcatgcgtgtgctcgctcaacaagtatttatggaccatctgttctaggcactttggatgaacagggcagaaaagtccttgccaatgagacggttgtatttggaaagggtagacataagcaaatgattgtatcctaaaatgtcaagattaacatgcactatcaaaaaatcaacaggatgagaggctagaaagtgacaaagacaatgagggcctgctttagtgggtagtggggaaaattctgtctaaagaggtgatatttgagcagagtcctgactggactgaagagcaaagcttgcaagatctgggaagaagagcttcctgggcagagggagcagcgagtacagagatgggaaagagcctgacctgttcagtgaagatcacagaggccagtatggctcaactacagacagggagggggcagtcaagttcaagaagagattggagagatagacaacaccaaagtcatatggggtctttcaggccaaagtaaagtttgcatattattctaattgtggtgggaagtcattcaagggtgtttagcaggtgagtggccagtctcatttatatttttgaaggatcattctggttgttggggggaaaattggctgtttgggggcaagagcagaagcagagactagttaaaaggctattagaagtcgaggggagagaggtcatgacatcttggactcaggtgagacaggtagaggtggtaagacgtgatcacattcagcacttattttacaggtaaagttgatgagtgtggacaagggtgtgagaaataggtaggtttagggcctgaatagctgagtaaatagtaatgcacttcactaaaactggcaaaaccaaagagttatgtggctgcaaggggctgcagggagtgagaagtatgagcctttcttttgtatcactgtgttgagaaacattcattagacatggaagtagagatggcaagtagggagttatacactttacatagatttggagcttagagaggaggcgggctacagatataaacttgggatatatcaacatctttaaagctacaagaatggagaggttgacaagagaaaagataaagagagtaaagagagataagaacagagcctctgcacctttagtcccagctatttgggaggctgaggcaggagaatcgcttgaacccgggaggcagaggttgcagtgagccgagatcatgcctgcactccagcctgggtgcagagcgaggctccatctaaaaaaaaaaaaaaaaaaaacagagcctctgggggtcaggtcaggaaaaacaggagaaacagccagcaaacaagattgcaaaggagtagccagggagaagaaaaatcaggagaatgtgatgtcctggaagcctagtgaaaatgtttcaagaaggcaggagtaatcagctgtgtcacatgcagctgagaggtcaggttagaggaggactgggagccaacactagatttggcagtaagcaggtttttagtgataggaggaaggcacgtgaggctcacaggtccagaggagtgatggaaccaaaagcctgattgtgtactttctagaaagaacaaaggataaaaaaagtgggaacagggaaaatagacaactcttctgaaaggttttgctatacactggagctaggagatgcggtgtagctggaggggtatagagagagctttcaatggtgggaggtggggatatgacatgatatttatattctgatgggaacgatgggatagagagaggcactgatgggataggcaaaagaggcaacgggattcagtgcccaaggggagcattgggaagtgacaaggagagcaaagtgtgtgagccctgaggcaagtagagacagagggagagagatagtgatctctttaggatatgtttatgtcctcagtgaaatatgaagcaaggtcatcagctaagagagagtcaggaatggggaacgatggcagttttagcctcagagaaggtgtgaaagattcatctttgagagtgggacagtaaacattttatggaagtttggtagagtcactgggaagtcctgaaggcctatctgagatttacggtcataacattaaagtacagcgggaaggagggttgtgtgtttttctctaagagctaagcagctgagggatacaggaggcaatgctgaggacctactgtgagtcccagagagtgtgtgtgtgaagagacacagactcggtcaggttagggagcatccacagccaggttgtagaaggagcccaggtgacgatgggtggcctgagagtttggagcttgcagtggtggctgagctatgcatagagatgagaaacaatggcctgggtcctggagtcatctaggggaggtggatgctctgtctagtcatagcccgctcttggatttgctctcccagggagtcagcagtgtggaggagaagatgttgtggtggagagaagtggtggtagacaggagccctcggaatcactgggcttcttttaaatcctagtgaggtgccaggcacggtggctcatgcctctaatcccagcactttgggaggctgagcaggcggatcacttgaggtcaggagttcgagaccagcctggccaacatggtgaaaccctgtctttactaaaaacacaaaaattagctgggcatggtggtgcacgcctgtaataccagctacctggtaggctgaggctggagaatcgcttgaacccgggagacagaggttgcagtgagctgagtcacaccactgcactccagcctgggtgacagagcgagattctgtctaaaaaaaaaaaaaaaagaaaaatgatatgacaggagggaagtagggaacatacagttcacagggtctgagtagctgctcagtagtgcaaaggatccctgaacctgccagtctgtggctctcaatttcttcctgacaccaattgagtaagagatgatttcctccaagaatgtactggctatgtaataagcaccaggctctcagctacacagaataaaaaagatgaataaaacacagtgccctcaagggcctcacagtctagttaaggagacaaattgtcaacaattattgcaagtctgtgacataggtgctcagagtgatattattacatggtgctcaggatggtgctcagaatgatattattacagtgtgctaaggaatatagcagttcattgtgccgagaggtcactgagaagcttctacatgcatgaccattgacagagcagagacttaaagaagatggcactacttctgctgggtcgtcaacgagatgttatatgtttttttattaactgtcttaagtatgtttttcatgcaaaatgtgagcagaagaataaatatactatcatattattatattcaagggacatacattcttaaatatgacgtgctgttttggagaaaagggctgtcggtctgcactaggctgcgggagaggaaagagattaaaaactgaaaccagggcagggatgagtgtgctatccacagctgagaagtgaaacacccatgtttaatagggactgacccaggaaaatcaggtgagtaggctatttgactgcaaaggtccttcctgtatattgtgagaagtctcacgttcccttttcccaagcttctctccactaaggctgggttgcttgctgcattgaatagcatgactgttgggaggaatctgacttgcctgcttccaagtctaaatcttgctaatcttgttccatttttgcatcctaaatgtttggttgaaattcagaatgccttcaagggaggggggtgccatgtgcagttgttaacagtcatttatactttggagcaaatgctttcaaaagcaaattttggccatggagatgagtagagagactatgacggtgtcagccttcaacctacaaaagagaaggaaggataagaactctgcttctcaggaagctccagcatctaaagcctatgaatcatctttgttgatttcatctcattgtctagagcccactagttccagaggcagtgtgctgctgaatggagaaactgttggcctgagatttaaacctaggctttctttttcatataacaggggatgttatataggtcagctgcccagcatagtgcctaactcagagtaaatggtaataaatgttcatcttaccagaattcaaatgattcacagaccattactgatgtatgtcaacatgcagatgttgccatgaggggtggatgtccttggcattctaagaaatagaaagcattggaaagaagatgaaaaggcaacaatcactgaaaacatagttacgtgtctgaattctggatatgttatctgatttaaacacaaaacccagcgttattataggacctaagccattgattgctgttgccactgaatcaaaggaggcagcattgggctgagatgtggcttacatagacatagaatatttgaggattatgtttataaaagaacagaaggcagcacattgatagagcagaaaaatgtgttttaagattggatgtttgaggagggcacagctggcagtggatttatcaggtggaggcaatgaggcagagaatgattcattcattcattcagcagtttcattgaacatatactgtttgccaggaagctatagaatcactggagataaagacaaataaatccctgccctaatggagcagaacatctgaacaattagatacctagcaaaggtatatgaaaaatgacaaggaaaaaggacaagtacatacaatgatatatgataatcccaaaccctctgcggatgcccaagataaccaggggttgagggttgcttcactgcaggtacaaagggagcagttccctagttctcatggaaaaggttcacctcttagagataatggtgtgaagaaaaactagtgccattaggatttattttattttatttatttatttaatgacaggatctcattctttcacccagactggagttcagtggtaatcatagctcactgcggcctcgaactcaagtgattctcccacctcagccttctgagtagctgggactacaggcatgcaccaccatgcctggctaatttttatattttatttttatagaaatgggatcttgctgtgttgtccaggctggtcttgagctcctgacctcaagcaatcctttttctttagcctcccaaaacattgagattagaggcatgagtcaccacacctggctagaatttattttaagataagaagccagcgtttcagttactcttactacaccacagaccatcccaaaaggtagtggcttaaagcagcagccatctatgtctcatgattctatggtcaaaagtacgtcagcacccagcttgcctggcaattgaagctggctgtgagtcttggtggcctctgttcccttctaaaccaccttcttatagcatggcagctctcccccaagaaagccaaggcagaaactgtgaggcctttgaagagctaggctcacacctggtccagcatcactgctgtttcattctgcagtcacagcaagtcaggagaccagcctaggttcaaggggaagcgagacagactcatctcttgatgggagagcagcaagtgtgtacacagaggggcagatcattgtagtcctcttgcagatcaccgacctcacaagtgtgccaaattacatttctctttaatccatcagttatattgagaacttcccatatgccaggcttcatgcaatgcactgagtaaaaccaactgggatctttgcctccctgcaggcttctaatctccagaaggagatagacattaatcagatagccacactaagttatcgaaaaccgtgtacagagcaatgaagggaacataaatggtgccttgaaaatatgtcctgtggctaagggtggtcctggactgggagggtagaaaggtctttctgggaaggagggcttgactattaagtccagatctattgaatgagtaggtgtttaaaggcaaaaatggggagggagggaagagaacgtgcgaagactttagtggggctggcttaatgtccataatgactttctagaaggccactgtggccagaaacaagaggccaagagataactggtgtccagtgaagctggaaagggaagaaccagactaaacaaggctttatagccattatacaagtttgtgtttttatccaaagatgagcaggaatgacatgatagagtttatacagcatttcaagattatcaaaggcttagtgaaaacaagattgtggatagaccagttgggagacctttatgcaggacaaggggagctgtatcctgccaagtgcaatccttctaccgtgccatttaaaaaacttatttccgtgagctgccacatcgttctggaatgcctcttttgtcactgccttcagagcttagatttatgagaaaagctttctcgtgatcagaaatagtataaccagacttggctttaaattaattttggctctttccacaagacaaatctgtcaatgaagatttaccatcattttcaaaagaacgtgctgcaggctcagaagacatcaacaatgagctctaacaatgctttgaacaatagctgactctttcaagtcaggctatagacaagtgagttattacttggatggagtaataatccttagtcacttagtaacaaagtcattgctgtgttctgtcacctcatggtttcatggtggatatgaggacagttttctaaggcattttctttgtctaacaagtttactgtattttagccctgctatttggtttgccagtttgacacttgcctagtggcttttcatttttatgttttctatttcttcgctatttgaatgtttcttttcttttcttatttttttctttaagttctgggatacaagtgcagaatatgcaggtttgttacataggtgtacatgtgccattgtggtttgctttacctatcaacccattatctaggttttaagcctggcatgcattaggtatttgtcctaatgctctccctcctcttgccccccaacccccaacaggctccagtgtgtgatgttcccctccccgtgtcatgtgttcttatttgaacatttctttttatatttttatccatcacttatatttctcctcttgtgaaatttcctatctgtgctttttggccactttttatacagcagtttttctgtctttttttttttatcggtaagctcattttatacattgaagataaataattacttatttatcacaaatcctgggttgccagtcttctcacactatatgcaaatgtgccaagaagatgtagcttattttccaaaaacggatgtgatcttttctacaaacttccatggaaatacacatatgcatgcactcacatgcacacacacacacacatgcatgcacacacacttttagttaaatttaataaactcattcaaatccaataatttatgcatcatctttgcatattcagtctcttggatgccttggtgtcctagtccattcaggctgctataataaaatgccatagactgggtggcttgtaaacaggaatttatttctcacaatcctcgaggctggaagtctgagctcaatgtaccaacagatttagtgtctgaagaagacctaccttcatctttatggatggtaccttctagctgtgtgctcacttggtggaaggagtgaggcagctccctggggcctctttctgcatcacctcccaaaggccccatctcctaatatcatcacactgggggccaggattccaacataggaatttcgggggtggggcacaaacattcagaccacagcacagggcctttcagatctgccctctaagatactgaccacgcctaggggcttacaaatgtcatagtagtcagagagggtttgactatgactccattgtttcctggctccagtgacactggctctgttgctgttggccagggagtcactttgtccctgcagccctgtgaacaactttgacaacctcctgcaccaaattctcaacaatgtttccatcccagtctcagggcacagagagcctggtgggttccttccacaccacactctctaccccaccacactggctgccacactaacaggtatggtggctctcatggaaaggactgactatacccagaatggagaatgggagaaagcacctctgcctgccccccccgcccgccccgctttaacttcaggcatttttttgttccagacatggtcttgctgtgtcacccaggctggagtgaagtggcacaatcatggctcactgcagcctagaaccctgggttcaagtgatcctctcttctcagcctcctgagtagttggaactacagacatgcaccaccgtgcccagccaatcttcaggcattcctaccactcttgttgagagagagggctcagaacaaatgccaactgcctctttccactaccttcttccccacctttctcacagtccctcagggaagacagggaagtctttcctcttccttgttctggctaaaggggacactcctcctcctttccagagtggcatccaccttctatggaatagcaaagccaagtggacagcagagagagagagaggcagagagagagagagaggcagagagagagagaggtttactaagaaaagaataaagatgaggaatattttaaaatattataatccttatacatatttaaaactatcttttccacttggttatttgcattttgttgttttatggtttttgcaaatgtttagacatttaaaatatttatatagtcaaatattttcatgttttttcattgaatgtgccttctcagggatgctcagagagaccttccacaatgtaagtctgtttcctcctcattcttttagagcatcatttgtaatctacctggaattcatgtttgtattttggtagattatgcctcacagtatttattttgaaatggttagccagatagtctcaaaaggcttatcaaataatccatcatttcctttcttatttggaaaaccacatttgttatattaaaaagaattttggatctattttggaatacactcgcttcttttccatttatctgtctctctgctctagtattgctgtcacattactttaatggctgtggttgcataatacattttaatattctctagtttaaggcctggatgaatattctttttcaaaattattttgtctattgtacattcattctgccaagaaaactctggattcattttgtcactccatttacttcccaaactacttttgaactgttgtttagactttagttttaagcacatctgctaacatctcctggaaaattgattaaacaatgaagttgggaaatgctgctttgatattttgacagatatgacactgtccattggttttagattgatatactccatcatatcaaagaaatatctttctagagtttacaaaactatacagatctagatttaaaatgtattttaatttgtttgcatttttaatattattcaataaaaatgaatttttaattttgttaaattaaacatttgctttattgatatccatcaatataatcttttttcattgacattgatttgataaaattttatttcatattattaacctttccatgtattcttggattaaattctactcagtcaggtgacatcaccgttattcatgttgctgtatcacaggaaatatttcacttctcatttgcatctgtgtttctgtgtgaaatgagtctattgttttacgttaatgcactgtctttgttacattttggtagcacgtttatggtaatttcataaagcgaattgtgacacttttcatgttttttctataaaccgtaacagcttaaataccgtaagaattatgtgttccttgaaggtttgaaaaacttgcctataaaacattcgggcccagctccttttatggatgcaattctttgagactggtttctatttcttccatggatagtggtctgttctgatcgtcagatttgataatctttattttcgtattttccatttgccttctcattgaggttcaagtttttagcatagacttctacatgaaattctgtaactttttatttctttgctatctttcttctttctttttgtctttgctcagactttctgaaagcctgtatattttattaatttttttcaaagaatccaagtcctgaatttattagtcattttaatctcttttccagtacattaatgtaatctctagagatttctctcttttattttctggttatattttgcttttcaatattagcttacccagaatgtttagttcatctattttaattctttcttgtctaagattaaaaacaatccaagctgtacatttgcttctacgcaaagtttagtttcttcccttatgtttgggtaggcagtgctgtcatccaatcagtctgccttcctgcttttaatatttcccttgtcctgtgtagacaggaaaggattcattgtgttgttgttgttgttgtttgttcatttgaaaatcattggtaattttatctcccactttctcaaatgtaatttctaatttaatgcattgtggtcagagagtgtgagctcaataatttttagcttatgggacttattgagattttcttaatgacttaatatgtaatcaataattaatacacaatagatttaatctttagtgtatatattaactaaacattaatagtggtgttttccagatcttctttatccattaatctttatttatcttaccattatctattatatactttacttgccaaatattgagagaagtatgataaagtttccctttgctaccaggtttcttcccactatttcttacatttttaacaagttttgctttatatatgtttatgtttttgcttcatgcataaaagatcaaatcaataatatcttcatttaaagatagactttttgttctatttaattatttttcctggatatgcacatttaaaaaaataatatttcaatctctaatctatttttattcacatttgttcaccattttatatagcagcttgtgtacttcacatcaaatggatttctcataatccatgtttctaatatgggtatttgtccttaataaggatttaactaattttcatttattgtgacagattatttggtgtgatttttgtcaacttatcatatgctttctggctctatgcttccttcgttttcactattttcagtctttcgtaaaacgggtaacttttttctttgctttttaattctgtggtggtttggaaagcttgtctcctgtttttaattttactagacataactttctagtttttcaaaagcatgtttaaaccttcagttctctctgttactccaccacccacctttgcccatggaaggtgagaagtttagcacactcttcttttcccttctctttaaaacctctatcttttagttaataaaatagtgcattttaaaactagattattttcattaaattttgtattgcctctcctgtcttttgtatctctctataatttagtttaccaattgtcctcctattatatattatgacttactcactcctgtgctctggatttttcttaatctcccagatggaacagaggtcggcaaatcatggcctgcttttgtgagtaaagttctaccagctaggttggccatgccctgtaattgacatattgtctgtggtgcttccatgcgacagtggtggacttgggtagatgctacagagactgtatggcccacaaagtttaaaatatttattattatattagagaagactatagcaccaaacaaaattttacctataaagatataagcaagggccatgtgcagtgactcacacctgtaatcccagcaatttgggaggccgaggtgggcggatcacttgaggccaggagtttgagacaagcctagccaacaaggtgaaaccccgtctctattaaaagtacaaaaattaggcgtggtggcacacacctgtaattctagctattcaggagcctgaggcacaagaatcacttgaactcaggaggcagatgttgcagtgaactgagatttccacactgcactgcatcctgggcaacagagcaacactttgtctctgacaacaacaacaaaaaagatataagcaaaacacattttctcagcccttccaggcctaaaccttaacacatgaaagacaacttatgtgacatagaattcaagtgagggttttgtttttcttttttgtttgtttgttttgcatttcaaaatactcttgttgcttctttgtttcttggcatttaatgcttcataaatgacgtgaggtccccttgattattgtttttttgtcaagtactctctttgtgtatttatttttcaactaagatgtttataaaatttttttctctattaaattaaaaagtatatatactggggacttctgtttggggtaacttttcattgctattgcttgagatccagtgcaccttttgctctaaagccaaaggcagcctcctttaatgatgatgtcctctgctctgatcttcctcttggaatttcaattcctatacctgccctgttttttttttgttttttgttttttgtttttgcatttctctctcattagtcacttttttactatttttttttaaatttccatttgaatttctcaagttcatgttccactttacttatttggtttttgtaatacacaatctccatattccctccatcccactccatatggtgggcacactgtccatcttcgtcaccccctacacttgttttgtgagcctaatagctgcttaagtcttgtttgaatacaatttagagatcatcctccgcatcaccattttaaaggtgtacacttgctctgattcctgggatcaatctcctctattgaatagctgaagcttttcataggaacagtactttttctctttttcttcaacctcatagagggtgacctggtattaaaatttgaaatgggctttgtttgaaactgggtaggttcctcttcaaatctttcagatccagattaaggggagaaggaaatggattgtctttgttgtgattcgaatctgccagagtacagaactctttatccttcaagagatggaagtaacatgttttgattttgcacagcaaaggctgtttctcttgtctgtttggtgcagggtgtgtagtgccctctcctccgggtggcatgactgaccgcctgggcacctgttgtagagaacctccttcgtctgctgaccttgcctgggaaagttcagggtccttcccatcctgcctggatgtaagcattgagatttacctttgacaagctggccttgatcctgtgtgtgtcgcagtttctgctctctcaagcccctggggctattcctgagaagctactggagccattccgtctttcccgtcttttgttgatgtgaaccgaggattcatcagttttttattcaggctggtcctaaccaaactatagtttcaagaaacttctcagagattctggcttatgaactttggctttccctaaggtttttagcagggaggtaaaatttcacctgtatgtgtattcttttagatagattgagaatttagaaagaggacctgagagttcagctccgtctggaattcactgcctgtgtgcaggctccttttcatggggatatcagagtgtgaagcagaagtgagtcacccgcagtgcgattctctccttcagtccttcagaagtttgtggttcaagacaaagcagacccatcctcctatagcctttgattctcaacagttagaggaagacaactgtgcagtgagacagtaacagaatccctacacagttcagtaagctgagctttcccttgtggctgtgatcacaagaggattgtgtgaaacgtgtagagtttaatgactcttttcctaggaaagaagaagtgaaaccattcacacacctgaggatgtgtgtgatgtcaagcggtagacttgtcagctcaggctgccataatggaatacctgggcaggtatagactgggcagcttaggcagctgacattgatttctcagagctctggaggctggaagtctgagatcagggttctagcattgtcaggctcttggtgagggttctcctgctaggtcacagatggttgccttctccctgcattctcacctgatgaagagagagagagagagagctctctggtaccttcctctttgtataagggcatgaatctcattatgagggttcaccctcgtgacatcatctagtcctaatcacctcccaaaggccccacctcctaacaccatcacactggtggttagggtttcaacatgtggatttggggaggacacaaactttccatccatattagtggtacttgcatggcacttactgtgtctaatttaaatcccagaagtagccaggaagatggaggttgctatgctcatgtagagataaggaaactgaggcacgcaagggattagtgacatcttgcaggagctgcctggctgccttccctgtaacagaggaaaggggcctgtctacagttaaaagccctggaatcacacgtggtcccgccctttgctctgcactccggtgtcctcatctgtaggagaggggcttgggttgagccagtggctttcaaacttctcagcttcagaactctttgtgcaaaataaatcccactcagaaatccaagacataaaatggataaaggcagcactgcgctggtgaagcagccagggaaccctgcgtcctgaacactcagccctcccttcctgctggcagcggctgctgagggggatctggagcacaggttgctctctgtgctaacagtgtctgatcccagactcattaaatggtatcagaagaagtttgggaagaagtgtggtttgtattttcaaaggagaaggaggcaaggttgacaaagggcacatgagctgtcattatactggaatgctggcagagcagtcgtctttgcccaaaaagggtttgaaaagggaacattgcacattcactttttttatgtgctatccacatttagcttattgccagggcattcgttgccagtgagaaacctactgtctacaagtggactgcgtagtttagttcctcttaatgaaaaaggttttggacatttacctggaattttcatgttgttttgtttcatgagtttgctgtcatttggaaattactaaagaacaatctcagaaatgggtttttaaaaagaaactttaggagaggaaaaaatcccaggataataaacttttcctaaagaggtcacattagtagttctcaatcgggggtgatgttgacctccaggaggcacttggcaaggtctggagacgtttttctttttgtttgtttttgtttttgttagtgtttttcttttgttttgtttcttttttttatttattattattatactttaagttttagggtacatgtgcacaatgtgcaggttagttacatatgtatacatgtgccatgctggtgcgctgtacccactaactcgtcatctagcattaggtatatctcccaatgctatccctccctgttccccccaccccacgacagtccccagagtgtgatgttccccttcctgtgtccatgtgttctcagtgttcaattcccagctatgagtgagaatatgcagtgtttggttttttgttcttgcgatagtttcctgagaatgatgatttccaatttcatccatgtccctacaaaggacatgaactcatcattttttatgactgcatagtattccatggtgtatatgtgccatattttcttaatccagtctatcattgttggacatttgggttggttccaagtctttgctattgtgaataatttttgtttcgttttttgagacgatgtctcactgttacccaggctggagtgcaatggcgcgatcgcggctcactgcaacctctgcctcctgggttcaagtgattgccctgcctcagcctcttaagtgggtgggattacaggtgcctgccaccacgcctggctaagtttttgtatgtttttagtagagacagggtttctccatgttggccaggctggtctcgaactcctgacctcaagtgatccacccacctcggcctcccaaagtgctaggattacaggcatgagccactgcgcctggcccaagatctctttctgtcatagtgtcacaattggggtgggagatgctgctggcattgtgtgggttagaccaggggtgctgccgaatgttccacaaccacaggacagcccccacaacagagaattaaccagcccaaaatggcaatagtgccaagattaacaaactctggtttatgctacaggaattcctgaaatttacaaaaatacatcagaaacagcacatttaaagcagacatcagttattattattgttcagattttgtttactgtgttgccaacatcttagctagtgattcaaaacaaaacaaaacacatgaaccaaacaaaccctgaggtctccagatgccttgaggtccccaaagaggcaatatttgtctactcactttgttttaattgtaattaaattcacataacgtaaaattcacaattttaaccatcttaaattgtaaaattctgtagcatttaatacattggcaatgttatccaactatcaccactatctagttccaaagcacttcatgaccccagaatgaaatctgggtcccattagcaatcactcggcattccccactccccaagtgcctggcagccatcaatctgtatggatgtgctgattcctgatactgcatatgaatgggatcatatatgtgaccttttgtgtatacctcttcattttgcataatgttatcaagcttcatccatgttatggtatgtttcaggacttcattccttttgtatgactgaatactatttatttgtatgaatgtaccatattttatttatctattgctccattgagggtcatttaagttatttctgccttgtgaccactatgaatagcattgctatgaacatccatgtacaagtttttgtttgagtaccagttttcagttcttttaggtatacccctaggagttgaattgctcggccatatggaacttctacgtttagctaattaaggaactgccaaattgtttttcacagcaaacgccccagtttacatacccaccagcaatgtttgagggctctagtttctctacatcctcaccattacttgtcattttttaaaatgatgtccatcctagtgggtgtgaaatagtatctctagtgatgttgctttgcatttccctaatgactaataatgctgagtgtcttttcatatgcatgtttggctattcatgtaacttctttggagttatatctattcacatcctttgcccattttttaattgggttatttgtctttttattgttgagttgcaggggttattaatatattctggatgccagaccctggtcagataattgatctgcaaatattttcattcgtgggttgccctttcacattcttgatagtatcctttggtggacagctgtctttaatttttatgacatccaatttatctactttttcttttgttgcatgtgttcttggtgtcatatatctaaggagtcattgtctaattcaagcttgtccaacccatggccaggacggctttgaatgcagcccaataaaaattcataaactttcttaaaacattatgattttttccaattttttaaagctcatcagctattgttagttttagtgtattttatatgtgtcccaagacaactcttcttcttccactgtggtccagggaagccaaaagattgaacacccctgacaaagttgcaaaaatgtatccttatgttttctcctaagagttatagtttctcctaagagttatagttacacttaggtccttgatccattttgagttaatttttatacatgataggaggtaagcttccaatttcattcttttgcttgtagaaatccaattgtccaagcatcatctattgaagaaattattctttctcccactgagtggtcttggcacccttgtcgaaattcaactgatcatagataaatgagttcatttctggagtctaaattctattccatcaaatggaattgtattccacatttcatatgtcctttatccttatgacagtaccacactgttttgattactgtagctttgtagtaagttctgtaattactacccactattttttacatctctaaaagtttaatagaaactttcaaaaagactacctctttttaaagaaaatgatgtagaataggacaggtacacaatgtctgtattcctaagttcaaaagctctgaaaattgcaagttctcgattaataatttggggccaaaatctgaccttatcagaactcatttggcagtgaactcaatctgaactcaggtgagtccatttgtagattttatattttacacgttgtgttgcagaaatatttctgtgtttgattgtagggtgctgacccatatcccactggtagtagtatacaatatacaacatatgatccagatgacctttataaaatctgaaaaatcctgatttccaaaacacatctaataccaaagtttttggaaaaggaatggtggacctgtatcacaatacttgttatctcatgatgctcaaaactcccatgatttttaaatctttgattagaaaaacacaaagggaaacaaataatcataacttgcttcatgcactaacatttatggcacaacacgtgttcgccaatttattaagcactttaccactgtgtctctgcagccattgtggtccgtttgtgaattccttcagatatttacacaatgtaaaatattgcacttgaatcagttcctttgttttaaactttgcccttctggatcatcccttaagaggaaaatgcccagcttttccatgaggcagttgcactgtgattctggtacatccaatcctatattcttagcccattactcattattcatttaattccatagttcctctatatgttgatgaggaggtatttttatcctcattttatctgacaaaaaaaattttgtctacatagttttaactgcctcatagagccatgttgatcatatggcaagcaaggtgttcaccatggccatcagttccaagagaaaatagacaatcctacactctctactccaaccctgatcagcccatgtggtttactggacaaagggaagaagtggacaaatgagaggaattgaagctgaaaagagccaggagaaatagagggatgagcaggaaactaggggacaaagggagtaaattattaacaaggcgagtctaatgttcactgagctctcagatgttgtcacatccagttcttatcctgcacttgctgatgaatcaagacatgttcacaaagcactgagcatctgctgcgggctcggttctgagctaagtcttctggaggtcaggaagaagaagagccactttcttcaagtctaatctggggaaaaggatagcacacttgaaacaatagtcatcaggacaagataacactcattataaatggtctaggaatccagaggggagatatgccaggcaggtcttaattagggaagtttccatagagggaaggagtctttaactgggtcttgaaaggtagaatttgaaaagccaatagcggatttgaaaagccaatagaagctccaagacaggagtgaacacagcacattcatgagcttgtgagataatccttgagtggtgtgtgtgtgtgtgtgtgtgtgtgtgtgtgtgtgtgtgtgtagaaagagagagagggagagagagagtcatggaaaaccagacttggtgggacaatattattatccagacttggtgggacaatattattgacccagaccagggatgatattattctgggtgtctttttgaaaaccagacaaaggttttggccatgaaatcagaggaagtggggagccactgggggtttgaggcagggaagcaacattgcagagcagtgttagaataagatccggtctgcagtgatcgcaaggtgtgttgaagtgagagattcaggctggctgtttaggtttgaatgaggacctgctcaggggtgtggcagtaaaatacagaaggtcggggagagaacagggatatttcaaggcaggtcaatgggaatcagagactgcgtctgaggaatcagagtggaattaataaaagaggcttttgagctttgcatgcagtagggattagttgtccatagacagagaggctgggagaggagttggttccagaaaacctttagtattgatcatattttgcctgaaatgatggtgtttaagtgaaactatctggaactatgctgtccaatatggtagcctctagccacatgtaataaattaaattgaaattgaaattagataaaattaaaaattcagttttgcagtcaggctaactgcatttcaagtactccatagctccatatggctaatgtccactgcattcaacagcccaggcagagaacatttccatcctctcagaatgttctgttggacagggttgacctagagatcagcagaaataattggcatttggtgaagaagagctcttgagatgagagtcatgggaatagaaaatagcaaagctaagggaatgggtcatctcctaaggagggctgaatgttagaatatgttggcatcagtaggcagaagaaaaaacaagcagaacttgcacaacgttttggaaaagtgggagactcaccacagcataaaatcctggcaacaaaaagaagagagaattttagtgaagagaaagtggcgccaatatcaaatgcagcagagaagtcaaggggaaagaaaaggagaaaaaaaatagcgtttagtaatctgaggtcatttgtgacctatcaaagctgatgcagagttgggaagagatgtcactaaataggaatgccaccagctttctcttgtgctagggtaggagtttgggatctaggaacagtttcagctgaatgttagggacaggaggcttgtcatggaggatgtggaaataaaagtggaggtgaggaacagagccaggacctgagaggacaaagcaaagggatgaaagattgtgctgtcgccatcaagggctccaccaagggtccaattttgtttttgtttttttccaagaaaagaaaaatgagtacagaaggaggggaatctgcaggcagtggttgagaggatttgaatgcaaaggatatctgggaaagcccgatgccttcacagttagaagggagtaagaaaggaggtgcaagggtggggtaggctttggtggctcagacagtgggtggtaaaggaaactgtaggtggccttgagactgtggtcctctgagattggaacggtcacttgaagccaacctgtcagcgtgatctgcctgctacttcccacttcccttccactggattctttttgtgattgctttccatttggatttcagtttatgctttatgtgctttatttcattgaatccatgtgaacatttgggggcagttgggcattttgattctcatttccaacctgaggaaactgtggtagagggtggttaagtaactggcccaggatcatgcagcaagtaagtgacagagtagaaattgaacctgttccctctggtgcccttaatgtcctctgtattcttcacccagtgcactcatgcaaccagcctattcctgctatcgtgactggcttgctacaactgtgatcatgcccacataaggctgtgtttgctctctatagccataattctcctgtcattactgagaggtggaaaaatgtttgaggggaaataacacaaataacacttcctggtgtcaacccagcctccataggggacaaaaatgcttagcaactctttcaaagtatccaagacaaaacttgacctttaagcggtttctccatttagagttaaatttgtctttagcaaatatggtttgaataaatcaagacttcctgttttagctatttaatggggaaggtaatatttccaatctgattttaaatttttcttttgccaaattccacagggcaagaaaaaaaaaaaaagaacgctaaagttcaggataaaaaagaaacttcccaagaagtgcattggtacaaaccactgctgtggtcatcataaatgtcttttacttttactttccaaaccaaagtctagggtttccatggtaactgctttggccccagctggtttgcatcatgttgtttgtatagaagccagtggagcagggctcgactgtgtcacaaagttcaggtgtcaatatggatctcccgggacaaataccagaaagaaaaatattgcatgcaacaccttctcctacccaaccgctactttcccaaaccccagcactctgctactgtgctgaccaaatgcccagggatttccagtctcccatcctctcaaagtcaaacctccagctgcatccagttgtgacttctgtatatgtctaactgtgtccattggaagggaattaaagcagcaggcttttaatttacaaatgttgcatccattcgaatgttcttgagcaatagtgtttcataagggttacaacatagattcaacaaccccagccaagtgcaaacttgagaaattgcagattgccttcctgtgattcacccagaattccagatggaaattatttctcaaggtcagtgcaaagctccgtacaaaggtgtctcctatagagaacatgtggtgtgaggctggaccgagggtcaaggcttccattcctgtttgctccttgaccttggcagagttagcctgcctccgagagcttctctctagccataggggaatcacatagtttgtgcctttcctccccacacacccttcccaccatcccaccccaagacctgctcctattttctaggcttggtgagggcactaaggaagaaatatgcctccttccgccaaattacttccatttcttaaaataaatcccagcttttctcttctgggaagccaccccagagtggactaagatctcaaaatatcttttatttactttattcaagaaacattgagagtctaccaggcgccagacaggaacagaccctgacttcaaggtggagactagcatgtaattaagcccaatgaaggaccaaaatcattgtacaggtacagtcagaggaggctggttttccagtttgaagtttaggaagtcaaaaaacttcttcaggccgggcatggtggctcacgcctgtaatcccagcactttggggggccgaggcaggtggatcacaaggtcaggagatcgagaccatcctggctaacacagtgaaaccccgtctctactaaagacacaaaaaatgagctgggcgttgtggcaggagcctgtagtcccagctacttaggaggctgaggcaggagaatcacttgaacccgggaggcggaggttgcaatgagccaagattgcaccactgcactccagcctgggcgcagatcgaggctccatctcaaaaaaaaaaaaaaaaaaattcttcacagagaagtgaagcaccacttaactagcacccttattactttctaataattagcatgcatagtccatcattatatcatatgctttaaatacacaaatttgcttgcaagtctatcttgatatctattgaaataaaaatctctaatgtaaagacctggttttcattatactgggtttaatatctgacttgtccaggatagagctagtcacatggtgagggtcaggtggccttaactctggttccagagctgaggggacacattagaggacacactggtggtttacctgagggggtggccctatgcagacattaaggagggaggcctttcctctgtgtccaggtaaggaatggatccacatctaaggccaaagctacagaatagggacttgcacacagtacctttatcttctaccacttttttgatagtaatggcatctacatttttaccatttcaaatttttgaatgaccctggttctcccttgctttgtgccattgggaagcttccttctctccagggctcagttcttcaccagctgaatgatgaaagtggcttaggtgatcatcttgtaagctctaaattgtattccataggcctaacctgaatcagtcttatcagcttggaatcctcagggcctaagcacagtagtaagtcctgaataaatatttgttcaattaaattgaagagactcaaagtcaagtcctgcattattggagagcatagagattccagttattgtcctctatttcagatgagcagcggggtgaagggtctggattttctactcatcactaagcctcggaaggtggtgtcagtgactgggatctgcttgtaagctgctccaacttggcttcttcagatatagattcatacagagcctagacctgtgccttgctttgttaaatatctgaatgtaaaaaggaaaaatacatcaattgtccaaagtacttacatgtggtcttataaactaaagaaagtaaccacatagatttctggtgcctgaaaaaaagaaaacatgttgtagaacatctgtatcattaaacgcctgtcctggtttgtactcaactacttggcttaactttgcacagtcctgagaaatacaagtcttgtgattggtatagacagccaactggagcaactcaagccggaaaaacaacacaattgtcctggttgtacattgcactgcatacaatcactaaaagacaattctaattctgtcttccgtattactttggtagagactaaagtaatgtattgagataggaatcaaaggcagtaaaagtgggaacattctgagcatacatgggaggtactgagcttctactcattgagccttctccaaacatgtcagctcactcaggtgtgtgtcagaatagcccttgcaaaattctctcataaagcaaagcttttttccttgtgctataacacatccccactgtgggcaccggttaggcctcaggctatctagcccaatggctactgtacactttttttttttttttgagacagagtctctctctgtcacccaggctggagtgcaatggtgccatcttggctcactgcaacttccacctcccaggctcaagcgattcttgtgcctcagcctcccaagtagctaggattataggcatgcaccaccatacctggctaatttttgtgtttttaatagagatggggtttcactgtgttggctgggctggtctcaaactcctggcctcaagtgatctgccctcctcagcctcccaaagtgctgggattaccggtgtgagttgccatgcccagcctggctattgtagactttaataggactcttaatttgactttaatgtgactacttctcttcctatctgtgcttcttcatatagactctgcaccgcacctggagatattttatcccacataatcaatgtcagacaaaaataaatttaaaaagcttttttaaaaagcctgaagaggtccaggcacatgcctggtagaggaaggtgaattctatatgcttttttttttttctattgacaaggacaaatatctctcagcacttatatactagccattgtatatctacctttgtttagtaatcacagttctattaggcagagtgaggtgagggcccattacccagttaggaagtggcaaagctgagattcaaaccaaaacccttggattctggaaccaagggctttcccctgtactatgctgccttcctgggctggtcgtttgcccttctctcagctctttggaactgcattcactggcacacagtctgaagggacctaagcactccccttcacttgccactcagcccaaataccactgctggcccctcctgaagagcacagagaagagaatctccttctgaacaatgagcagagattttgtttaaaatttctcacatctctttgtagtttatttttgtaaacttggcctataagacgctacttatttgctcttatatgtgttacctgcagttttaagaaagaactaccagaccaacaatatcactttggttttggtttatgtagcctaaataactcgctacacgtctcttcttaaagtgtttaatgagagtttttagtgaaatttgctgttttgtggaaatattcacactaggtgatggattatttgaaattttcttcctaatgcagcgctgctgtgtaagaacatcatcattgttcagtttggtgggttttctcttcaaggtgtagataacagtagaagggacttttgcaggattagcatttacaatgctttgtcagtcagggtcatgggattagactcactgagtcagtcatcagtagctccattaactgagacataaacagattcattaaagagtggaatgaggtccaaagttgatgtctttgctgagggtcacactgagctaccagctgcatcatgagcatctttagaagtcagcaccttggcaaaagacatgaagaccaaaatcaagaactacaagactgccccttttgacagacgcttccccaaccagactaggaactgctggcagaacttcctggacttccacctctgtgagaaggcaacaaccgctgaagggtgtgatgtctctatgtgtgaatgataccagtgtgtgtacaagttcttctgccctgctcctgggtttcagtctaggatgacagctgggctaaaggcacatttcctggaaagatctgaactggctgcatcttacccctcctatgtccttcatccttctcccaggcaaagggaaacctgggtacatggtgatcctcaccctggggccctgaatcatgacttaactatgaataaaaatgctttggaaaagcagggggaaagaagtggaaataacaaaaaataatgaatcagggagggcattccagggtgcattccagctttgtcagtaacccctttgaccatgtcactgaatatctctatgaggaattgcatttcctacctgacatagtttgagtatatccccacccaaatctcaccttgaattgtagttcccataattcccatgtgtcgtgggagggacaagtggaaggtaattgaatcatgggggcagtttcccccatgctattctcgtgatagtaagttctcacaagatctgatggttttataaggggcttctcccttcgcttggccctcattcttctctctcctgctgcgctgtgaagaaggatgtgtttgcttcccctttcagcataactgtaagtttcctgaggcctccccagctctacggaactatgagtcaattaaacctctttcctttataaattacccagtcttgggtatgtccttctagcagtttgagaacagactaatacactatgtgagaaattgggtttgtaaaaactgccccaactacctcaaaatagtgttgttggagaggaaaagaatttgcacactacaaaaagttaagtgttataaaaatgtaagattgtcttgttacttagatcacaaggcataaagaattgctagctaaagtagtagccagttcccttgtgatgagttatataatggtgcagtcagttgataagggtcaggccaccaaagaaaataagtgtttaaggacatatacggcaacatgacagagtaacttgatttctatgaaatgtagtaataaaaataggggcttgtatttgcttgacattggctttctttttaatttcattgtttatgatttatttttcatacacttaaaaaacatcatggtgcacaatggatttgagaaaaactggccctttacacgatgatttgagagcttggtatatgtggcatcaaaaatcccaggaaacaagtgaagaattaaaatagaagtctgcatgttttacctatccagcaaaaggtggaagtggaaaaagtccagagttccaactggatgggtcagttctctgccagatgttggtgtcctgtagacccagccagaggacatgctttgatactctgcccttggagatgcactcagtattgtcagaggaatacaggtccaaagtgaagaactatctgactgcaggggctgatggctcttctgggctggtgggatctacgtggagattgctgtgctctacaaggctaaataacactcatgagaatctatggtcaactgaggaaagagagaatgttaatttccatgtctggaaacatcagaaatggctgaataatcagcagatgtcctgatttgtgttttggtcttcctatctgtagatgaatgcaacttaaaaacacatcctaatatcaaataggaaaagctccccctttccacccatctcattttagtttttcacctataattattcttccaggtaaaatttagaattattttgtctagttctaagtaaactctttgttgaaatgctgttaatttataaatcagaatggataaaactgatatcttcacaacctaaagacttcgatcccagaatgtattacttctttcaagtcagttcatctttgtagctttctctattgtttattgtatacattgcttattaaatgtatcccttggtattttatagttttgttgctactgtgagtagaatatttacattctaattacaattaatgctggcatataagaaagctatagattttaatatatttaacctttacccagctaccttcctgctttcttattacatactactaataactttttccagctaataacttttgagttatccagacatacaaaaattatcaatgtttactaactctgctcctcctccttctcaatacatataactcaccttttccttggctcattgcattaactattatttccagaacaatgctaaatacatgaagatatcctattgaaatataaaaggctttcttttcatatcaacagaaataagttattttgaagccatatgccagcttcctcttcctctccatagtttcttaaacacttgctgatagaaacaaaatctcattcagagaagtatgaaagacagtcttgaggaaaatatgcaagccgaatgaattgtctctgctttgccttagcaatatggtgctaggagaaggtgggatttagggactgattgtatgtctacttatcaggttcctacatgttttacagcagcttaattgctctcaagaggagtgactgagtcattgctgagcttcttagtttgtgctgggtcagagcagttgcctgaattttccagcaccctatgcaaagttctgccatggagatagctgggtgtccttctgaggtgtttactttgaattttatttttggttccagtttgaacccatattcaaggtacccaaccctgacaagcaaaagggagacaaaatttatctcttggttctattcccaacccattcaaaaatagaaggcagtcagagttctcaggagctaagacgatggggggctgggttgcatggcttccatgtggcgaggtcaagggaaatcatccggccagtgtcactgctgtaactgcccaggctgagagtcttgtctgtttcccactggaatggggtccagtgaggcttcagactcaccagtgttagaaataaattttatactctgagaatcagagaccctcttttcttctgcctactctcatcctttatcgatttccacacacacgtatatctataactttactaatatacatacatgtgatcgtgcacccgtgcaatgggcgctgcagtgtgccttctgtgtcccttccctatggtgctgggagggccaatgcctggcagctcccaactgtgtctcactcctggtggctgcccactgcaaatgagagtctccttcttcctgcaggcagccaacatccaatgactgggcagctgtccagagcaatgctgccttccccgggatgggctgaggcttttgtcctgactgcatggcagcccagcttctccttccaccccatcctgcttgcctccctcccccacaggtgtgacaaggagggcacatcctcctgcaggcaaacctccgtctcagagtctacttcccagagcctgtttctcagtctacttccctgccctagacaatctgcttgaactgttaaagtgtcatcatttttctcattttcttttcttttttgtttgttgggagcgactaacccctcttcatctcttgtgccatacaccatcttcagcttccttaatttctcccaagaaaacacatgtccacaacctgatttgtgtctgccagtgttttcattaagttttctctgaacggtgtctgtagtctattgtattcctcctttcctctatcaaggatacttatctagtttccagacttttgcctccgcaaagagtgcacattgtttacagaggtccctttatacctagatgcttttacttctatgggagagattcctaagagggggatttctggtttaaagggaatgcgtgcttgcaattttaacgatgttgccaggtcactttctcaggcgtctgggacagggtttcaccagcaaggcaggagagcagcctgctgcttgttctcaccatgagcgtcccacctggagatcccacctgaagatcaaagggctaatccactccaaagacttcgttcccaacttcaacatttctcgctgcaaaccgaatctcctcccttcccttgtgaaaggaaggggagattgggagggggaagagaaggctggtgggccagaggagcgtccctggattctcagatggctccttcctctaaatggatgagaaatgtggggtgagaccagcaggcctctgtccccactccagcctacaaaccacacggccaggcccaggtgtctcttagggagaggtgggagccagcctggagcacaggactccacagggcagggagcccacagcgcaggggcggtggctgctgacagccccagagaccatgacaaggagcactagacagcaaagaagatgcaaggatggaaaggaagctgcatgcagcgtgttccccccaaggcccaaaagggtccttcattccctgcgagtgaaactatgttcttcttgtcctggaaagaaaacaagaagacaattggcatgtggctgatctacccaggctggaaagaagaaagattgaagtgactattctcaaatttaggaaaatctatttaggatatttggacacagatgtacctcctccagtgtctaggacattgggtgtgacctgacacttccgtgacctctacaccctttccaaactggccatgatcagtggtggggtgtgggcagggggttggtactgggcaatcccagcagagctcagtatcagtctgcccacttgagcactggccatggcatagcaggctctctctctttctctctctccttctctctctctctctgcctcgtcatcattggcatctcttctccccttacttgtgtgtgaaattaagctgaccttatatgctgtttttgtgacacagaatcatccataataagcatttcataactcaatctgtttctgccaattgttttaaatctctcttattagctatgttaggcatgctattatcttaatcttcttaacatccatatgagagtttgacaagtcagcaggggatcttgcctttgctgccaaggatatgtgattaggttacagctccagagactgtgatggcagagccccaaccaggccaatctcctaagtatatttctttaactataaaagacctcagtcccccaaagtccaggaagtaacagtgcatccatgagaacaaagacacttctacagaccagtatctggggctttcatccagtcatttaactttgtgtatataagataaaaagaaaaaaggtgagaaagactccctcccgcccgcaatgaccctaacctcatctgggaggctactgcaacaacccagctttgttctggcaggctacagaaacaattttaatattccaaaagagttaacacaagcccagagggagtagttgacactctggtagaacttgaatcatgctttcccctaggatcatctcagggtaagaaaataatttgagttttggcagctgtgatgactgtgggtagaacagcttatttcttggttaattccttaaataaaccttcatctttgcaaattcttgttacagccacaactgatgagaaggttcaactatgctgtctctctagccaaaccgtctttggtttaaccctctgttaactcttcccctttctttgttaggagaatattgtctggcttcagggtgtcatcttttcatggccatttatttccctgtggtccagtcatgtgttatcctagaacgaacaagggagtcttgattagtacatttgggattctggagatggcagaagaaaacaaggctccaagccagctttcagactgcaagatcttagggagcatcataataccacagccaagttcctcccctttcttggaaataagggtttcaagagctgccttcaagctttgagggcaggtgcagaagaaataaaccatgaagcatctcttccaataccagtcctgtgtgtctacccatccttcggctttctctgcaggggacctgcctggaagcaatctgagaagcagggtcagctctgggtgggaggtgatacattaacagttttgggctaggctgggttattgacagttctgacacagatctcagaatggagtccattagaggcccaggacagtgctcactctaatatacacttagtgctgtcttcaaacatccgacattccttctccctgaaataccacaatccttccccacccacccccaccccccagacacacacccttgacatttaggagtgtggagccactatttcccaaatgtgttgacctctacttggcttgtttgtaccttagctaaggattttcatgttcttctgcaaaaacttaccaggggcagcgtggggctgtctataagtgatgtgttatggaattgctgatttttttttccaggtttcaattttctactgggttgtccttctgaattccattgcagcctttctgcctatatttataataaactccaaatacagggagtgctccttgtttccagatgtggaatccaggattatgtaacttggagctgtatttctttgagaggtgattaagcatgttatcatattatcatattaccgactattcacttgttatttttcctttcgtcattcattcaatcatccttctttttcctaactatattttttcctaagggtaaaatttataatctaattttaagtaccaaggaaaattctattagaatgacatatttattaaaaatatgagatggattgggatctttgccatatctttgctttaaggagcacacatagcttattgtttcctcacttttgagaaagttccccaggcaccatcttgttttttgattgttcctttcccagggcagttctgttttatacacgccaccagtagccacttgaatttgccttgctttgtagccactttttgtcagcctatatttctctctctctttatatggtcttgtgtcaagcaggatttatctagaccctggctttggcattaggtgagtctcccgagcattgtgagtggaggttcagtgcctgctctggtgacaactggaaggcaccactgctcctagtgtgtttcccagctcccagcagtcatgtatgtcatgtggctctgatgtactgccatgtgacgcttttacaaaattatcacacaccagccactatacacttgatgggcaccatctcatgcataaaaccttataaagcaggtactgtgctttttaaaattataaagaagaaacaaaagaatcctaagattaagcgatttggctcacagggcaggtatttgggaaaggcagggttggaatgaggtcctgggctcttacccagaattcctgcatgtggttatcacgtgtccctagcaaatagccataggcatgatgattgttttcagtgttcaggtcaattgaatactagatcactgaccacaaaggcttgaaataattgaaatattcaccctgtgacttcatttaatcaaggagagttcgacagagaatgtgatcctctaaaatccagaaaatgttgtcatattatgcgaatgccagtatcacagaaaaataaaattaacagaaacaaaatcagtcctcggcatcacagacctgtgcctctgccctacattcttaaaccctcccttctttccccagctgatagagcttgctctctggagacaagaagcacatttaggttaaggtgttaatgactgaggaaggactcatgtattatccttctaggtgtgtagtgttttttattttaacagggatagggaaaagggaagggagctagcattcttgagcctaacaccaaagtttgtctctaatgaggacttgaagctttcgtaaccatggatgagtaggaggtatttgtttagacagtcatctttattctcgacaaaagaaaaaaaagaaaaggcagactggtgtcaagcactccaagaacagtttcttaatacttgtgaagtaagtggtattattatctgattttacaaataagaaaggccaggtgcagtggctcatacctgtaatcttagcaccctgggaggcccaggtaggtagatcgcttgagctcaggagtttgagaccagcctgggcagcatggtaaaaccctgtctctaccaaaaatataaaaattatccaggcatggtggcacatgcctgtggtcccagctactcaggaggttgaggtgggagggttgctggagcccagaaagttgagggggcagtgagccatgatcacgccactgcaccccagcctgggtgaaagagtgagaccctgtctcaaaaaaataataataaaataaagtaaaataaaaacaagtaagaagacagagtctcagtgctatgatctgaatgtttgtgtccacccctccccaaatttgtatgttgaaacctaatcaccaatgtaatagtactaggaagtgagacctttgggaagtgagtaggtcacaagggcagagcgctgatgtttgggattcgtgtctttatggaaaaagcccaagactgggcattcctgttgctaagaaaaaataaataaattgagcattcttgttgctaaaaaagaaaaaaaaaagaaagaaaagaaagaaaaaccccagagcgctgtcttgtcccttccaccttgtgaggacacggatagaaggagccttctatgaaccagaaagtggacctcaccagacaccgcaactgctggtacctggatcttggacttcctggcatctagaactatcagaaatatgtttctgttttttatatgccagctagtttaggacatcttgttatagcagcccaaacagactaagacactcagagaaattaagtaagtatcacatgtcactaagctggcaagtggcaaagctgagatttaaatccacatctgtctttaacatttccattcaacctcaacatttcccataaacaagttttggctgcaatgagacattatgattatagctatgttatcatcttgtggcagtttttagaaaaacgcaagtatttcataaatatgaatcattgttgtattgtcataataataaaaaggttaacctttatttagtgcttacaacatgccagatactattttaagcacattgcatgaatcatctaatttcttcttcacgcagtaccatgagggagattcagttcttgccctccattttacagatgaggaaactgagggttagtgatttgcagaacgggcacaatcatacatagctgtgtcctccctcagactgtgtaactgtaagttttttcatttttcctaagatagtgaaatgaagaatgctatagtaattgactgaggtcttatgagattatctcttgaatctatttccagttgggaactcggtgtttctggttggcagatagctctcctactggtcaaattcaggaatcagactgggagaccctcgccctaggcaaggcttggtgtaatgtgctagggagctagcaaaagacccaagatcttgctgtctgtctggggaggctaacaggaacatgccaagaaggcaaagcaaggtggcacatgctggatccaagggcatagggtcgatgagcaccgcaggggtcagactgggaggtaagcacagacaaagatgagcacaggtccacaagagttttaaggcctcatggaaatgtttctatttctttaaaatcaagataacaaaatagactttttggccaaaaaaatatatttatatacaatgtagtcatctttataccaatagagttataaaatataatttttaattttttgcatggaagaaggagcccatgaaggcaagagtcactggagccataaaagtcataatgtgaccctgccattgccctctggatgcaggtcactccaaggcctttgcaggtggcagagccacaagtggaaggagcctgggtccctgaatttggtctgcaggagaattgtttgccagtcagaaacacccaactatccactggaaatagatgcaagagatcactcatgagactttcattaattactgtagcattcttcttttcattgtcttagggaaaaaaatgaagaaacttaaggttccatggcctgaggaaggccacagaaggaaactcactttgagctgagctttgaggggcaggaagtactagctcagctggaatgcaccctctgttcatgatctccatgacgaaaatgaactcattgtgtaagtgagctggccatcttctcaggaagaagaggtaagcactctctggacagaatgtgtttatgtgtttttggcatggccagtgcccagctcagcacttgggacattgtaggaattcaaggaatggggctcatgtcctcatgcaaacaccagtgcgcagaacttggaagtcgattttctgttttaagcaggtatcaaacaggcaatcaacactgtgcctagtatcgaaccagaatgcccgcaggatacaagggagactgttccttaaggattgttaaatcaggagggagagtataaattagcgtgcatgtgcaattcatatatcattacaagctaaattttgatttttcctaaagaatgacagttgctctgtgaaggctgacatagttgaaaaagactttttggaggaagtgaagcttgatctgggattagtgaataagtgggatataagtatcaaaattaggaaattttgacaaggatagctgacaactagaagttggggtaatatggcctttaggggatgagaagccccacgatgaccagtgaaaagtgttcctggtccccttataggaaacgaagtagggcggaattagaaaacaaagaaactccatcttcctccctacccaccctccccattttttgtcaaacaaccaaactctcccacttgagtgtttcatggaagaatggttaaaggcaggaagaagagagaagaaaagaaaaggagctgagctacaatcagaaagaagaaaacaagctagagagtgaagatatctctatgacccccattccctaaagaaggaactgtctcctctctcccaacacagatgtggggaccgaggccctggaaggcctagcaagctcagggtgggacatgtgggggctgggggtctctctggagcatgcaggcattgttttatgccatgcttgaattctgaacaaccaaacgctgtcagaaggaagctggcatgttgctccactggtaactcaattccacactgcagatctgccggctagttcaagaagaactacgatgccatcaaaatccaatgttcaatcagagaaggaagctgccttctctttctgcagatgattaagaggcagacatactcatgcattggagagtcttgctgtcttttcttccaggaataaagatgggctcatttaacatgatttctacctgttctcctgcaattagtgtttaagtgactgtctctgggtattagtcactctgaggaaatgaaatgatgctatggtaattggccatgtgtgtgttttttcttttcttttcacttccctagggatttcacttggctcagaaagcattttttaacataggccctgtctgcactctttatttagctaattagagagcttaagggagcatgctggcattgagcaaaaagggaggaagggggaggggcagcgtgttctactgggaagagcactcgattgaacaggaatatctgggttctagcccaaactcatcaattttctcttctattaagctcttaaattttggtcagctgtgtgacaggcattaccttgttcgatcctcacaataaccttacaatgttggtatcatggcctcctttcagagatgcaaaaaacgaagtttgaaggaggctgccttgaccgtggcttcccggcgggcatgcaacagggctgacacggagactctagttggccttaattcctatgctttgccatcctttattagtttttgcttactagatagacccctgttacccaggatgagtcacttcacttctctgtccttgcttgcttaaactgttcgtgattctgtaaaaatgctggctcttctgaagttctaagtgcctttctttctgaacagatggaaaaatattatatatcctttctattacctttctaatacctttctctttccttgccccctacctattttgttctgcttttcttctctctcctactacatccagacagtggccagtacagcaggtgtgggggctgagcaagaagaggcagggggaggagaaagaagcagctctattcattgggcactccattttccagcccagggcaatactttcttctaaatgagcccagagtaacatagcgtggaacaaagacccaaagaaaggcttggagtatgaagatttcatttccaattctgccgctgtcttactatattgtggggttttgaccaagccatagtcttatggtacctcgggttcttcaccttgacaactataattataacacacatcagagagtggttgtgcccttgaagttgcaagaatatgaggtgtcaagtatgagtgatgaaatgatggtcctggtaggggtcctaggccaactagtcctgatcctctgtcttataggaaaaaggaaggtgggcttcctggtgccacttagataggtggtgacacaaatatgttgatagcccaagcagcctgatccttagcccagcgctccccgaaccagtgcatttgtcccaacttccaagatggaggaaaggttttgttcttcatagaattcagtttttatgagagaacaataattacctgtcaatgaaacacctctgctttctctagctaacattttagaaggtatcagagatacggctcaccagggacaaagatattacactggtgtgcattcccattcatgacctatcttgatgatgaattctgtgaggctgtgctccatgaggaagcagatggaagtcaccgcccatgcccagcccccagcacgtgacagtgtggaaggcagacactataccatgtggccaaagaagcatgtgtcacagacaagagcacactttgcagaaaggctagccacatattttgcttcatgacactgccctcccccattttttgttcatttcttgctggtgtttgttcttctgttaatgcctataacaaaaaattacagttcacagttggaaaggagagaaaaactttcttggcctgtgatatggtttggatctgtgtccccacccaaatctcatgtcaaattgtaatccctaatgctggaagtggggcctggtgggaggtgactgactcaaagggtggtttctcatagtttgacaccatcttcccttggtgctgtcatcatgatagtgagctgtcatgagatttgtttattaaaagtgtgtggcacctcctcccaccactttcttgcttctgctccagctatgtgcctccttccccttcaccttccaccacgattgtaagtttcctgagatctccccagaagcggaagtcaccatgcttcctgcatggcctgcagaaccatgagccagttaaacttcttttctttataaattacccagtctcaggcattcctttgtagcaatgtgagaacagactaatacagcctgtatctaaaccatccttgagtaagttattgtctataaatagcaccttaggttgtatactacaatgtctttcatgcagttttcttttgcatttttcttcattctgcatcaaccttgtgaggattattgtaatcttcattttgtaagaatgtaaatctgtgctgtctgatatagtagccactagccatgtatggctattttaatttaagtgacttaaaattgagtaaatgaaaagcttcacttcctcaatgatcctggccacatttcaagttctgagtagttgcatgctaagaacttgtttgtataatcccttttagccctcagacaatttaacaaaacattttatgaagtaggcatagctttatagacaaagaagctgagtcttggagagatttgctctcatatcaagacacatacaactcaaaagtggtggatatctcttggtttggctccacagttttctctctcaaccacgataccatactttggaaagactttcacaaattcttaaaaatatgaacatgcaattaccattcaacccagtagttgttcttctggccacatattctagagagatgaaaatttatggtcacacaaaaaacttgtacaggagtttttacagcagctttatttgtaatagccccaaactggaaacaatccagatattcatcagtgaatgaagggttaagcaaatggtaatacacccctacttagcaataaaaaatagcaagctattgatatgtgcaacattctctagatgaagtaccagagaataatgctaagtggaaaaagccaatcccaaaatgattgcatactgtatgactctatttacataacattcttgaaatgacaaaattatagaaatagagaacagattagtgatttccaggagtgaagatcggggtggggcagaagggaagtgggtatggctataaaaggactatttgagagctccttgccaggatggaactattctgtatcttgactgtatcgttgtcaatatcctggttgtgatattgtaccgtagttttgcaagatgttgccattggatgaaacctggtaatgtggtttgaatgtttgccccctccaaatctcgtgttgaaatgtgattcccaatgttggaggtggggcctggtgggaggtgattggatcagggagttggcttcctcatgaatggcttaacaccatctccgtggtgaaaagtgagttctcagttcactcgaggtctgcttgtttaaaagtctgaggcctccccactcccttgctctgtcttgctcccactctcaccatgtgatatttcctgctctcccttagccttccaccatgactgtatgcttcctgaggccctcaccagaagcaaatgctagagccatgtttgtacagcctgcagcaacatgagccaattaaacctctttctttataactcatccagcctcgggtatttcttcatagcaacactaaaatggcctaatgtggccaggcgtggtggctcatgcctgtaatcccagcactttgcgaggccaaggtgggtggatcacctgaggtcaggagtttgagaccacctggctaacatggcaaaaccccatctctactaaaaatacaaaaattagccaggtgtggtggcacctgcctgtaatcctagctactctaggaggctgaggcaggagaatcgcttgaacccaggaggtggaagttgcagtgagctaagatggcaccactgctctccagcctgggcgacagagtgagactctgtctcaacaacaacaacaacaacaaaatggcctaatgcatatggtaaaggttacactaaatctgtctgtattatttcttacaaccatatatgaatctacaattaactcaaaataaattctatttttttaaatgtgactagatatatatgctcattacctatagaagctgcattttcccagaatctcagtgtcatcaagccgattctgtctaacaatgctcgcatattggcataggcatgtgggcatatggtgcatgtgcccacaaatacatggatttgtaaggtgagaaagtgtaaggtgcaaagagccagaaaatgctcagtctatgtcatggggaaggtggtgaaaagtctacactgagaagagaatggctgtactatccagccaaagagagacaaagtaaacctgtggtgatcaatgatgtttagtcaagaaagtatccctggggctgagatttagatgtacactttttttccagcactattgaggtaataattgacaataattgtggtcaaaaaatgacttgatatgatttgaattttcttaaatgtgttaagacttgtctgtggtccagtatatgatctatcctggagaatgttccacctacaattgagaaaaacatatattatgctgctgttggatgaaatattctgtacgtctgttagcatttggtatgtagtataattcaagtctggtatttctttattgatttttcatctgtatgatctatccattcttgacagtggggtactgaagttcactactattattgtattgctctctatttctcttttcagttttggtaatatttgcttcatatatttgggtgctgtagtgttgggtgcacttacagttatatcttcatggttaattgacccctttatcattatataacgacctttttttctgtggtgacagatttttacttcaagtccattttgtctggtgtaagtatagctacccctgctctcttttggttaccacttacatgcaatatcttttttccatcacttccctttcagatgtgtctttaaagctaaagttagtcttttctaggcagcatgtttttggatcttgttttttaaacccattcaggtgctctgtgtctttttattgaagaatttaatccatttatatttaaagtaattattgatagatagctacttactattgccaatttattaatttttatgactgttgtgtagttccttttttcctatattacaatgtttctttatgatattttgtagtagtatgctttgatttctttctttatcttctgtgtatctactaaaggtttttgctttgtgattaccatgaagcttacatcaaacatcttatagttgtaacaatctattttaagctaatagcaatttaaattcaattgcatacaaaaacttaccctctaatttctctcccccaacacacgtttgatttattgatatcacaatttacatctttttgtattgtttatttattaattattgtagctatattttaatacttttgtattttaacttttatactagagtaaaagtgagttttatattttcatatgattttaaattacttattagtatccctttatttcaacttgaataactccctttatcatttcttataaggcagtttcatggtgaagaattcccacagcttttgtttctctgggaaagtctttctctctccttcaattctggaggacagctttgttggcagtctttttctttcagcatttttaatatatcactcccctcctggccagcaaggtttctcctgtgaaatccactgatagcctcatggaattttcctgcttttctcttgctgcttttggaatcctctttgtctttgacttttaataatttgattataatgtgtctctgtgtaatcatctttgagttgatcttttggtggaagtctgaacatcaaaagtctggatgtccacatcctttctaagttttggaaagttttcaaccattctttcttgaaacaagctttctgccgctttctctctctctctcttttcctcttaaattcttcattatgcatgtattattttacctgataacatttcataaatcctggagtctttcttcactttttttattttaatttttttactttttcttctctggataacttcaaattactggcctttttattcacagattctttcttctccttgatcaagtctgctgttgacgctctgtacctcatttccagaggtattaatgtattatccagctccagaatctctctttggttcttttttaatgtattattcagctccagaatttctgtttggttctttttatttatagtcatataaaacgaactaggaaaattttgccccttttcctatgtattatactttgagatagttaagccatcaattccttgaatgtttggtaaaactcatctgtaaagttttctgggtctattgttcacgtgtaggaagcagcaagtgcagttttttaaaaatgatttcagaaaattttacaaacaaaaaaatgttaataaggttgtctttggatagtgacataccatggaattctttttgacttaatattatttcatttttaatattaagatttcatttatatagactaaaatttatctttgtagtgtccagttctgtgagtcaaatttctgcagtcacatgccatgaccataaaaaagacagaaaagttctattacccacagaaattttctcatgtctgtttatagtcaaaccgtctgtccacccccatccttggcaaccactgagttttctttctctatagtgttgtctttgtaaaaatgtcatataaatggagtcatacagtttgtagcctttggagtcaggcatcttttactcagcgtaatgtgtttgagattcatccatatgttgggatgttccttcctgttgctgagtaacattccactatgtggatacaccacagtgtattcatcaatccccagctgaaggatgtatgtctgtgttgattccagattttggctcttgtaactaaagccactgtaaacattcacatacagattttaaatgaacaagtttttatttaacttgggttaacatcagcaaatgaatttctgggtggtaggataagcctattttgtttttgtttttgtttacctgagataaggtctcgctctgtcacccaggctggagtacagagacaaaatcacagctcactgcagcctcaacctcccaggctcaatcaatcctccaatgtcagcctccctagtggttgggtctacaggcatctgccaccatgcccagctaatttttgtattttttgtagaggcagcatttttcatgtttcccagcctggtctcaaactcctgaactcaaaggatccacctgccttgtcctcccaaagtgctgggattacaggtatgggccacagtgcccggctcgtatgtttaactttataagaaatcaccaagctgttttccaaagtggttgtatcattttgcattcttttaagcaatacatgaacaatccagtacacaaaattgtcaggatgttcttgttttcgttttggttttagccatcctaatacatgtaaaatggtatctcattgttgctttagttttcattttcctaaagactaatgatgttgagcatcttttcatttgcttatttgacatttgcttatctttttggtgaagtatgtgtcccaatatttatttcaattctatttttattgaattgtctgttttcttattacttcgtttgatggttttgtatattctgaatacaagtcatttatcagatatatggtttgtaaatatttttatcctagtatatggcttgcctttcattctctcagcacagacttcttaaataacagtttttcattttgatgaagcccaatttatcttctttcttttatgggtcatgcttttggagttgtagttaagaaatctttaaccccagaatccttgactaactccagatgacaaagatttttctactacattttcttctagatgttttacagtttggagttttacatttgagtctatgacatgtttgagttagtttgttgcaaagagtgagagggaggttcaaactcctgtaggatgggggctggcatgccaggggctttcatagggtcttctccatattccgctttaggtcttcccattgtgctacaagaagtgtgtgtggacaaggtactgagcagctggtgggcgctgaggtgccacatggaggtgtgagtgagccagtgtccactcgagtgtttgtgtgaccgcacaggtgctctggtctgggtgccatgcaggctgcctcagtgtgttaggcgtgtgcacatgagcgtgtgcacacaatgtggatgcacacacacacacacacacacacacacacacacacatacaccatgagcacctctcttgttgtttttgcccttctcccagccatagaccactgttacttgttactcaatgtatgctacactggttccaggggcagcacatgggtgggctctgatgctctggttaagtctctgtccttggcaggcactgcatccttgggtctcaggagaggagtccctcagtgatttgctttgatcccaatcaataggtctgaacccagcaagtttatcccaccttcatggaatacggtttttctcatgcccttccccagtttcagtggattttctccaattccttgaaggtgacagggtttgtgtccttcccacaccaatttaaggcttttgttccaaaggaaatataggaaagacagatccaggtgggattttacatctatcctgtagggctgctcctccccacgccctcaggcctacactaagagggacgactcctcgggatgctgctgtgaggcactgtttctgtgtcttgcctttctggagatcccaaagagtgaccaaatgggtacagctgccatggaaccagcgacttttcaaggctcatgataaagcaaccagcagcacctggacacgccccctcccttgcttctcatcctgccctgtctcatttcccttttctctcattccttctgccctggaacctctccagagaagcattagcacttaatcactcactgccttaccctttgttttatagggaacacagacagctactttgctcattaattttcagccttcttcttctctgatagaaatatttgaggctgcacatttccaattattgctttggctgcattctacaagttttggtatgctttatttttattcttgttcagtactcaacagagacctttctctcccacaaacagtatccaggctgagactgatcaggttcctagtcatctacctttcactaaaggcctagctctgtgagggttcaagcttgcatgtagggatctctgtttattttccttccaattttatgtaagcccaaggcctcatcttctgtcctgatgtggtttatgcaacccacatcacttgattgtcaagaccaacaaatcccataaggtagcttgaaatcagtgttacattaatacttaggttttcgctacctcttgttttagtgctttggataattttttgctcccttggaaaaattttactatcttgcaaacctaaccatgcatgtaaaagaaagcttatcaactttttccactctgtctaggtgttctctggcaaaatagttttcagtattctagaatgccctatttccagaaaaggaaatctgcatgtgatttcaagtatctatttaagactgttatcctattatagtttaccacaagatttaacccagtaagtcttggtgaggatttggtagtggaaatttttgatactttggcccatgcgtctaaattatattgaccaataaaagaaataaaacatgtttttctaaattactacagtgagttaaatacataaggattgatatcaggggagaagctgtctaataaggaagctcatattttcacatttttcttgttacnnnnnnnnnnnnnnnnnnnnagacatattttaattttaaaggacttcttaaatgacaaggactaatgttatataaaaatgaaatatgttgagtactaaaaattcagcacagcaaaatacaaaatagaaagttaaaggtcatctaaaattccaccatcctaaagtaaccaccattatcatttggccaacacaaatctagacatctctctagatggaagggtagatggatgagtaaatagatggagagaaagaaaattataaaacagatgatatatatttctttattttaaagaagtgttaaatttaaattatttaacagaagtaaaattaaagctaaatgaaaggaatcacttggccaggcacagtggcacatagctgtaatccttggcctttgggaggccaaggtgataggattccttgaggccaggagtttaagaccagcctgggcaacatagcaagaccccatctctacaaatactttttaaaattaggcaggtgtggtggctcacacctgaagtctcagctattctgcagtccctactactcaggaggctgaggtgggaagattgcttaaacccaggagtttcaagctggagtaatctatgatcatatcactgcactccagcctgggcgacagagcaagaccctgtctctagaaacataaataaatgaaaaattttagaaaggaatcatttaattctaggaagtatgtttttttttttcaccataggagatagtaatcactaaaaccactcctttaaagctaagaaaaaaactttataaaaataaataagcaccctctttttgttaggatcagccagactcaaattttatgtgaaacagtctaattttaaaacttggcaactaactcattattttaaaaatattgtgctagctaaacaaaccacatctgtgggccccaagttacaaagcttggcctgacctgaggatcactggtttggcttggcaggtccatgtcacttgtagagaaatctttcacctgctccaagtcagatagaaaaatgttagctgtcaacatcatccttcactgtgtccaggtttttgagcctagtctaaaaagacatttacatatgaaattgctttttgtttttaatatcctattttcccagtgtttggaaaaaaaagcttaaaaaaatgggaaataaaataatgagaaaaaatgccaccttatcaaaactagctattgattactttctaattaggcaactttgttaccttgtcagaactgagctggctgcttggcttgtatgaattccatatcactggaaacactcaagcataggatggatgtccacagtgtaacccaccagcctgggatccaggccaagcacctgagggatggttgactggattaataggtggatggatggatggatggatggatggatggatggatggatggatagatgcaagaggaattaagatcccttttaaccacaggttttcttgcaagtagggtcttaattaattcatttatttgtaagaaggaagctcaatgaggcagaaagttagataagtgggttaagaaagaaaaaacaaaaggataccttatagttgttttgccttcttctcaatcctgctttaaaaagcctagccccacgatgtcactgaaaataattttaactgctcctttggtgacttaggttaggttggtctgctgtgtttgtaatagaaggaagcaaatatttagtttccactctcatagcaactgaacaactttctgaaactgtaactgaaaaacttttccctagtatgttttactattaatgcaagtgtagtcttttattacctgtcccttagctttcaattgacaggaagggtatgagtgaaaaattgtagttagacgatagcgcaactctgagaattatatatcaaactagaggtctttatcagcatttttaaaaaattaaatgtattataaaaaggcaggccgggcgtggtagctcaagcctgtaatcccagcactttgggaggccaaggtgggcggatcacaaggtcaggagatcgagaccatcctggctaacacggtgaaactccagtctctactaaaaatacagaaaaattagcctggcgtggtggcgggcgcctgtaatcccagctactcgggaggctgaggcaggagaatggcgtgaacccgggaggcggagcttgcagtgagccgagaccgcgccactgcactccagcctgggtgacagagtgagaccccatctcaaaaaaataataataataaagaaaataaataaataaataaataaataaataaaaataaaaaggcaactcccttttttggatgtattaagaactggcttcacaagaaagatgctcatttatgattttctggtactgaaaatcagttttacccactcaaaaactatctcctgaactttactgacttctaaaatttctccacagagatagatccctgtttcctgtaaataagcatatatccttaagaaagtagtgtcattattatttaaacctattagttatttgattattcaggagagtagtgtaaccattattttaacctgagtatcagttattcgatattaaattttctgagtggttatgagttgacagaatatggagatagtatgagaaaagcctcagaagaaaaataggtcaccaggagttgccactgctaagagtgggagcagaggaggaggaagaagcaggcatgagaatgtcgaagatggaaaaaacatggtttttgcacagattacgtctggatgcatctaatcaggtccagttttctcagcctctcatttcattagatctcattgtcttcgtcttccaagctagaaaacatataatttattaaattagaaattttgatttctttagaaaagacatatcagcccaaagatatttgtaagaatgtttttggctgctttatttgtaatatttacctattccagtgcccatcacctgtggaataggtaaataaattgtgttatattcctactataaataaaaaggaacaaagcactgatgcatataacaatgtgaatgaatcacgcagaggtaatgctgagtaaacaaagtcaggcacaaatagtacgttccacgtgacgacatttacgtcaagttcaaaagcagatcgaactaagctgtagtgtcagagattggaatagttgttacctttatagggagggagcatgagggagccttctgaggtgctggaaatgttctatatctgaagatttggaactttacaaatcttaagttatatccatctaaaacatagaagaaatttaagagtgatcgcaaaatctcaaactttatgctcccatcagttgagaaaggttttctgagtgggctctagtggactggagtttagtggcagtgacaaggagagattggtgtaaataccagtttgtctttagaaagctagacagtgagggccagacgcggtggctcacgcctgtaatcccagcactttgggaggccgaggtgggtggatcacgaggtcaggagaccgagaccatcctggctaacacggtgaaaccccgtctccactaaaaatacaaaaaattctccgagggtggtggcaggcgcctgtagtcccagctactcaggaggctgaggcaggagaatggcgtgagcctggaaggcagagcttgcagcgagccgagatcgcgccactgcactccagcctgtgcgacagagcgagactccgtctcaacaaaaaaaaaaaaaaaaagaaagaaagctagacagtgagacccaaatggacagaatccagccttcatttctatttctcaccctagggcctcacacaaaaatgatgataaagaaatgcacccaaggttcatctatgtttgctagtgaactgtttgataaaccatgtcttgtatggattcaaagcagttccttcatctttttctattaatttacttccaaagctggttgaacacaggagcacaaatgtgggaaatgatgaaagactaaaaagtcatgcgaagtgaatcttggatttttttttgtcaggtaattgatttttcaactaattgattaatcatagttgaaattagggcaattctctttattttacttacaaactatttcgggtcagttgagtaggaagcatgctcattaagaataactgcaaacgtgccatccaaggaacaaagatgtgttggtcatatatgattctatgggagtgggcatgctgaggttgaagagtgagacctgaaaaaatgagtccaggtctcctctaaagtcctgtgccagctctccagtgagctagctaatattttacaatcaaatcactagccatattttaagctggaccatgccagagctgcctcactagtgtgacatagcagtgggatattgttacttaaagctggctttcttatttgaattgttttaggtcatcccgtaaatactgttaccttcaactaagacccttgaacaattctccattttattctccattatcacactgctgcaagattctagcagatggtttcattccaggtacacatgcaatctctctccccagtgaaatagaatggctgtttcaggcttgttgcctgtcaccaagtcttaggacggatcaagggaaaaaacccatagtcatgatgacattctgtagaaactgctttgggaattcagaaatgcagcatgaaattaacccaacgtggaatttgccctaaattactagaaattgaatggtgacccttttgtaaaaatttactttggtacttgtgttgaccacaattggtcaaaaatcttggctttattgattcgacctctgagtttattaaagcattcatggttaacaaaaattatgtgtctgagccagtggagctcagttaaaagaaaggcaggaagtaataagggcagccggttttcaagggcagatctccctcttagaactagagttcctctgctgggataaaaattgcaaactgagacacagaacagggtataataatctaagaagaaagttccatgaacaatctaggaagtctaaggaccaaattgttcaaggaactttgccaaaattatatagcgagctatttagagaggtaagccatgtccatgattgtaacccttttatcttcgtgtgagtagatgacatccttctgcatttattgaggctaaatcaatagattcaataaggccacagctttctcttactcagcgctttgtgggaagaaaccattccatttgtagcacattgctcagtgtatagtagaggtaggagtttaatacatgtttatttaattgaatagaaatgcactacatacttcactacagtttataagattttgtgcttttataaatgattactaattccatcattccatgggatcctccctattatccaataaagttgtaagacaagtatcattctagcctccaaggcaggatgtcatggctcactgggaaatagaatgtgcagttctggatcttagagtctctactctttctaggctcatgagagctgagaaatcagggttctggttccatttcctctactgaggaagttgctttcttttgggcctcggtggtttcagggtaatcagatagaacttctcagaggtgctgggccttggaaactgttggcttttcagtacctgaacagagtaacacatagagacagaggaagaatattctaggcagagagaatggcataatccaagtcatgaaagttaaatagtatatctggacaatagttcaaattagctttggcagtaaagtttgtttaggggaataatgggagataagattggaaatgcccgttgaaattgtattgcagagataaattcaacaattttttactgaacacataccttatgcccagcatcatggcaggtggtaagggtattgtagtaaataaggcaggtgtctactcctaaagagctcactcatcaataaagagaaagcaagtttctcattacaaacagcaatgtacactttcttcattaggcattgggatacctctaatggcagaaaaatgatcccacccaagttgtgagatgtttcctaccaaagctgtctagattattgcagaagacatgtaagagaaaagtggaaaaatcagttatttatgacaataagaataaaaagaaaggacatatgtccaaaatgttatgcaagaaaacaatgtgtttgttacacccaatggatgtagagttcaaggcagagaagaaatcacaggcaactgaagtttcttatcttagtgagtaggagagagaatgtgacatctcagtgtatacttttcactaggaaaacctcctaagcaaaggaggagaaaatgaggtcaagtttagagttgctgttgattgtaatagatcaggaaggcagctagaagcaggaaaggggatgcacaccgcaatggggctttgtcatcagcatagaagtgatctatagagtcctaagaattgccaagatcaccaaagaagaaaaggcatcaacaatcaggtaaaaggctaagttaaaaaaactgttcaaaattttagttattcatttccacagtgtatataatgaaaaaaatccagcactagaagattagttgaataaactatgctaaatacatacaatggaatactacacagctataaaaaaggatgaagatctttacacattgatagggaaaagaggaccaggttgtattaagtggaaaaagcaatatgtagaagtatatgtagtatgcaatcttttgtgtaggaaacataagtaaataatatatagacatacttcttatatttgcataaaacactggaagaataaaaaagaaactaattaaaaggattatgtctagggattgaagggggataggggaaataaagtcaagggtataacaccttagagtataatttgttacagtgttctcatttttgagccacgtaaatgtattacttattcaaagtatgaacttagaaaaaataagtgcagaatgcattgccctgtgtctagtataaagagcttgggaactgtggttccttttccaaagaggagcaggaggtgatggtgtagagagggagccacattgtgaggcttggaccttgcaaaggaggaggggagcagaatttataggtgaggagataaggtggatgggtcctggcctctttggtgtgtctcttgctcagtactcctcaattcctgttttccacccacgctgccctctcctgtcttttcctggacattctaagtaacttcctagtttgcatcatgctacattcccaccaaaagaaacacccttcccaatgttttccattattccaaatcttcactcattcttttattcaataaacatccaagcacctttatgcactacatgctataatgagacctgaacatgctatggtcctccccactttgaaggttcactgtctattaagagagacagataccaaaattaacaatgcaacatgatctttgagaacagcttctctgagagatgacatttactccaaataataaaaattgaccagcagaggggttccctccagttctcatacactctttctaacttagtggtgccaaacatttgtattgctttgatttcttcagttaatatttttagccacccatgtgcttgtcacccttcttgattcttgtaccttcttattatttaattatcaaaagaagcagccctgtgaaaatctgaaaatcagtatgatcaccctcatgacattgataaagaaggggagactagcagagctcagtggcttgcccagggcccaaagctaattccttttaggaggctatgcttaatggaaaggggttagatttgtgattcttatgaagggtaatagttacttgctgtgaaaagtattacaaggcttctttttgtgtcgtttctacttgatacaagaaacttgataagccaagagttactggaattttagtaagctcgttcagtgaacatgtttatttttatagcactttacccccgacataagtttgacattattaacagagccaaagccaagccactttggcccttggtaaagacccagcttatcagagtttgggtccagctccctctaggcatcttctctcattatcacagatgccggccccctccccacccactctgggaagctgagggtgtggctggttctccttttctaggatgttccatgaggccacttctagcagcagccactgcacgtgctcttcctatttcctccttccaggcatgtggcagctttatgtaatgaccgaactctcggttaagccagagtaaagagacttagggagaaacctcggactctctggcgattagagaggttccattctaagctataggccatttcatttactccccagtgtgaggcatgacatcttcccactaattaatggtggccctccttagtgatgagttgctatctggattcccacaccatctggagaggagtctggacactggagtttctatttttaccaggctctggcattgcacttacattccatttcaactgagccagaggccacagaaaacttgaatcatgctctttttttttccttacctaaggccactattaacaggataaagggctttttgcaccctgctatctgttatacagtaagggaagagcaaaacagaaggcagctttcgaaaaaaaaaaaaaatctttggtgtaaacacccagcttctggggccagttccaccttgtctgaaggaaggctgtagggaagtgattttgcagttaggaggctgcatgaattgcaacccagttaaaaacagggcagtgctaataacccataatgggtcattcttggagtaaggggaaaagagaggcaggacagaatgggaacattcgggagttcggtcattaggtaaagctgccacatgcctggaaggataaaataggaagagcaagcacattggcggctgccacaagtggcctcagggaatgtcctagaaaaggagaaccagccacaaccctcagctttccagagtgggtgtggagggggcctgcacctgcaacagtgatagaagatgcctagggggaagggggcacaggctctgataagctgtgtctttatcaagggccaacgtcacttggctttggctctgttaataatgccaaatctatgtgggggggaaaatggttaaaaataaatgtgttcaagtaatgagcttactgaagttccagtaactcttggctcatcaagattcttgtaccaggtagaagcaacacaaaaaagaaagccttgtaatacttttcatagcaagtaattattacccaccagctctggagctggggtaccagagttcaaatccagttccatctctcacttgttccatggccttgggcaagttacttagcctctcatgcctgtttcgtaatctgtaataacactaatgtcttggtatcctcctagcatttttggaaaattaaatgagctaatatatggaaagcgtttcgaaagtactgggcatagagtggacacgcagtaagtattcagtcttgtattacccagagtcttggtctcccttctctaagacaatgttgtagcgtagtagacaagtgatttgcttcatctttaaagtgggaataattcccaccttgtagatccaaaccagaaatattaattcaatgttaacttactgtctagctcataacactcaaaatgtaagaaagcacaattaataaccatactgaggcaataggtgtaaattgagagtggacaaatgaggaaggcgacttcacgtgaagagccaggtaggcagaggtgagagccccattcttggtcgtcacagtgggacacaatataactgacgttttaggatttgattcctagtctagaattagcatgcaaacaaccaacagcattagaaacaaaattcagagccatactctttatctccagaaataatgtctatgaaacctgagtggtgtatgtttgtgtgtgtgcatgcatacgagcatgtgtgtatgtgtgtatgcatgtgagagagagagactgactccgaagcttattttgatgcaaatccttcattgccctcactgatgagctatgaaattataatttcaggcttatctctagctattaataacaaacaataagaataaattaaatttatatcagatcttataattactattatttttcacacaccatctcatttgctctctgacataaccatcctcgaagcatcatatgttcttccaatgagacacacagaggttactggtgttattctggagttagatcccaaactcttagtttagaggttgatttttcactttatatgatcatttgtccatcaaatagtgatatatgtcagataagtcagagcacaactctgacacccatggaatccatggagttacggattctgtccccaggcaaatactgatctgtttaccatcactgtagattatcttgcaatttctagactcctacaatgaagaaaatcatgcagtatgaatcttcttggcctcttttctttcattcatgataatgattttgagatgcatgtcacatgtatcaatagtctattcttttttattctagagtaataggtataattttttatactttcacatatcgatgaaatttggactgtttccactttggggctattccaaataaagcctctttgaacactcatagacaagcctgcatgtggatgtgttttcatgtctcctgggtaagcattaaggagagtaatgggtcctaagacagatacacatttaacttctcaagaaattcatggcttattcccataaccccaccactttggggggccaaggcaggaggatcacttgacccttgagtttgagaccagcctggacaacatagcaagaccccgactctaaaaaaaatttaaaaattaaccaagtgtggtggcacacacctgcggcctcagctacttgggatgctgtggtggaaggatctcttgagcccaggaattcaaggttgcagtgagctatgatcttgccactgcactccagcctaagcaacagagtgaaatcatctcaaaaaaaaaaaaaaaaaaaaaaggaaacttccaaaatattcttttgcagagtgattgtagtaggtatgtggtagtatctcattacgcttttcatttgcatgtccctgatgactggcgatgctgagcatcttttcctgtgctcatcagctatttgtatatcttcctatgtcaagtgtctattctagtctttcatctgtttttaactggacttttaaaattattgagttgtagcatttctgcatatattctggatacaagtactttgttagaaatttatattgtctgtattgtctcgtaggctgtgttttgtctattttgttaatgccatcttttgatgagcagaagtttgcattttgatcaagcttatttatctacttttacatttatcactttccaagtcttatccaggaaatatttcactactctaggatcacaaaggtatttttcgatgttttcttcttaaagctttataggtttagcttttatgtttatgttcagactccatacaaattaatttttgtgcacagtataagtatagttcaagagtcatcttttttcatttttaatttttatggatacatagtaggatacatttatggagtacatgacatattttgatacagtcatatactgtgtaataatcgtatcagaataaatgaggttttcatcacctctagcattcatcatttcttgttttacaaacattccaattgtactccctcagttattctacaatataaaacaaattattgctgactgtagtcactctgttatgctatcaaatactagatatcattcttcatatctaactatatttttagattaaccatccccatttcccatcttcaccctcccactacgcttcccagtcactgctaaccatcattctactctctgtctccatgagtcagattgttttaattttgagctccccaaaatagatgacaacatgagaagtttgtctttccttgcctggcttatttcacttaacaaaatgtcctccagttccatccatgttgttgcaaacgacagaacctcattctttcttatggctgaatagtattccattgtgtatatgtaccacatttgtattattcattgagctgttgatggatacttagattgctttcaaatcttggctattgtgaatagtgttgccaaaaacatgggaatgcagatgtctcctcaatatattgatttcctttattttaggtatatacctagcagtaggatcgctggatcatatggtagctctatttttagctttttgaggagcccccattctgttctccatagtggctgtagtaattcacactcccaccaacggtgtatgagagttctcttttctccacatcctcaccagcatttgtcattgcctgtcttttgaataaaagccatttttactggggtgagataactcattgtagttttgatttgcatttctctgatgataaataatgttaagcacattttcatatgcctgtttgccatttgtatgtcttcttttgagaaatgtctattcatatctttcacccatttttaatcagattattgtatgttttcttattgagttgtttgagctccttataaatttcggttattagtttctttttagatggacagtttgcaaagattttctcacattctgtggattgtgtcttcactttgtagattgtttcctttgctgtgcaaaagcttgttaacttgatgtgatcccatttgtccgttttttttgctttggttgcctgtgctttgggatattactcaataaatgtatgccagcccaacgtcctggagagtttctctgatgttttgttttagtagtttcatagtctttaatcaactttgatttgatttttgtatattgcaagagataagggtctggtttaattcttctgcatatggatatctggtttccccagcaccattcactgacgagagtgttcgttccccagtgtatattcgtggcacctttgtcaaaaatgagttcactgtagatgtatgaatttatttctgggttcttcattcagttttgtttgtctgtatgtctgtttttatgccggtaccatgttgttatggttaccatagctctgtagtataatttgaagtcaggtagtgtgattcctccagttttgatctttttgctctggatacctttggctattctggttttttgtggttccatataaattttatttattttatttcattggtatttcgatagggattgcactgaatctgtagattgctttgtgttgtatgaacattttaatagtattgattcttccaatccatgaacatagaatatctccactttttgtgtgtcttcttcaatttctttcgtcagtattctacagttttcattgtagaaatctttcacttctttggttaagtttattcctaggtattttattttatttgtagctattgtaaatagaattactttttaaatatctttttcaaactgtttgctgttggcatatagaaatgctgctgatttttgtatcctgcaattttactgaatttttaaatcagtactaatagcttttcagtgtggtctttagatttttttcaaacataagattatatcatctgcaaacaaggataatttgacttcttcctttccaatttggatgcctttactttctttctcttgtctgattgatctagttaggactcccagtaccatgttaaataacggcagtgaaagtgaacatgcttgtcttgttctagaacttagaggaaaggctttcactttttccaattcagtttaatactagctgtgggtctgtcatatatggcttttattgtgttggaatatgttctttctatacccaattttttgaggctttttatcatgaagcgatgttgaattttatcaaatgctttttcagcaacaattgaaataatcatacagtttttgtccttcattctattgatatgctgtatcacactgattgatatgaatatgttgaaccatccttgcatccctagaatgaatctcagttggtcatgatgaataatctttttaatatgttgttgaatttggactacaagtgttttgctgagggtttttgcatcaatggtcatcagagatattatcctgtaattttgttttggggttttttatgtctctttttgatgatttttcatgtgttttggtagcaaggtaatactggccccatacaatgagtatttggaagcattccctcttcttctattttttgaaatagtttgagtaggattcgtattagttcttctttgaatatttggtagaattcagcaataaaaccattgattgggttccaggattttctttgctaggaaactttttattatggctttgatattattacttgttattggtctattcagatttttgattgcttattgattcagtcttggtaggttgtatgtgtctgggaatatgtccatttcttctaggttcaaggatggtcattttggcatataggtattcaattactcttacaccatttgttgaaaagactttcccccattgagctaccttcctccattgaattatttttatactgtttttgaaaaatcatttttcacatcttggcctgttcctagagtttctgttctcttctattcatctattagtctgtctttaatgctaatgtaatattgttttgatgatgatcattttttctctttttttttgagaccgagtctcactctgtaacccaggctagggtgcagtggcacgatctcagctcactgcaacctctgcctcctaggttcaagcaattctcttgcctcagcctcccaagtagctggaattacaggcatgcgccaacatgcctggctaagttttgtatttttagtagagacagggtttcacaatgatgatcaggctggtctcaaactcctgacctcaagtgatccacaatcctcagcctcccacagtgctgggattacaggcatgagctaccaagcccagcagatgataatctttttaatacatcatgaagtcaagtaacataactcctccaactttatttttttcacattgaattggcaattctagattacgtgcatttccatgtaaattgatttattcaaatgttctttcttcttaaatcacttttgaaaatttgtgtacctcaagaaatttgttcaattcatttagtttgtttaatttactggcatacagtctaaaatattcacttattgtcccagagagctgcaaactcaacagagactccagatgtcatacatgacacattgaaggtgaaacaagctacagtagagagcttgttccataatctgggatcagctgagaccccagaaaagtatatcttagatcagcattgctctagccttaaaagtaatggcaaagcttaaggccatgcctcaaagaatcaaatgaacccacctactggtattcttgtaggcaattaccctgtgcttgcactgggtatatttgaccacagattcaaatatttggctgtagtttaactgagaaccagcacacagattcactggaagtcactgcacagctctctcctctgtggcaccttgccttgcaaatttcacccatctcagtttccctgggtgacaacctctgttttctccacccagagatcagtttcattagggcacaacttctctgtgccacaatttagaaaatgccctgaaggagaaagagtaacattgagctcatctcatgtgtttacttctccagaggatcaaaatcctaaatgcttaaaaacaaggacttcatatattgtaatcaattacatctttttttttacagcagaagagtatatcatacccattactatgtcataactggaccccattaatgaacttttgaacaactatatacattaaataaacaaatgcaatcttgacaacatccggggcttttttagttcattaaattcaacatccattattgaaacttgctagatagaatgtaccatgtaagggattgttggaaatcaaatgggaataaagcaaaatacctgctctgcaagatatccctgggcagagagagaaaaaagaaagaaatgtaacaaactgtcatacatcagagatgttggtaatactatagaggaaaatggtagtactcgtgggagcacaaggagagtgtttaattttgtcatggggatggtggtaggtgagtggtgttttaaagtgtttcttatagaaataatcttatttgggtatttaataatggtaacctacataacccccaaaatcctctttttgtaaactttagtatattctctaaactttgtgtctttttcacaggcagataccattctagttctatttttcactagactcctgatagtcaaatgacttggcttcccatgcacatgcattaaatgaacatcaagatactgaattatcatctctgtctggggaaataatttaggaataaaaaaatgtcctttgaacaaaagtaaatgagaataagcaggaggtaggtgagagctgacacagtttatgacttgtgtaagcaaagggataagtatattcggatctgcttaacatattgagtccttttgagaaagcattttttctttatgggttaaaaaagccatgcttttctgagtgagatttagaatctcgcccatctaattctctgaaagagcaaatcacttggaacatcactagaagttattcaagactagccaggtacagtggctcacacttgtaatcccagcactttggcaggctgaggtgggaggatcacttgaggtcaggagttcaagaccagccttgccaacatggcaaaaccctgtctctactaaaaatacaaaaagtagataggtgtggtggcaagcacctgtaatcccagctactcaggaggctgaggcaggagaatcacttgagcctgggaggcggaggttgcagtgagcagagatggtgccactgaactccagcctgggtgacaagtgagattccatcccaaaaaaaaaagactaacttactgtcgatgcagatgagaatttgtatctgaatcaaacagacctccaccttgaccacctgaagacaccttgtgtccttctacttcatgtttaagaccttggactttatgagcacttaacaattatgtactgacgtaaacaccatgtcatgatcacttttcctttgcaattcctcttgaatcccccttctccatagcctcaataaacactcaaatgtaggaattcccagacctgttggtcttaagacccctctacactcttaaaattatataggacattaaagagtttttgtgtatgtagactctgttgatatttacaatattcaaaattaaaactgagaaatttaaaaaatatattaatttctttaaaataacaataataggtcaggcatgatggctcacacctgtaatctcagcactttgggacgccaacgctggaggatcacttgagttcaggagtttgtgcccagcctaggcaacataatgagaccccatcttcacaaaaaaaatcaaaaaattagccaggcatggtggctcatgcctatagtcccagctattcaggaggctaagtcagggggattgcttaagcccaggagttgaaggctaccgtgaactgtgatcgcaccactgcattccagcctgggcgacagagcgagacgctgttttaaatataaataaaataaaataaaataaaaataataaacccattacatattaacataaataacatacttttgttaaaacaaactggattttccaaatttaaaacagtgagggggtaatattgttctacatttttgcaagtgtctttgatgtcaggctataaatgatagctaaatcctcatatctgctcttcatttaatctgttacaataacacacatcatttcatctctgaaacatttcactccactctcacaacagaatgatagtggcaaaggcaaatactgccttagtatcgttgtgaacatattgttcaccttgcagaccctttggaggagaacgctgagagaactcatgctctaatacgactcccttcatttcactctcaattccagtctcatctctataaaaatttgcgcagtgagggaataaacctctccaatatgtcctgaacatatctgcctttaaaacaaagccatatgcaaaagcttcctgtggtcacacattacagaggctgcctgataatcatggtatcaaatctatgtgcctgtgcccgatttcaggggtgtcccttcatcttgtacccccctttcgaaattaatcatctctctatccacttttacactgaccctcctttagcatcattccccttcatttaaaataccctccactccactgtctcatatgtccccatggtgtctgttctctgcggccacgtgtaggatacatttgtcctcgaatctttcctccttgtcttcacggtactgtaggctgtgaattaccataggatttctaccagtctttgttcattcataatgaatccaggaggctgggaacaaaatcccacctctttgtgtccttcacagccctgaatgcatttggctttcaagcaggatgaattaaaaagcaaacttatttatgaaagctatttaaaaaaacttggaaatgcagatgaaggtagcgaaatgttgtaggtaatcagtgagttattttttagttatgtgcttttattcttttttaatattttaagtatttattatggatattatcaaatgcatacaaaagtagagacaatcatgtaatgaagctgatgtacctataacccaattttaataattgtaaactaattcgtaggcagttttattttattcagatttctcactccactcaggttctttggaagcaaattctagagagcatgtcatttcatctgtaaatattttactatttacttctaaacattactctttttttgaaatgtataacaataatactattatatctaaacaaaagctgacaataattttatattatcatatatcttcaattttcttaggacacttttagaacttttttatttgaattgagatccaaatcaggtccatatagtatgaatggtttataagtctaagtttatttcctgtacaagttctcccttacgctttctttttcttggaatttctatttaattttcctttgaataaacaattttccgtagcctgaattttgctgacttcatcacagtggtgtcatttaatatattctcctccttatggttcctgcaagttggctattagacttagaaggatgtatcactttgtctgtttgtttgtggtaaaactaatgcttagatggtatatacttccatcaggaggtaaaaaatgttttattgtttttttcaaaatattgctaattatagtaattgcctaaatttattaatttgttttatttttagggttgcaaagtggcgatattctatcattccactttcatttattagtttgaaaacacatagatggagcaacttctgctcatcaaccatttgattaactgaggtgtagattttacaagaaaggtgggataaacgcctggttctttacttatcagttttcaaaataataaggcagttattagtttccttcaaaggtaataaataaaggtttattttcccccagcatcgagattttactaattgaaactcattattaatccttgcagcgatttttaatcctttgtgaatgcttatcgagtctcacattgtctcatcattggccaatggttgttcatttaagttagttccttagctcttttgacacgatactgcagtctcttgtggccacctgaccagtagcaataagtctgttcttgtatgtttcctgcccagacctggaatcagccatttctccaggaagtcttggtcctttttagtaggagatggtgtttgaaggacacaatctaatggaatattcattgcaactgccctgatcattgtttcttagtttttttagaattcaaagttaggaaaaaagatttttttaaaaatacaacgtttgttttccaggtaacaaattattatagtacacaggatacacgtcttaataagttgccttttccattatttatatctgctttcttttcttctctcattaaattgacttaatcttctagaacattgttcattaattgtaattttagacatctctttcttgttcataataatattcttaataatcaaagggcagaagaaacacttttgttcttaattccctttaaagtgagggataaatcctaccttagatgttagctaactagagctcataggtcaaatccaacctgcctccttttttttggtatggccacatgaattaaatacaattttttcatttttaaataatttttaacaatcaaacaaagaatttattttgtgacacaggaaaattatatgaaattcaaattttagtgttcacaaataaagttttgttaaaacacagtcacacacattcatttacctaatgactatggttgcattcaagctacagtggcagaactgaataatagaaacagagaccatacagctagcaaggcctaaaatatttactatctggccctgtatcccaaaattcatgcaagattcatgaaccacaattctgaggccagaagaaccacacagactatctattaccagagatagcaggcttctttcctcctaaatttcactttttctcttaatttattctgacaacaatgaagagacagataaagttgcatgaaaatgatgcagaatctaatggtgtatcactgaatacaaaaagagccacctcaggtaacaacttcaatccttgaaatgaaagtgttcccttcctgttaattattccattattccctaatgtttttaataataaaacttaaaaagtttgccacttcctgccctacttgatcatggtttgtttttacttaatagactggtagatataatcgacaactttcattgtatttcaacttcatttctaaatgatacaagtctgtgggattgtttgttttgtggtgacagtgggttgttcatatttactttttatttgttttcttttgatttggctctatttctcagttttgagatcaagattatgctagctttgaaagtgaattaggaagcatttttacatacttaaagactctgaaaatacttatatagcatgaatataaattatttggatccaacagtttctaaggataaattttgtcaatttttgtgtcttctataatcattatagttttcatatattatttctccttgaataaaattagacaaatatcttcaaatttatcaaaattcttcatgttatctgcatacggttttttacttgaaattgctttcacttttttcagcatctgaaaatatattatttcttattactgatggacaattatactcttcctcttactttctagtcaggcttgtcagaggcatgtccagtttaaagtcttttcaatgaatcagcttaaatgtactaattaattctaatgattttctgctttttaattcattaatttttgcttcctttgttttaatttgtagttcttttccaacttatttactctaatgcccaaattaagctatttgtgtctttcttgtttaaatataaccatctaagacttcacagaggagaataactttggcttcttgcatgaagctctcattttcagtattttctaagttgtcattgatttactcttgaactgaaaacttgatacatattttgttgtctgtatcttagtcatctacttcaagtaaaattttatcaatttttaagcattttaaaaatatacatacatatacctatgtatttgctatctcttggtacataaaatttaataaatatggctctattggtaagcatgacttttatcaacctaaaataatcctgtctattccatgaaatgctttatgtcatggagtctgctttgtttaatactaatattaccgtctcagtttattttttttacctaggcttagtatatatttccaaaccatattatttttgtaaccatgtcttttgtgtctttcataacagtatatattcaatttttttcttaattcagtgtgagaggctttattttttaacacagcactttaatccatttacatttatttttgtaattcacatatttgaacatgttcatacttaattttactcatgaaagggtgagcatggatgtactaaaaatgtaagcaataattaatgaatggttacaaactcattattttacttgtttatgttatatagtggtaataacaataatcaccaacgtatatgaccttactatgtgccagacactgatctatatattcctgtctacattaattcatttgatgcttacaaagtaaacatttactacataaagaacctaaggcaaagcatgagtgagaaagtactgagttaaatgtctatgtttttagtagttctttgtgaaatattgtgatggaacttacaggtcttctttgtgctactaagagaatgtccttccagtctatatgcattaaaatgattttatccagaattggtgatgaattctacttaatgtctttctacatctatcaaattaatcatgtattcttcttttctacctgttttcttacctggcaaggatatatttagaggtctaatacaaatattgataaatacaaaaaatgagaaaagatgactaactaatggaaaaaatgggcagaggtaattaacaaaagcagaaatacaaataactaataaaatattaaaatatatcatattttacctatcaaattggcaaagagcaaataaatacatactgctgctgagggtgggataggagacatcctctgtagattgcaatgattaaagcaagattcaaaagcgcacttgggttccaatcctgatggctgctttgtagctttcctttcatatgggcatttattcatcagccagcaagcatgtattgtattcctactgtttaccagcctccattctagtgctccttgtccttagggaaattacatttcataagtgaaacagacaatttttaaatgtttcagaaaaggacaagagccattaaagaaatacagtgggctgatgtgatagggaggctggtgttagggatattgggaagtagggacagaagtatcctttagattacatgtttagaaaatgcatctttgtggcacccagcctcactgaacagcctctgagctgagacataaaagagaaaggtctagacctgcaaacccaagggaagaacatctcaagaagagggaacatgaatgaatacaaaagctttgttaggaaaatctgggcagtttaagaagtaaaaagcactttggcatggctgttaaatgttttcttaccaaatggcagaggccaggtcaggcagacccttgtagtctttggcaagaatgtctttcttagttcctatgcagataaaacctgcctatataaaacaggcttcgtggcacccaacctcactgaacacatgggaaaattagatcagctgctgcatgtgaagctctaggagtttagcacccagtgggcactcataatttactgccatcatcatcaccatactgtcattacttttcactgctggataagtataagtaggtatagcctctccagagagcaatttggcaatacggatcaaaaaccttatgaaatttatattatatgacccagaattctttctctagaaatgtaacttaagaaaatactccaaatctatccacacaaatatttatttcatagttatttataatagaggaaactggaaataaccaaaatattcaaattagcagaagtagataaattttgttatattcatgcaatgaaatactaagatgccatgaaaaattgtgttctataataaaaataaaatagcaaaatgttcatgacatattacataaaggctggtaaaaagcatgtgctctaaatacaatcatagttgtttaaaatctggtcttatttctagattgtagcatcatggttgatttttgtattgtgtgtgtgtgagtgtgtgtatgtgtgtgtacacatgcacctatatgtgcatgggaggcataccaattgtggataccacagattgtaaaaatttagcatatattaattttgtatcttaaaagacacagtaatttttaaacatggttgctatgaccttcttcaaactgttttggtgcctgaatatagatcaaacttattccaaagagaaagtcactataatttctatgttaggaagtttttaacaatttatttttattttatttctttaattgacacaaaataaccatacatattatatttatggggcacatagtgatgttttgatatatataatgtatagtggtcaaattagagtgattaacatatccatcacttcaaacatttataagatcatttctttgtgttggaaacattcaaactgttctagccatccaacaatatatcacaactttttaactatagtcatcttatagtgctatagaacactagaacttattcctcctatctagctgtaattttgtatcctttacccaatctctccctatacccctccccacgattcttcccagccttcagtaaccactattctaatctctgcttctacgagaccaacttttttagcttctgcatatgagtgagaacatgtggtatttatctttctgttcctggcttatttcacctaacacagtgtcctccaggctcatccatgttgccacaaatgacagaatttcattcttttttagggctgagtagtattctattgtgtatatataccacatttctgttatccattcatcttttgataaatacttaggttgattccatatattggctatcgtgaatagcattgcaataaacacagaagtgcagagatcccttaaaggtactgatttcctttcctttggctatatacccagtagctggattgctggatcatggtagttctacttgtatttggttttttgaggaaccaccataatgttctttacaatggctgtactagtttacattcccaccaacagtgtataatagttcccttttcttcccatcctcaccagcatttgttatgttttttctttttgatgaaggcatttttactggggtaagaagatatctcattgtggtttggatttgcatatacctgatgattcgtgatatttttatatattggttagccatttgtatgtcttcttttgagaaatatctgttcagattattttccctttttaattggattatcacatttttcactgtttaatagtttaaattccgtttatattctggatattaatctgttgtcagatgcatagcttgtttcctttgctgtgcagaaggtttttagtttgatataatcccgtttgtctatttttgcttttgtttcctgtgcttttgaggtcttgtttattaaatttttcccagaccaatgtcctgaagcatttcccttatattttcttctagtatatttatagtttttggtcttacatttaagttttgaaactgttttggtgaatttttatataaggggagagataggagtttagaagtttcattcttctgcatatggatatccaattttcccagcaccatttatcaaaaatactatccttgccccactgtatgttcttggcagctttgttgaaaatcagttagctgcaaatgcatggattgatttctggattctctattctattccattggtctatgtgtctatttttacatcagtaccatgctgttttgatcactgtagcttcacaacatattttgaaggcatgtagtgtgttgcctctagctttgttctttttgctcaggattgctttggccatttggggtcttttgtggttccatatgaattttaccctttttaaaaacaatttaggggaacatcacacctggaggcctgtcaggggtggggggaaaaggggaatgggggcattaagacataggtctaatgcatgtggggcttggaacctggatgacgtgttggtgcatgcagcaggccaccattgcacatgtatgtctgtgtaacaaatgtgcacgttccgcacatgtatcccagaacttaaagtaaaattttaaaaatatatatttttaaccataaaatttcttaataattgattcaaattgctttgttttgttgtctaaatcaggatctgattttgccagtgaaaatttggcaataagcacacagcactatacagcagtagagaaaccaggcagtgggttgtagcgcattcggtgttagcaggtacaggacagggtctggagccaggcaagcatgggtttgaacccagcttcactcttattggctgattgttttttggcaaattattaaactccccgagtctcattttcctcatttgtaaaatggggataaacaatgcctaccttacatggttgatatgaggagatgaggtggtgcatgaaaagtacttagcacattgctggacagttgaaattactaataaattacatctactgttataattactattattagtgccaccatcatcaccctcatggtgctaggaagaactctccacatgggttatgagatcatgaaacttaaaaacttctctaactctttttcaaaaattatgtctaatttctgggaggctttttctctaaaagtgacaaaaagaagaaacaaagtgccagatgtgatagaaagcccaggtatccatggaagaaattccagcaagaaatcctatgtaataaacatatggcctcagctctagagtagacttagcacaacttgtagaaacacacctattatttacctgattagattcaacttagccttgaaaaaaatcccaaataaataaaattataccttatctttctgtagccacaattaggtaatattggacaacaggctatgcaagaaatgtgagcacatttctctgtgaatatgtcttttccccagcactctgaataagagaaattctcttgaaatacttggggattctcagagcagctgacaggtgtggcatctgggtaaccattgtgtaaaccagaaccacacatccaggggcatctctgcaggaagatgtactcaatgtccggtttctgaccttggaaattatccccaaatgttaaaaaaaaaaaaatagacaagatagcactaatgactgagaagataccctgaaagtagatgcagagctgctacatgcagaggaaggaaactgatcatagctctgggatagcaaatgagcaaatgcttacagccagacactgaacttacgtgtgccaggaaactgaggcacagaaaagggaacaatcttgccctcatccctgaactaccaagtgagctgtcgggatttcctccctggggaacaagtactaagaactaagaagtctgtgtcaggcattgatatttttatgcagcacacgagatggtaactatttctgttatcatctctccttcacttttcccttctctccatatccaagaactacagatgacagttctccttttattcctacactttcacccagattttgtcatacataacagatcatactttctgaccaatcttacctgattgttttttaggcgtactttattagttgcattttgtcaaagtcttttcagacagaatatagtatgtgtgggttttttttccatgtccaaacaagtctattctgaacaaacctaattattaacattcgagaattttatttttgtattaataatttgaattacacatgtctctgctttctgaaaaaataggacatggaatgtgtgattaattttcttggctattctgatgattgtctttgttttgaacttcaagtactatggctctgtgcactattttcactataaagccagcaaagcagtgacagattcgcagatagcatcatctagaaatttaaaacatgagtttgggcatgaagcctgaatttgaatctgagctcagctattttccttagttgcaaattaaactccttaagcctcagtttcctcatctgtaagatgaggttggtaatacagtcacatcatgttcttgggagaattaaatgggataatgtttgtgtaatattttgcatgatgtctggcacataatgagtgctctataaatattttatccatgaacgaatacttatttaacaactacaatgtaccaggcacaaatcctatctttatgaaatttacatagggagatatgttgaacaaatcatcacccacataatcaaataagaacaattgcttgagctatgaagaaaaagtttaggatgctttgataacatttaatgagagacccccccccccaacccagcatggagtctgaggtatatggatgggtggaaggggatcaaagatctttcccctgaggaagggtgatttaagctaagatataaatggtgagtggaggggacagaggttgagaggacactccatgcaaggagaagagcagaagtgaagggcctggtgcagagaagtattccatagatcaagagatcaggttgtgtaatcccagcactttgggaggctgaggctgaggcacgtggatcatttgaggtcaggagatgtactcaatggagtacatctcttgcaataatgagtcttattattcaacatggtgaaaccctgtctctactaaaaatacaaaaattaactgggctatagtagcgtgcacctgtaatcccagctactcgggaggctgaggcaggagaattgcttgagcctgggaggcgaaggttgcagtgagccaagactgcgccactacactccagcctgggtgagagagtgagaccttatctcaaaaaaaaaaatttaaaaataaaaataaaaaagagatcagggtggccagagcaggggatagggaagagagtgaaaggcaggccaggagcggaaggcaagagcagatcatatggccctatggcccatgctatggacgttgggcttcatctaagagtactggaaagtgtttgaggcctttaagtggaaatgtcaccgaattagagttgtattccataaaggtcatcctagggaaaagggaaggtgacccaggcatgcaggagatcaacaagaaggcacttacaggtgacaggtgttgtggctgagtagggcctgacaatggagatggagagacgtggaaagactggggcaatactaggagttctgatctactgaagacgtcaagaagacatcaggactgattgtcactttttcttaacagtgagtgaataccaaatataatttataaagatgggaaatgccagaatcaagcagactagcatgtgtcattttgaacacattaaccctgaggtttctgtgagacatttacatgaagaggcatgtatgaatcatgagctgaaataagcaaggactgaagccattcgcttgatggctgaatgctagctgcagatactcagcttgaatgtattcatgtttttttagagtagggtttctgagagcccccaaataattggaggatatttctactcttgcaattgaaaaaaaaatcaatgtgtcaattaaaagaaagatttctaaactggaaatctgaagaacagagtttttaacctagtcgttttgctcactggctgtgtaaccctgagcaagttcctgatcttttctgaatgttgacatccttgcgtatttgtagtccagacgtcagctcagctcttgttgccttaagtgtttatatgaggtgattataaatggcttcaacaacaaattagatcaaaatgtgtgtaatgaatgctaaatggagaaaatttaggagttattgaaatacatatagactagtctcattctcagaaacagataaatcatgctaaataagttgtcatgtccaataatatatccatattcttatatatatatgccccttaaaatgcttctaatgtacaccttattgcaatattaaaagggaagcaagacattcaattttttcattcattcaacattcattcattcaacattcaaaaaacaatcaactttctctccaccaataatttttgctttctcaataagttgtaaaatttcaggatttaaatgtcccctaaagagtattttaataggatgctgtgtggtacttaactccccagtctctggcctcagtgagtgggtatcccgcctattctgagatacttttcatgtatcattgatggtaaggccaagttccagggcagcccaaatcagtcttcctatagctttcagccatcggttagagctctgaccccaaaccaatatgctagcctcctggttggtctccctagcagccttcttctttagttattcttagatagtataagccttatgaaaaacttaggaaaatagagtcatgccagatccccaggttctaacacattctgaaggcagtcacttgctaacaccaattcctatcttgagatagaaactcttctaactctccaaaatcaaatctgaataaacaacaatagtgagtctcattattttcattttgacgaactgtgtcagctttcttttcttctcatgaacatttttctgtgagtgagagagagagaaattgataactacagttgagtaaaagttttactgcttccacacccacctggggaattagtacatctgtgctgagattgctgaccaacactattgttctctaacagcacatccagaaactattattggtggtgatctgatatgttctgaattaatcacctaattggagcagatattgggtgagcatttcagaggggaatcccgacagcgggaaacgactttttcttagaaacatggctggtgtgaggtcacagaaaatcacaacgggtaccagggattagtccttctgagacagcctcaaatgcacttgtttctttgtttgactatttttcttcaacttttattttaagttccggggtacatgttgcaggatgtgcagatttgttacataggtaaacttgtgccatggtggtttgctgcacagatcaacccatcacttaagtattgagcccagcatccattagctattcttcttgatgctctcattcaccacaccccccaaacaggccccagtgtatgttgttccccccatgtgtccctgtgttcattcagctcccacttataagtgagaacatgtggtgtctggttttctgttcctgtgttagtttgctgatgataacaggttccaactccatccatgtccctgcaaaggacatgatctcattcctttttatggctgcatagtattcaatggtatatatgtaccacattttctttatccagtctatcattgataggcatttgggttgattccatgtctttgacattgtgaatagtgctgcaatgaacatacacacgcatgtatctttgaaatagaatgatttatattcctttggatatatacccagtaatgggattgctatgtcaaatggtatttttaccacttcccatgttgatccttcaggtatttttatgcctgtcttgggtcttccaggttttacaaaactttctgaatcattgtcaccactatctctggaacagttggaaattcattctgaatattctttggccttcagaagagttttttagtggacacactgccttataggagacgtatatttatttcttaaaattaaattctgatatctcaaccactataaccctaacctacatcctagtgaacaaaagatgccacatcgctcagctgagttaacagtcacgcaaatgatcacatcctggaggatgtaattctctgctcttctatgacactgactagagtctctgggtgggcacttggattaccatgctctactacctacttatccagccaagtgaattttcagtctcccgggcctaataagttttcatatataactcatacttcatctttaattcagtaaagaatcattgaaatgacttactcaagggagggatagtgtcatgtttgctttctcagaatctctctggcaagagtgtgagaaatgggttggaagcagataagaccagaagcaggaagcccagttagaaaactgatatgaggttctagctagacgtggtggtggccagaactggaatggacaataacaagtgaatacaggtttcgtagtcagggctgggtgattggatgttgtggaagaggttggagagtggacggttgaggatgacagtgggtttctggcttggacaagtgagaggaaggctgcccaaagtgaagcagagaagcaagagtcggttttgtgagagatggtgaattcagtttgatgatgttaaggatgagatagtttggaaacatcaggagggatgtctggtaatagttgtgtgtgcaggacggagctcaggtggcagagatggtctaggcatagagatttgcaagtcatagggaaaagaaagaaactaaaggtatgaaatgaatgagctgccctgaccttgatcttccccctgaaagtaccagccagttctcagatgagaatgcagaaggcttcattaagtttgaaaagagcaaggatgtctcttgcaagcaaagctgagatttctaaatgtgacatttatatgaaagaggaaggcatggccaattcctattttcaaaaatgtctataatcaaaacagtaccatactctattgccttttaaaattaaagaggaaattgccccaatccctttctgcgtgttaaaatttggtctgcccagctatacttagaagccatattatagcttccaaaaagacatcctgcatgttttaaatgagctattaaaattcctatatatatgtattatgtccatttgaatacaggacccatgactgatagaggtcaggccctggtcaggtgttctagtccagatggagcctaggactgtttacccaagtggctggggagaaagagcagagacctatagccaatcttcatccctagcttaatccaggcaggggagggagctgcacaggagctgggagtgaagagcaagggtttattcatattcctgcttcgcacaaagctagaagatgctgttggaagatgcaagggccatgcctctgggtgagccagtggcctgggagaggacccggaactgtccagagcactcagattaagcatctttgcagcagtccggaagcaaaaacccattttcctgctcccctgttcacctgtgactattcaagcatcagccaactcacctgtgtcctttctggcaaggatcaggacctaaacctgctttagcctttaagctgaatatgaagggacacagtcctgaaaaagcctcacacttcctccttgggagatcagttttggttgtttgtgtcactgcttcagatgtgtggtgtttggccttggacttgaatcccacaaatatgagaggagatgatgactatcacatctgaattataggcttcaacccttcttccaggaccctataaaatgtttttataagtactggaagtaatcattttatgaagtgcctgcaacttagctgtataaaactacttggagaatggtcttgttttcacataaatgtgagtgtcttgaagatctgaaagatctccttggaatgtgagttaagacaggctctgtttctgcatttgagaatctatctccagctgtgagtaattgaagcaggagctgtgttcaaaatgttgttttcttccatcaaccaatgtcatctattggctcaaaagcattcattgagaatcatgttgatcacttagagagacacgaatgaaggataagaaggagggtgtatctttaaggagactaaaaccaggaggattgaatgtgtcattcattcagcaatattgttgggagcctactaaatgctgtacaccattatgagtgttgaggatacagcagtaaattaaaaagacaggaagctcttccttcaagggagtttatagtcaagaaaagcaaccaaaaatagaaataagtaaagcacagaaaatggtgataagggctatagagcagtgttccccaatctttttggcacaagggactggtttcatggcagacaaatttttcatgggcctggagatgggaggatggtttcaggatgattcaagcgcattgcatttattgtgcactttatttctattcttattacattgtaatatataatgaaataattatacaactcaccataatgtagaatcagtgggagccctgagcttgttttcctgcaactaggcagtcccatctgggggtgatggagacagcaacagatcatcaggcattagattctcataaggagcacagaacccagatccctgacatgtgcagttcacgatagggttggtgctcctattggaatctaatgccactgctgatctgacaggtaatgtgagcaatggagagaggctgtaaattttaaatacagatgaagcttcactggcccaccacacacctcctgccatacagcctggtttctaacaggccacagactggtactggtctgtggcccaggggtttccctgctataaagaaaagaaactggtgctaaatccacaggggaaatggcaagaaagcaagctatactgtaacaaagaagggctcgtggatgagtgggattttgaaaacagccttgaagacagagagaattggacaaattcaagtttgagtagatacaggggagagaggtcactgagtgaagagcagaagagtgcagcagaaaacagccacaggagctgaggtcacagtcacctcgtgaactaacaaagttagagtgaaaagtctactgcggcaggaagaaagccttggtgttggaaactcataattcctttgttggaacaacaaatgcctccaacataggcatttgttggagacactcatagaaggtaaacacctttgcatgttcctgaccattctacctccagtatctatggaagtgcctggcctgagcaggtgctaagtaaattatgtgttaagtgaatgaggaatgaagaaggttgtgtagggctggtggaaccaaataataaaggggccttgaatgacagagtgaggagcttggacttgatcttatcagcaacaaaaagataatgcataacacatgtcttggcagataccccattatgaggttcccttagctacaatactgagccccttgataagcctcccctccctttagttatttctgggaattttcccccatggtttcttccctttccatcctatctccttggaaaggaccagatgagcacagccttagcctcccaggcctcagatgtggaggtgtgtggcccgtgtattattaagaagctcacaagttctgacgcgaccagcagcccaaaccgtgctgtgctccaagcaggaatagagctaattccattcccgcttcatgcaatcagaattgcctgggcccctatgcagacgcactgcatgacagcagcctttgaattctcctcccacccctcctttccgtgatctcaaagtaaacctctaggatagacatgagggtgtcctcccaaagccttccccaaaacctcagtttcccctcttccttccaaagcctgccctcttcccttctggccatctctccaccacgttccttcatcatcctgcttgtcatgggctgttttccccttttgactgtttccatttgcctagaagcatctgctcttacagataggaaggggtagcatcaattactgttctaagtctttacttttacagatgaggaaactgaggcccaagaaggaaaaaatgactcacccagctttaaacaaccagttcaccatgcagcagtgctggggttggaggtgatggagaaggaaaatttggaaggtgtttcaaggaaagacacctgtggggtttggtgaccagttggaatgtaagaggcaaaaaaaagggagaaggaactagatacatattcttctggcaggaactgttaattgggttcctgctcccatcttgcactacagtgagagagataacctggtctcctaccattggaaagcatatcatctgtgctctggaggatgagacaatcaaagaaaacaagtaaataagaaaacttaaaaactgtgatatgtaccgtgaaataaataagccattcagcaggtgtgagtttgaagattactcttctttagactgggtggtctcagggagagattttgtgcagagacaattaaaaaaatttatatatatatatattttttttattatactttaagttctagggtacatgtgcagaacatgcaggtttgttacatatgtatacatgtgccatgttggtgtgctgcacccattaactcgtcatttacattaggtatatctcctaatgctatccttcccccctccccccaccccacaacaggccccagtgtgtgatgttccccttcctgtgtccaagtatagtcattgttcaattcccacttatgagtgagaacatgcggtgtttggttttttgtccttgcgatagtttgctgagaatgatggtttccagcttcatccatgtccctacaaaggacatgaactcatccttttttatggctgcatagtattccacagtgtatatgtgccacattttctcaatccagtctatcattgttggacatttggtttggttattatattataaaaatgttttaaatggaagactcatgaaacaatggtgaccttagtaaaattgacaaggcttggaaaatacactggcttatgaaaggagatctgcttttaaggaagcagcccataaaagcacatgatgacttccttattgctagctttttcctgaacaaataatcttttaaataaagggagtggggtagagaatcttgctatcttctgagagtgtttcaaatcaaattatttattggacacaaggaggtcttctagggagaaatgtctacatgtggggtcccctattactctttccagcgttcttatgggcgttggggtccaaatcatgcatttgggtggacctgctcctttttcctaaaaggagaaatgcttcttaggctttgttaactggtgagacgaaccatttgacaagttttaattccagcagctcagactcatccaggatgaaattcctgattcctcagagctctccttggccagccagacagatcctgtcaagagaactttagctgccacttgcagaagtttgagggatgagaggacatctccccaagtgacctctttccttgcctggattggaaggagcaatggtttttcacagtaaccatagaccaacgtgcctcagtccctggaaaagtgggcagcacttccatcccacactgggcaggcccccagggtgccctgagcctgtctccttcggggatgtgtgcccagcacagtgtgcccggttccccttactcactgtaccctcccatgccatgctcccatgctttgccccatgcaagaggagagctaattccattcctgctcagtgccaccttcctcactttaccaaccactcaagttttctgccagaaagttcagaaaagactccacatgccaacactctcaagtgagcatacacatgactttactcagatacatgaatggagagctgtacaatttcaggccccagttaaataggggaaaaaaagactagcgaagtccttccaaagaggcaccgaaatcacatctgcttgctctgttggtaagctagattctatcattaggacatacaggctaagtgaggttccccagccagggtacagcttgtcctctctacctgggatccaggctgaaccatctttaccatcaccagagagcactgcgagaagctaatacaagctaaggactcttcccaggaaaatgtatctctggacatacacatttcatgtcagtcatgggaagtctgtctgtgaacctgaggttgcaagcctaaggttactgtccatggttattctgaccaccttcttagagagccctggtcaccatctaaggtagataatctaaaaacttcttgctgactgagagctgcccaagtggccccacataaaccccaggagggttcaggccaaagtagttcagcacaaaggcatctggtagactctggtctgctcttaaactttgactctatagcttgtctctggggtttaatttgatggggcagttttcttcctggtaagaaggagccattgggtctggcctgaatgttactggcactggagctccttggcctgttggtgtggcagcctgtctctctcctctgctcattggatgtgtaccaggcacatcggagagaccactcgctgaacaaggagaaacaattaaagattattttctcccatggtcatgtaacattagcttcttctttggagtccacatttttttaaattgagatcattcaaacttcatttctcagaatgtaaggccctgctgacaaacccttctgaacagcacactctgacttttaaaataatgcaattattgaggatactactcccctctcttctttctccttatctctgcaaaacctgttgtcattcagtgaaagctggacatactgccattaacacttccatgtcatcgtagggttgctaaacggcacacaaagatcaggagtggaaatgggtgaggtggagccgagtttgggtccagctgtgtgatttgggggaactactcgcgtcttcagccttgctgtcttcacatataaaggacaggttgacagctctgatctctaagtgcctgccagtcttcacattttagccttatgcaactccagctaagtagggtttaccatagcccagtgtctctcaaggttgtcattaagatgtcaagttttccagggggtaaaatgaagcgcagaagctggaggctggaaccaagaagactgactcacagctttcagcttccatatcaagtcacccttattctgagagaaacagttgaactaaggaggaaccccctaatgaccagtgctggataggaattcgagaactcagttcctactctcaccaacttttgaagctaaccatagcactcaccggtgtatcaaattcatggaggagaccagcatgggcaggaaaaaatggttttatcttgtattggagccattgaggcaaatgttgctgtaattttataactgtaaaaggtgactctagtcgccaagcctttactgggatgcctcctagtgccccctcataagcctattagatgagccccagttcaaaaatgaagtcagattttcccaatggatatagcattcagtggaaagacatagaggcaacattttaaattattcgtttcaatttcttcttggcatctagaggcctttacagtggaagtgaggattctgaatctccatgaatgagaatgttgatggtgtttggccataaactcctgttctatccacctcagtctgaccggcgtaagttggtcagggtgtccagagggtcaggaaagaggcagaaattctgcagcagaccaaatggtggaaagaaactcagtgacaggaagaatccttaggctgtggggattttccaaagcccaagaattaaaccaggcaaattcacatgcaaaggatggcttgagctgcagggcaaggtgttcaggggattaagtcaggagctgttggctcttcttgaagcagagattgttgaggagaaaaccatagctacggtgaccaaagaagtaggagcccctattctcatgtgggtgatttggaagtctggctcttcctatgaagcatcatgagaaaaactagagggtctgatgccagatgatagagcaaggaaaaaatggtagtaaaataacattacaaaaaaaccaaatgactgaactgaaatggtgggcaaaaaaaagaagaatgagacagcagaaagaagtcagggttgggagataatatgaggctacagccatcacgcagaaaagaaaaccaagccacactgtgaagaagaaccatggcaagaacacagagacacagccattcattcattcagtcagtcagtccatccgtctgtcagaaggtcggccattcatgcagcaaaaactaggagaatgccttcaagactctagcattttactggattctggagctccgtgagtgagcaaagccggccggatggctgctcgaatggacttccccacagagtgactgggtcagaggcacccacccctgaaccaggctggttcagccctgaccctctaggtcctgatggctggaggccaggaacaagcattctccagctgtcttcccaccctaaaaacatagccagtcctcaggaagaaagagatttgggaagaatggaggctgaggatagaactaatgcagagttcagagaaaatagaaccagacggggaaggtttgggcagagaaagagagagcaggaggagggtttggggccatgcagctgctttccaagcccaattccagccccatctctcctttctaggagaggaaaaataaaggaagaaatacgtggatgggaataatgtcaataaggagaggagcagttcttttgctgtcctttttttttttttttagacaggggttcactcccgttgcccatgctggactgcagtggtgcgcattagctcactacaacttctacctcccgggctcaagcaatcctcctacctcagcctcctgagtaactggaactacaggcacatgccaccacacccagctaatttttgtatttttagtaaagatggggtttcaccatgttgcccaggctggtctcaaactcctggtgtcaagtgatctgcccaccttggcctcccaaagtgcagtgattacaggcgtgagccaccatgcctagcccttttgctgtcttttctcactctttggaaagttcttgaaggaagcatagctatgagtctctcatctaaccccagccagtcagcagctgctcaaagaaaatcacatggctcccagcacctgttccccatcacaagggaagaatactccaagcatgagaatggatcctgcaacctgcccctggtggaactatcagtttgggagcatgcaaatccgtgctaggcttacacacatctggctgctgtcacacacttaataggataaaccaaacattgtcatttacaggaaggtctctggtctggaagcataagccaaaatctagagatttgcttggattaaaaagaaaatattcctggggttaggcctagagattatctgacattcagatcttagtgtaaattagttttaatcaactctctttctcaccctatacctatacctgagccatgttgaagaaatgagtgttttgagtggggtacagagagggggaggccaggattcacctgtgaagactggaacacagcaagagactagagagagggcccaagagcttggctctgggtcagccatacctggaattaagagcagggccacgcaaggaaagaagggatgggaaggaagtgactaaaaggaaatgttgagatttacgagtgcaaaactgggttctgtaagcagaatgagtgtaattgaaggaattatgggaaattccaagactctcaaaccatatttattagcattcacattcatagtgcatatttttttttcttttttaaaaattgaaattcttcaaataaggaaacgaccctcccctccctcgctgatttacagagtagtgacattcccagacaaggtgggtttcagtgtgctcagctcagacattcttgtagtcattaagcacaggcccaggcaggtctttgtgaaatgggtttccttaatcacatcactgtcactattagtaggaaatattggacaatatataggtttcataatgtaagacaaatttttttctggaactgaccgcatttgcacaaaaccatcagtcatgttggcattagccattttttccatcacagatgaggttcgaaaaagcatttttccaattcagcttcccccagctgcacactttatcactccccatcagctatcctcctaagagatgtattattgcagtatatttggagattccacaaaggagcatgggccctgaaatcaatcacactgcctaatttcaaacctaccagtaactatgtgagtgacctcggttgagctactcaaactcattaagccacagtttcttcatttgtaaaatagggaagagtcacataactcttcatgttactaacgatgattaaatcatatggaaagtgttcagcacagtgccttgcctgtttcaaatcaggcattcaaagactgtaaactttattataattataggacaacatgaaaagctttagagctaaagaataaaactttctcactttacatgttttccaaataaacacccatcatgtgtgtgtgtgtgtgtgtgtgtgtgaatttgagacacatggaacttagcagggagtgtgcttcagaggtaataaatgctcccatcaacaaccacactattgtgtcttctttgggttcttcagtatttaagtttactctttgtttatattgatgagctttttgacttaatttcagagcactgtttgccagagtggattttaatagcaccagcaatttgtcacggctctgataggtccacagagcagagaggaaaagaaagacataaaatcaagaccttaggtttgaaacaacagcaacaaaaaaattgttcagggccattaggaatcatccattcaacatactcctttttcagataagaaaactggaggcccaaaggcatcataggagtttcccaaagccattctaccaactgtacacgaagctgtgactaaaagcccgcggagaaggaaaaggagcttgggagccaagaaagaaaagaaaggaggtggaaggaaagtcaagatgttattttgcaatttctctgaaaggagtgaagagggacgtttgggatttcataattcataaagctcctttagcaaaagcccttggaagtctgagaatcagagaataaagaacattggattgggagtcccataccctttatccatcactcttatcagtattgtagctatgaggtttgtgacaatctctttaataagcatttttaagagttcagctttttattgaacgtgttataaaataggtttactcaaaaaaaaaaaaaaaagcccatattatcatcagactccagattcttctttctttgcttccaccttcttcttctcggcctaggccacagtgacagaagggcaggacctcccgcaggtacaccaccagctgctgagcaggtcttcccaccccgcccctccactgcagaggaggctcccgaagttgacgatggccagggccttggcagacaagccaggccaaaagccgtcatcatttaccccagctgctttagaaacgacattgaccttatcctatgtgatgatcccctcagcgttatacagaatgagggctgagtcagtgcaggcgagctctgagatggagtccgtggtgtggacaagtgcaaggctgggctgcccggagtagtgctagtgctggatgcagtgagggcctgaccccaacgcagcctcagctcagaagggcagagcatcttggcggcagctgggaaaaggctaaataagcattttttaaatttgtaaattgagtaattggaggagataatccttaaggttgttccattttaagacttcacagttttgttcttctgctgcgaaatgccctgtggcagtctctgcgcaggatgtgacgggtcctgaggcctggttcctgccgtgcacatcaacgggtagggtttgggtaggtagagaaggtggaaaagggcatcaaggacacagtggcccaacttgagaggacaaaaaaaatgatcaatgacctggagaaaaagtgtagtgagtctggctagagaaaaaatagcaactagtcatattagaaagctggttagaccagaggctgtggaggactccgaatgtgaagcaaagacacacatttgggagacatcgagggatattgacaaagggagctaacggtgacgtcaaaagacatcatctaggaaaagtgattgagaatcactggcccaactttggcaaggccaatattgtgtaaagttgagattctcatcaaaatccataattctaacatttgggaggggaggaattcataaacactgaggctgtgtctgttgcataacactgcatcagagaataaaaggcatgttcagataaccgaattttaatatggattacttgcatggattccaacttacttttcaatttaggcaattttcaattaggcaaaacaatttacatatgtggactcagtctgagtttcacattttcatttggtaaaacttcacagcagctgttggtcactgagagccagtgcaaccctacccactgggcctgctcctgtaattaatgacacacgcggaccaagtaggaatggtctttgaagatattgcaaaagggtgacagtcataggagctagtcagtcaaatgtgagaaactcatatgtgtttgggatcattttaaccgtttaaaaatacagaaagatgtctgtttgattgttttcctagccaattggcttgctggctttcaaataatatgtataaatctgtgtgttttcttccagggtctttcttccctgatttcaagccctctgaaacagtttttaaaatagtattttggctcggatatctaaacagctgcatcaaccccatcatatacccatgctccagccaagagttcaaaaaggcctttcagaatgtcttgagaatccagtgtctctgcagaaagcagtcttccaaacatgccctgggctacaccctgcacccgcccagccaggccgtggaagggcaacacaaggacatggtgcgcatccccgtgggatcaagagagaccttctacaggatctccaagacggatggcgtttgtgaatggaaatttttctcttccatgccccgtggatctgccaggattacagtgtccaaagaccaatcctcctgtaccacagcccgggtgagaagtaaaagctttttgcaggtctgctgctgtgtagggccctcaacccccagccttgacaagaaccatcaagttccaaccattaaggtccacaccatctccctcagtgagaacggggaggaagtctaggacaggaaagatgcagaggaaaggggaataatcttaggtacccaccccacttccttctcggaaggccagctcttcttggaggacaagacaggaccaatcaaagaggggacctgctgggaatggggtgggtggtagacccaactcatcaggcagcgggtagggcacagggaagagggagggtgtctcacaaccaaccagttcagaatgatacggaacagcatttccctgcagctaatgctttcttggtcactctgtgcccacttcaacgaaaaccaccatgggaaacagaatttcatgcacaatccaaaagactataaatataggattatgatttcatcatgaatattttgagcacacactctaagtttggagctatttcttgatggaagtgaggggattttattttcaggctcaacctactgacagccacatttgacatttatggggagagggcctagagaggaagagcattaagatggtggccgagatccagacacattatttttagagcaagtcctgaaactccaccctttctgatacatccaatttctcagcttgagggaaacttggcagtgaggtttacctttgactgcactttgaatggatgctgctcctcatttcccaaagatgagagtgaggggcactcatgatgtcttggaatgtagtgttctctatccttgggtcaggagagggttgaaagaaccaaccagggtggtatggcttttcccaagagaaaacaatagacctgagcatcattctttcaatttaactactagagagaaaatccattaaacagttccaagatcagatgatgataggctttctctctaatatctttaaagagcaagaggttggtgtggctgttaatttcttgcaaagatagaggctgttcacttactgcacagccatttcaacatggcttacaaaagcctttcttgacaaatcacttacctgttccagaactctgttatgaaaatccagagcttataatattttgaaaggcaaaagattgtctcccattacttcttatctgcttcactattgcataatgaatgagcttcacctgtggcatgttggaatgagccttatgatccaagtacattattcccgaactttgaaaaatactaatgcttagcttcagacaatactgatggatcaccaaagaactgtctaacgcaggagtttgcaaacattttttgatagaaggccatttgttctggtaaaagatccagtagtcaactcaacttcatctattcctacttttctgcaagagcttggggaacatgctatattttgctttatgtataccaaattttggtaaaccataataactcagtacagaacttgtgtatctcttttctgaaatgcctggaaccagaagtgtttcagattacagattttttcaaattttgaaatacttgcatatacataatcaaatatctctgggatgggacccaagtctaaacacaaaattcatttatgtttcatatacacctcatatgcatagcctgagggtaattttatacaatatttttaattgactgtttttgactgcaacccatagacatgaggtcaggtgtggaattccccacctgtggcgtcatgtcggtgctcaaacaatctcggatcttagagcatttcggatttcagattttcggattagggctgctcaagctatagattactaaggatgaagatggtaactataagtaaaaattaaaatatggctgtcttttcacaataaggatttaaaatagaatttaagtttttggaataattctcgacaacaatcagtggtctaaaactaaagaccatttgcctggcctctttcctctattagggtaatttcctctaacaaattcaaagcagctgtaaccttcacagcaagagtagcggcctcaacatctttttcttcttctcttgcagcaaaatgataatttccttaaattcttcttaaaaccaaatctctttccacattgcaatggagggtatgtttgcatgtggatttgggttttgttataggttgtatttagacctggagtgtgactgttttttcagcctttttctgaagagtgtcttcttactggccagatacatattcagccttgtgttcagaacttggattctggcactgagatgttggccggatttttagactcttctgttctctctctgtgtcccataagagctctgccagatgtgaatgtcctattatagaggcaggcatctatgaagaacttgaatatgcaaacccttgcttctctttggccttgataggaaagatcagtttcattgttgacaagagcttggtccaggatctgaataagaaaatcacttgccccactcccccttacaggaagagcgtcccaacaggaagaatgattatcgtttttcttcaacaaattatggttccatgtttgagatgatcctttaaacacctttacagac

SEQ ID NO: 128 - DNA, 312957 bp, Human
  misc_feature (1)...(312957): n = A,T,C or G
ctggtccgggaggccacgccagcgcgacccagccgagtcggcccccagcccgggcccccacatttcctcccccggagggagggaggcgactctccgcgggctgccctccccagcgcccgccgcgccctctggcggccgccgcggggacgcgcccggggcacgcggcgctgcctgtctgggccccccttccggggcgcggggcccgcgaggggcggcggggtcctctctcctcgagccactctgggccgagccacacgggccgcgcccttccccctccgctccccctgagcccccaaactccgggctccacggtcgcaacgccgcgggcaccccagcctggcgtgaaagtgcccggcgtagtagcctgggggggggggtcccctttctcccaggtgcgccccttccgccacgttcgggctttccagtacgcagcgaaaaaaatgccgcatgcacgcatttatttattttgcaacagctgcaagaaacaatgaagcttttcaagaaccggggaaacgcgctttccagccgcgctgttgttgttttcaatgaacctctcccagccccgcactccccgcccacccctcccctctcctgcccacccctcccctgcctagcctttccctggctacccacccctgccccgccgagaccggaccggcggcgggggcattgtttttggagtcgggcgggaggggagggcgcgtgcggggtggccggcgcagtgcggtgggggcgggagcgggtgggcacgcgcgcgtgtctctgtgtgcgcgcgggaggcggtggggcgggagatggggggcggcgcctcgcagtctcgcgccccacgcccgggctccgctccgcacgtcttggggaacccgggctccggttttttgcgcgcgccggcctgggccgggccctcggcgcgccgctgctgcggcggtggccgctcgagtgtgcgagcgggcgcgtgtgcgcgggccagggcgcgcgcgcgcgcgcgcgagcccccagtgtgtggcagcggcggcggcggcgcggcgaggctggggctcttgtttaccagcattaactccgctgagcggaaaaaaaaagggaaaaaacccgaggaggagcgagcgcaccaggcgaactcgagagaggcgggagagcgagagggacgccgccagcgagcctgcccacggccggcgctcgcagaccctcggccccgctccccggatccccccgcgccctccacgcccctcccgcgcgggggcagctccacggcgcgcctcgcctcggctgtgaccttcagcgagccggagcccccgcgcagagcaggcggcggcgggcgggggccgggcgggggccggcgcggggcgggcggcggcgcagagccgggcggcgcggcgggagtgctgagcgcggcgcggccggcccgccgctttgtgtgtgtcctggatttgggaaggagctcgccgcggcggcggcggcgctgagggaggaggcggcggcgagcggagccaggaggaggaggaggaggagggggagccgctcattcattttgactccgcgtttctgcccctcgccggcctcgcctgtgacccggacttcggggcgatcttgcgaactgcgtcgcgccctcccgcggcggaagctcgggcgtccggccgcctcccgcgcggccagggccgggcttgtttttcctcgcctaggcagatttgggctttgccccctttctttgcagttttccccccttcctgcctctccgggtttgaaaatggaggccgacgacgccgacagtccgccccggcgcgcctcgggttcccgactccgccgagccctgggccgctgctgccggcgctgaggggccgccccgcgccgcccgccccgtccgcgcacccggagggccccggcggcgccgccttcggagtattgtttccttcgcccttgtttttggagggggagcgaagactgagtttgagacttgtttcctttcatttcctttttttcttttcttttcttttttttttttttttgagaaaggggaatttcatcccaaataaaaggaatgaagtctggctccggaggagggtccccgacctcgctgtgggggctcctgtttctctccgccgcgctctcgctctggccgacgagtggagaaagtgagtatgtgcccgccgcccgcggccactgcgggaacttttcctccgaggggctgcgccctgtttgcgaaacccgagttgccaccgtcgcagctgtcgggcccccgggctcgggagcggcggggtggggcgcagggcggctctgccgggagggaggctgcagcggacccgggacccgggctcgttcgtctggagccccgcgggccctggctccgcgcatccccgcgcgggaagggcttttctctttctccgtcctgacagcccagccgtgtttcccggctaggcgcgaggactcggtagggaagttggtgccggggcgggctccgcggttcccgggccccgcgacccgcacctcgccccttccgtgcgcacgagcctctccgcacacagcgctgatccccctgcggcgcgcaggcagcagcgacagcaccctgggccgcaccgcgtctccgctgctggggctgaccgggcagtggggagcgggcagccgcccggcccgcggggtgcgagttgccctcgaggggggaggtgccctgcggagaggccccgaagccccaggacacgtctccaagcgcccgtcgctgcctcccgtcgcccaacgtgcttttgcccctcgggctcctcgggttcctggccttgcccgtcactttggcccgctcctcgttgggttacctgcccccggcgtcccggggctgggcggtggggtgaggggaagcgctctctgggcagccccccgggaagtgcgaggccgggagtcttcctcagcttgtctcttccggggagcgccactgggtccccagttcagagggctctgggatggtctcccagtttctcccgggccgggggatggaggggtactagggccgcatccgagtgtgcgttggtgggtgtgtggtcggagccgacgtgcattccgacacacgtgctcgcagcgcggggtgtagtcgccgcctcacggggacacctagacgcccgtccctggcgagaggtgtcgtacgctgtggtttcagcgccagggtctgcggcggcgcggggagggtgttgtgttttgcgagcgcggagccctggccttggttttgttgtggtcggcgtcgtgtcgccctctcttctgccgccccgcacttcctttgtacgtagttaataagcagtgtcgctccacattcgctgtcttttgcaatctgatagcttttgttttggtggtgtcgggtgggggttagtagggaagcgcggggatgcggggagcgagaactccccccggtgtctacggccggaggaggtgggggttttattcttctgaaaaagttgaaagtgtggcttactggtacattcaagatggtagggtaatttgaacacgattaaaagtttaaatgtcgcagaactgggactgggaacggtgagggcgtgttggtgagtaatggttgccgagggtatgcaggtggtgccgattaactttgaaaaaatcacgactgagccttcacgagtgaggcggggaaggaggaggcagcggaggttgtatggccccatcaccggggcaattcagaaaggctgtttctataaacaaatccttaaacgtctggtaagaaatgagtccgcgacggaacgagagcagatcgtggttcgcgtgtttactgccgagtgggacgcggactggggccggaccttccacagatctgggctctcctgctctttgttttctaaactttcagcggactcgattgggcgaaagccttccggctccctttactaagtcgtttaggtggtggctggggggacaaaggagggtttttatctttaaaagataagtacggtttagaagacacgggagaaataatccattttgttatgttatgcagttgaactgtatagcttctctagttttgtgtttttaatgttctgaaattcaaaacagcagggatggccttcgccgacgcaggagtcgggcattttaaaataggctgtttttcttttggagcgttcttcttgaaggatattgtttgtgcaagacggcgatttttgagaacacaggcaggagggagggggtgttttaatgtatgtttttactccatgataccaaagcttccccccaggatccctttacagtggttagttcctggaaacctgatgggtggtcagaaggcaccccaaatctcgattatggtttgctgaagtcttgactgactcagtacctgcccctccctccatctctgaaatgtggagaattaaaagctatgcctgtgaacgggcgttcagtttttagccgggaaggtgctagaccacttaactctgatagaaataagctgctgagccctatcagggagggcgttctttcagctgttgtctggtggagaaataaagacagggtgttggttcagttgcaggtattttgctggcgtattgagagattagagtttcctctttgagtgtgatggcagtagaaagagtgttgtttatcttagaaaacttagtttctgaagcagaggcagtcatatggatgtgtttgttttgtatcaccataatgtgaacagagcatctaaatgaaggcggttcggaggttctgagtgatagccagataatctgagggctattttgtttttaaaaagtcagcatgcactttaaatttattgtacccatctccttaaaaggattcagtcatctttctaccccaggcatcctgttgtcacagaaatgtaggtatgtgaaatgttggtgtttaaagaagttagtgttttattaccagaaggagaacccagaaaaagaacttctgaaagaacctaaacagcaaattatagtttagatcctctggagagacatagcaagcaaatggtgttttgtggaagggtggggtttgtgtcaggatttgaaatgtaaaaggtcataatgtttgatttgtcgaaaaagattagaaaagttcaactctaagaaatatgctaaggttgaatagatgaagcttaaaaatatcacaaaaagtgaaagaagtcagtcacaaaagaccacatatcgtatgatccggtttatgtgaaatgtctagaataaacaaatccatagaggcagaaggtagatgagtggttgccaggggctgggggcggatggaatggggagtgactgctagtgggcacagggtttctttttggggtgatgaaaattgttctaaaattagtttgtggcgatggctgcatagctctaaatatacttaaaaccattggattatatactttaaatcggggactttaatggtatgtgaattatatctcaataaaccctttttttttttttttaaagaaatgtgatcaggttgaaaataacttgttatgctaccttaaattacgttaaaattattacatatatttgacaggctgatgtctctctctcttttcatttatgagtttttcagatccgtgagttgcagcaatacaacaaactgataattgaagcttagcaacagggattcaatcccgcagtagaaatgggcaagcaggagaaaaagaatcttggttctatgtagcttcagttagggattgaggagctggatttaaaaaacacaaatgctggtggagggcagatttttgacaatagaaacctcagctgaatctgaaatgatggtttttttcaggatagagtttaggagctgagtctgaagggctgtttgtatttccagttttattatgttttccaacaaagaaagacattgctgttttaagatgttttaaacactcattttttgatatgccacattgaccacaagtggtagtaaggactgaggatgaacagaacagttcattttaatgcagtattgttgtttcttttctttgcagttttattttatttcttacatagttccagggtctgagcaggagaaagaatctttaggatgcagtagttttaggatacactgtttcaagtatacagtgatttttataaaattaaaattccttacagaacgaaaggttttaaaatgtggcaaaggcatttttgttttgaaactgtgtgcatttatccagatttaccctggcctttcaataggaaaagacctagagaataattgttgtttacatttgcttttggtctttgtctaaggcttagtttactaataaaaatgtttcctgcccttcctattgttgcaagatcagggcagtaatgaaaatcaactgtatcattttcacttgttgccttagagtttttgccaagaggaaccctcaagggacggtggtttccttttaaatctggtttcatttgttttgtaagaatgtgctgtaagaagcaactgaatccagcctgcacttattgtgcacctactgtatgaaagctgaccttgtgctactcagtgcatgaacctgcagagtcttgcatgaaaccacctttcttgaaattcagattttttttcagactcagtatagggtgcagttttcaagtagacagtagttagcattttaaaggttcttttaaaaatatttctgtagacttaggactctagtgttgttcatcagaagcctttaccctataccttttttgcctcattggtgctttccgttatattgggatgtcactgtagactgtgacatacaggtgatgttaacccatcttgactggcggcactgtcttctttataacattggatatggcaattgtgatttacaaactgcagtgttgtagttgcctttttccaaaaattaggagtcacaggtgtgtacatgaacgttgcatagcatgttttgagttgtaagaaagatggaacttatttcagaagttttctggattacatattgcttagttagctttctagaaatcaggaagcattcataatttcagggcattttataatttgtaaataacttggtgtttttaaaagcgtgagggagtaagagtgaggagacaaatcctgaaagtttttgttttttaattgtaaagcatacaagatacatttctttataggttgtgattttccccaatttgttttcaaaactcatttaaaaatcagacctagttcatggaagaggtatttgcgcctgtgggcgaacttgatttgaactgcttttcttagccagcttaggacaggtgctgagtccaggggatgagctcttctcaattgtactaaatatataatagttgcacacatgttacggatatagtttcttgatttccagtctgagatgttctgaaggaaaattctgaacactttagagacaacaaagtgcctaatgagtgatgcactctgatccctcctggaaaatggtgtttggcatcagcttagcaagaggaggttttccagttatttgtaaagatgtgatgtggctttaagtggggatgggggagggtagcagccccagtgtttgtggacattgagacctgttgacatttgggaagcataactgagttccactatttgaaaagattaaaactttgatatatgtacacatcccctcatgcctgcacccccatccccgagggtctggaaaagaattgatttgttctgaggaaggaacatatatttggaatataaaatggttagtaaacaaaggatctttaaaacaagttagattgttatctcaagagaagcatacttcctcggcatgatgttttcttttgttaaattgctttggttttatttgactcaaagtattaacaatacctttgattttgagacttttggacttttgaagactaagtttttaaatggtcaattttactcgtttgaaagtcccagataccatttttgaagatttctctccctttttttccactgatgccggctttacttatgttttattttcaaatcttaaggaaaaactgatatttccttacttgaactgagaaatagtcgttttccctccctcttttcttccacagtaaatacatgttgagtacttactggatgcagttctttaggtttagaaattatttgatactgtaaaatgtcttaccataagtttttaaagatacccgtcaaactatagatgttactgccatgtttattaaaaaaaaaaataaaacgaaacaaactagtaagcaagcttaaaatttttctttttcctgccctggactacagatttttttttcttttttttttttgagacagggtctctggtcacctaggctggaatgcagtggtgtgatcacggcttgattctgccttgacctcccaggctccagtgatcctcccaagtaggtgggactacaggcacacaccaccatgcctggctaattttttgtatttttagtacagacgaggttttgctatgttgctcaggttggactcaagcgatccactcacctcggcctcccggagggctgggatcacaggtgcgagccaccacccccagcctacaagaatttgtaaactcatagattgctcttctgttttcactggaccacaacagaaagtagtttcttttatggtgagggatgaacacctacgattgcaatataagttgttgggccttgtgtccatggagctcacttggtggttggtggtcttgaagcattcacattctttggagtagtggggcggctggctagtcacatggggaagatgtgcacacctgtggatggggccatcacacactgcagcgatagctgggcctaccttactgctcacctggctgggcacagcggctcctgcctgtaaccccagcactttgggaggccaaggtgggcagatcacttgaggtcagaagttcaagaccagcctggccaacatggtgcaccccctttctactaaaaataccagaattaaccgggcgtggtggcccgtgcctataatcccagctacgtgagaggctgaggcaggagaattgctgaaacccaggaggcagaggttgcagtgagccaagatgatgccactgcactccagcctgggtgacagagcgagactccatcacacacacaaaatacatatataaaaataaattgctcacctggtaatagtctggaaaacattttttttttgtttttttgcatattttaaagactttagaaagtagtcttgctaatccagaaagttcttgcggggaggagtttgaaactttgttttatctcactcctcagtcttagcccccttaataccataggtctctacttcagtaagagttacataatacgaatgccgtttgttcagaattgtgtatctccatccatccgtccatcgtccaaattctgcaagtttgaaatacattgttgttgctgttttgtatacttttgttcaaccattttctttttaacatggcactagctttctcaaactggctttggaattatttgtcagtttaaaaataaataccactttaaaaattactcttgacatgggagaacaaatatattttgatagttgttagagcataaatattttatagagcataacttgaaatttttcctgatacattgtgattgctttcagcttgtcctctgctgtaaaaaatatagtcgtggttagtctctgtaaagttggttattgggaatatgtgcttgattacgtaaatgagacatcaccaatttaagtcagccaaagtttagtcaatagaactttaaagaacagaagtctaatggtaattagggagagatgaatttatttgtaggagttttccccaaattcaaagcgtcttagtgacctttgataacttcctggaaaaagtaggaagcatggagagaaattccaggtaggagcccatgatccaattgactgcatcagcttacaaagtgttttctaagtcattagctattaattctgtctagattgtaaaatccctctcagttgtgtccacatttatctgtgttgtcctgtatttattctctttacctaatttccctgagtctcattttagtgggataatacacaagcttacagactcaggactttaaagagaagcacagattgccacgaaaacaaatgaacacagagaccagtagcagcagagggagatctgctgtgaggcttcccttagttctgttgtctgatttctgtggataatgagttcactgcatatgttaggtcacaacatgatatcgtgtagtcgtaggtacagaacttttgttatggtagcctttcttcgtcaggtgatacaattgggattttctttctcacatgcacctcagtaaaattttcagcaacagagattggctcaggatggaatttgttcagtttcagttctgcagcctgtccttttctggggagactcattaattgaatgttgcctttcgatctcactgagtcacttgaaatcgctcagattgacccctattccgggatccagcctggtccagtgcagacctgcattgactctgactacatgctgagttggcctctgaaccagttcctgtaccattcccttagtctgatggacttgccagctccaaatactcagaacgtgcctcttgtggtcctaggatcaagtccagggtccttagaatcaagtaatgaaacaggtccttagtaatcctgtgctgtagggatccactgttagttcctggtactccccagcatctgtgcattagcttgatggaaaggaagctgtgttatgcctgtcttcaagtttttgcttctgctgtttccatagctgagaatgtttttcctcttcactactctgctacttctccttccatcctcaatactgaatagcagaaagtgccgcttaagaacacaggaaggtcaccatagctttagtttctccttagctgccaattagttctttggtcctaaagttattaacttttctgagtcttgatagaaatgcggagacttaaaaatatttgggggagacatttctccttttctcactaaacaacagaatgaaaaccttttctaacaggtttagaaaaccaaagtcagaaaaattgtgaggaaatagaataggttttttaaattgaaataatttccaagttccaggtggatctgtaaaatagggacaagatcataactttcaaaaggcagcacgctaagtcaggtgattcctttcccccatatgccttttctgtggtttgaataggtcagagatgccatctttacatttccaagtcaaattcctcttccttcttgaaggtttttgggatttccctaacttgtatagatctactttcccattactccttttgagttcataacccacggttttgctggttgacagtgatttgtcttgttccttgcttgtaattttattaggaccatggagccaaagtggctggtttgaatctcagctcttcagtagctaagctctcaggcaaataatttaatcttcttgtgcctcagtttcctcatctgtgaaattataattttaatagaatctactttaaacattcatagaaatcaaattcgtacacatgtcaagtgcctagaatagaacctggcacctggtattaagcccttggacttcaactgctactgttcttagggttgtgacatcctcgaacagagatgttctttggatagaaatataaggcttacttgatgtttgattgtccttgccatttaaatatgttatagaacctggcacataggtgctcaataaatgtataataaaactttattttgctaaggtgtttattaacaagatggcatgttgcttattaaacagttgtgattttttttttcagtaaacgatggtcatccccctgcagtttgccttccatttcagagatctgtttattacactttctcccttaatattgtcatttgtcaatttctgctcacacctgagaggtgtccagtgtgcactttgcccatctcgcctatgcataggctccatctagtggccagaagggaaattcagcatattaggtgactgaattaatagtgccccaaggaggaagatagcgatcccaacccactctctggcttgcttcctggggactgattgcaagaaaatgtggatactacagacttctgtagaaatcactgggctacagttttggattaaggttactctactgtgtcagtgcgagctgtcctgagagaattagggtcttcctaagtgatgcagacaggcgcactgcaactccatggcagagctgttaacacctagtgtgtcttttacagttagagttttaagataattttacaggactttaataaatttaaagctccaaaatatttgagattagagattaaaaaaacactactgatttcatttggaaaaatacagcaagatttaccttccattgctctatttaaacaggtagtaacactttcattctcttctctctcccctttggctattctatgtggttaagatgctcgccagccagaaatactcacagagaataagaataaatacatccagtgttgtgttaggtcccacaccgtctatatttcgctagctaattttatgtattttgtttcatgttttattgatattttcagaatctttcttgctgagattacacaaaatatatagctggttattcagttttacgtgtcaaaagccttaaacctgtttccccatgattgccttttattatttttaattcggaaatctttgtttggctgtctgagagagaacttcagcctcccttcctcccagacattttgaacagttcaggctgtactcattcgtgtctctttgtcttggcaggtggaagcccctctgcttggaatagcaaacaatactaccagcttgccctctggcaagctcctttaagagttagctgtaatttcaccctctctctggccttgattctgcatgcagaatgattgcactgacttgagctcctgtggtctcttgctatacctcctatttgggcatctcccccatattgctttcccccaccattggggaggggaatggtaccttggttatctttgaattcccaggaggtggcccagtgcctggtgcataggaggagctgaagaaacggaagacttcttaaagggatactcgccattcactttgaagcacttctttgtacaacaaatttattttcatctgatcattgcacctctgctagccaaaacattttatcacaccagttactgctgcatggaacttgaaagcaataaaattatctttaaaatcattgtttgattaggctttttgcacattgaggtgaataaaaaaaattagaactcctggaagggtaatttgtgagtctggccttgtgtcaagatcacctcatccctgtggatggagactttgttccataagttccctatagataagatgtaatgaataattcattggcaccgatttatgtctgtagtgtgcttttaaaccctcctggagctgggttcctgaggaggaagcatctgcaggctggactcggctgcctggtggtctccggagtggcctggtgcagagggccagggtggcatctcagaaagttgggtgggtagggtacttgcacacctgctgaccttgagttacagggtggacctaggtcatttcacaggcccttccagccttcagatctcaagatactaggcagagagagagatggagatttgagggagatgtggttggaacaagcagaatcaccacgtatggaagttggcttctattttttgcattgttttcttggtgaggccagtaagcttttgcctcactcctgggagggacagtagcaaggtcttacaggtctctctatcattgaagcaccctctccaaccctgccggttttggttgctggtgaaggcctttgacagtgtcctggtagggcgacggtgaggccagctcccgacctctggacagaagaaagcttacttgtctaggttggtgtcaaggggactcctgaacttaatgaacaccttagaaattatccttaaagtctcctcttccgaggagtggggtggnnnnnnnnnnnnnnnnnnnnnnnnnnnnnnnnnnnnnnnnnnnnnnnnnnnnnnnnnnnnnnnnnnnnnnnnnnnnnnnnnnnnnnnnnnnnnnnnnnnnnnnnnnnnnnnnnnnnnnnnnnnnnnnnnnnnnnnnnnnnnnnnnnnnnnnnnnnnnnnnnnnnnnnnnnnnnnnnnnnnnnnnnnnnnnnnnnnnnnnnnnnnnnnnnnnnnnnnnnnnnnnnnnnnnnnnnnnnnnnnnnnnnnnnnnnnttcctcccaggttcaaacaattcttgtggatcagcttcccaagaagctgggattacaggcgtgtgccaccacgcctggctaattttttttttttctagtagagacggggtttaggcatgttggtcaggctggtctcaaactcctggcctcaagcaatccaccgacctcggcctcccatagtgctgggattacagatgtgagccactgtggctggccaaggagggtctttttttgcacatctacagtgaaaggtttgaacccggacgtctgagtctcaggtcagttgttgaaaccactaagtaaccaccttgcttctctgtgcctgaagagaatgggtttttaggttaaccaggctgactggttcaaggtcatgtccctatctgtggaaggggagtgggagtggaaggtgagtggtgacagagtatggaaccctgtttctgatatctagattatttgagggcctccagtggtctctgctccatggaaagcatatgaaagaatatgattttttttttttactcgagcttgttgtctagttgggaaaactcaactactggtggagagtaacagatgctatgagtttagtgctaagttatgggatgctgaccggagagaagtatgtgggctgcaggcagtggggtcacggaactgcagaatggcttgagaagctttaaggaggatgtctgactttagtgtgccctaaatatttgactctcaagatccaaggaggcagctccccaggagaggaagggaccatgtgtggtgtgggtggcagtgtgcactgatggagtggagagggtgtcagaatccggtgtttgtgtggtgggaaggaattgactgctggctagagaatgaggagcgctgaaacctttgcaccattgcagtggacccgctgagaagggtgttctggggaggctgctctggtctctcgatggagtcaggattgggggacagatagacaccccggtgtgagccagtgatggtatagatgagggaggcagtgaggacaggctcagggagggaagtcttgtctctagacctgagaccaggaagcaggaatggactggacaggttggcccagctgagggaggtgactggtgagatgggtcctcggtgtgaggggctgggttgccagaggagctgtgggctggggtggtttgtcgagagagcagtcccagttgatggagaggcaggacccgcaaaacaggttggctgcaggactgggggcggtagcacagggcagctcccgaggagacacctggcacttttaaggcatggaatggagagagctaggggagagcacacctgcagtgaggcaattcacatagcaaagttctccggaaactgcagtgttcaacttttttaaagaatagctggatgttagaaaagtggaggaactgtcacctttattaggggcatcatggatacctggtagcatcaagggctagggttaaaacccgtggagtaatacgccctcctattgtgttcctctcctctaaaaatgaaggtgaaactgtttcaggtgagcgctgttgttgttcgtttgctggggcactgctttctgatttttagaggagtccaggctggagactgacccctgcctttttctgagttgggccggctgggcccgaggctggttctgggctgggccaggctgatgcagtggccttgggcttcccgaggctgggagagggcggtggcccccgctaccctgaagagctggccaacgcggcagggctctttccagtccttaccatgcaagtgaagaggaacagtttgtttaaagaggggtgccagcttcacatccaggcctggactttgctactggtgcttttgaacttgtgttgatttatgtttgtaaattgactggacacattgtggttcttgatgagaagcaattgcccatccttagcccacgattagtgccactctctgggtgctgcctgttctgccactgtaactgttttcacttgacaaataacattaaaaaacacagttctgcaagagacttcctgggagggtggtatcatttggcctgtgggcttttgtaacactttcctgctattaggagagtgaattctgaattttcaatcacgttcacctgttggagcaagtagagtttcagacggtctccgcttttctcgactagaaagcaggccttctcccttttccccccagtcttgtttcatgacaccattcccctctgagatgagggttggagaattagaagtctactgatgcattgtaccggggcacgttattgaccctctctgctctcctttcctcatctgtaaaatggaagataatgccacccatcaggccgagtgcggtggctcatgcctgtaatcccagcactttgggaggccgaggtgagcggatcacctgaaatcaggagttcgagaccagcctggctaacatggtgaaaccctgtctctactaaaaatataaaaattagccaggcacagtggcatgcacctgtaatcccagctactcaggaggctgaggcaggagaatcacttgaacctgggaggtggaggttggaggttggaggttggaggttggaggttgcagtgagccaagatcgcgccactgcactccagcctgggcgagagtgagactccatgtcaaaaaaaaaaaaaaaaagtgtcacccatcttggaggatcgttaccaatacttcatgagtgaatacatacacatttcttagaacctagggtttataaacactaggagttagctgatactgttgttgctaaggatagaggaaatacgcattagaagttatttacttcctttaaaaaaaaaaataccctttgggtgtgtattgattctgatgttttgctcctagctacatttgccgtttttttttgactgcagaattaggaaccagcttcatttttttttttttttttggatggaatctcgctctgtcgtccaggctggagtgtggtggcgcaatcttggctcactgcaagctccacctcccgggttcacgccattctcctgcctcagcctccccagcagctgggactacaggcgtccgctgccacactaatttttgtatttttagtagagatggggtttcaccgtgttagccaggatggtcttgatctcctgaccttgtgatccgcccacctcggcctcccaaagtgctgggattaaaggcgtgagccaccgcgcccggcaggaacccagcttcatttcttgtaaagagagtttgacaagcgctccactggggatagcagcacagcttcctccttttctgtccctgtctccctcctgactctgcatctgcctccgtttgaagcatcctcctccagtaagtgggtcatttggattccaaggcccttttgaggccatggtgatggatcatttgcgttatcaatgtgaactgtggatgtcccttcgcccttcagtctcttccttcttcaaggagggggaggtaattgggggtcatgtggcctggggaagagcctggtcacgagcatgagggatgtgagtgggactatgtttccagccaaaatttagggcacaggatctgaaaaacacttagattaagtatctgcaacacaaattagggtattttaaattgaatgtggagaaccctgagaacctgtgccctttgtgcgtggatggctgcttgcaaggatgagcatccccagctggagcggcccatggctgccagaacaggagaaggcttcagtcaggtgggaagccagctgcagtgtgttgcctgatgcaggatggtgcgagaaggagctgctctcttgctctgctccctggatcgcacaaggtcttcctgagaccagaattcaaggttagtcctgtttaggcaacttggtagatggacttgaatggtctttgctaagcgaatattgcctatggtggtatttgcaaggaaaacaaaagtgttttgagcccagactaaccaatttaacaatgctagtaggtaaggatactactgtttgctttctgtgatgagaggtctcttaggaggaggggttaattcttttgatttaaaacttactacttgaggcaaataggcacatgaaaagatgttgaaagtcactagtcattggtgaaatgtaagtcagacccacaattggtacttcatactcattagtatggctattaccaaaaacaccagatgatagcaagcataggccaggatgtggagatgttggaacccttgtgccttactggtgagactgttaaaatggcacagccttttttttttttaacaggaagatgatatggtgcttcctcaataaattcatcatagaattgccatatgatccagcaattccactttggggtatatgcccaaaaagaagtgaaagcaggggctcgaacagatatttgtacacccatgttcatggcagcaaataattcaaaatagccaaaaagtgaaagcaactcaagggtccatccatagacgggtggataaacaaaatgtggtctatccatacaatggaatatcattgagccttaaaaaggaaggaaattctatgatgtgctacaatgtctgtgaaccttgaagacactctgcgaagtgaaagaagccagtcatgaaaggacaaacagtgcataattgttacccttacgtgagctatgtagagtagtcacattcatagagacggaaagtagaatggtgaggggcggtgaatagaggctggggggagggagcaatgaggaattggtgtttaatgggtacagagtttcagtttgggaacatgtaaaagttctagaggtggatggttacggtggttgagcaacattgtgaatcagtgtcagtgaactatacacttaacaagggttaaaatgttaaattctttgttgtgtatattttaccacaattttaaaaagcttatttctcaattgtttatgcgagtatatgtgtggaatagttggggagacaaattcaaggagaccagtccttgtccatggcggtcctaggtaccacgggatcactgcgggggaactgtgaggtcaggagaggccttgaaaaaaaacgcaggtttgagctgagtcagatggaatgggtctgttttctatatcaagagacagtattgcagataatttttttctttcaaggaaagcaagtcaggagtcaaactctcatgccaccgtagtcacaaatgaaatttattgctaatcagccatgtgacgtgtaattgctttttcattttcttatttttccagaagagagatttgtttagatgtttgattccctcactgattatgattatactggaagtttttcatttgttttgacagctcaattttttttttattgtaaatggactccctcattacagaggggggagcccttgaaagaaagggattgacctctgcaggcaagaatctgagcatcctaaaagtagaaaagggctagaggcttcgccttacaggccaggaagcttggagggacgcgctgctagagaccatggcacgcatgctgtgtgtcgaaggccaggtccgcctgtctgcctctccagcagatactctctggggctatttttttctgcttggttgtcatcttttggtttaaccaggcgccagggctcaggcctggacctgctggattccaaagaagacttcgaggtggccgagcttgtctggcttccagaggagctttctctgtcccgcccgggggagtggctcaccttggtctgagaccaatgggaggaagcctgctgcgggcaactggtctgtgcctggaagttggacttgcattttctctggacctccaaagcaaacccgaatgaccactctcatcctccccttttgcttgtttgtgtatgtgcttgttttgcctggtcgtcaggcaggaggtggtgtcagatgatgagaggtgttgctcgtccctgggttggttctcttacggggctgtatggatgtcttagctcagactgctgtgacaggttactatagactgagggctaaaaccacagacttatgtttctcacagttctggaggctggaagtctgagatcaaggtgccgaccaaatttggtttctgttaagggtccatttcttggcttgcagatgacaaatgtcatgtgtcctcacagggtggagagagcaaggggctctggtctcttcctctttatgtaagggcattgttgccattatgggggctctaccctcaggacctcatctaaacctgattacctccctaaggccccaccttcagataccactgaaggtatctgggggttggggcttcagtatatgaattggaggggacacagtcatgcagttcagaacagtggagcagtgtgccatagtgaagggatctccagaccaggattctctatggaagttcttggccaggtctgagagttggttacagatcattaaaatttacatggaatccagtacttgaaagtacatgtcttcaggatggcgctgagcacattcgcctctgtaaccaaatgcctgaaatgtgtagtgcaccttctgagcaccccagtgctttccttaaagtgaatgcagtttgagaggaactcaattattgagaaattttatatgaccccatttctctcattttaggacagataagttgcttattttaaactctgcaggagctacatagaggaagttatactccaggagagcttaaatttcactctctgaaaactctgttccatgtaagtacattcctcctctctcccctcctcagtgagcacgtacccatcagatgtgtggaattctattaaaagcagctcctcgtgaccctccagggttttgtaaagctgacaccagcatcagtgagttggaaggggctgccacagaagacagacttactgctgcagcccgcttcagagccctcagtagtactttttcctctcccagcaaatccaggaggctgggaaggtgattgttaattgtttatgagcattaactgtttaccagtcatacttactattttaaatctgaccctgccattatgttgttttgtttctgttcacagctgagctttaagctgggtagaatttcgtgatgagtcactcctatgactgtaaaatcagtatcgatcaagccttcctgttcatcctgtgagcagtttagagacagatgagacaggcttatggtttccactggctcggctccgtgcgtgtgcggattgggcttcctgagagcctggttagccccttttatctgctctctgaaacctgcgcaagggtttttagcatgcaccttgaaacctctgctgcctgaagacagtgtgcttaaatgaagggtatacaaacccatgtgaggttttctcttcccttttccatgaactccaccccaattacctgtttgaattttgcatgccagttattttcagggaactagtgacccttttcttgccaccctgggctttgaattgaaggccagtgtgccaccttttctttggctttgttagaacgttgccctcagggtcatatgtgctggctgctatgaattcttactgcttgatggacagagaaaggtgagggttagatatctggacagggcatgacagggcgggtcatcgagtaggaacattgggaccttttgcttccaggcttgagcagtgggtgagaaacactgtcttcccattagggcagtgggtgaaacactgacttccctccatcctctgggcagccttgtcaggtgggtgtggaagctgaggtgtgtctgccccaggctgtgcagtcagccccgtgttctagcttcccgtgccgaacctggccctggaggctgtctgcctggcaagggggctgcacaaagctcggaggggcatttctggtgcttggtagatggtaggcctgcccccagtgcactgataagagcatgggctgagagtgccacttggattcggctacagtgggcggcagagtgggggtgactggtgttgcttttactctagagcagaggaggcagatgaggtagatcggggccccagggatgctgagctgagctgggtagagagaatttggttttgtaggatttggagacagagacaaatttggagtgtttggatgttcggggacctgcaggaggtatgtgaggtgtgtaaaatgcagcccctgttttataaagagcttacattgtctcttgagaagataaggtgtgcccagctgtggaatggaaccagatgcttttatgagtgaggatggagtgagcacactgggaaagagccctggaattggaggaagagatcattttgcccagagggatcttggaggtctcctggaggagggtacttagatgatcagaaggattatactagacttgatggggtggtcttggcatcagaactttaaaaatgtattttggggctggaagcaaggctggagaggaaggtttgtttaagttgtagtgggggatgaggctgggggcaaatcagggatggttttccaggtctgtaaaggctggggtaagaggaatggttggttcttaagagcaaaaaaaatcccttacatattggttctcttatttgtgctaagttaaatacatgggaggctactggtgtttatgaaataaccctgagcctttttggggaggtagtagtggatgtctgatggaagagatagaagactggtcccaggggttcttagtggcaccttcctctcaggtcatcactgtgcttttgcacattgcagttatatttgactacatttgattatggcagatttacttagaagggcactggaaaaaagcctcccaaattacaactgacacaggaaatgactttattttcttctattttttttctttgcttttctcccccaatcaacatacatttttaaacctgtcatctcacatgacctgccggtagaattgatatgtttaatttctgtagaaaataactggaaatatttcacaagctccagtagcttcctgttgtagggacccttaggactttggaatgagaagttttctattgagttgtcatatttggaaggataaaggtgccctcttttccctcgatccacatagtagactcctgtgtgcgggcatttgtttggtgtctcacgttgatgcaaatgcagccattgcagagtgagccccgctctgttactggatctccatttgctcaaaagagagcagtgtccccctccaaatctgcatgtctgaaagcattcatgcaggttcattgcatgggtctttgcattttacttagacttagcaaaaatcaggtatagtctttcctgaaaacaaaagtgaccattgtttttaatcaactgcagggtgtttggagttgtgaaatatttagggtcccgagtccattccagattcaacattgggaaagaatgagaaagctgaagcctggggcaggctctgtctgcagaaaccatgggctatcaccccctctccttagcagcattgtaaacaaacgtcatttgtaaggagcatgtcccaactgagcttgtaattataggggcaagatttgtgtggtggtaggggcatggagctggagactgggggcttccttattggttcatttatcctggcccttctcttttctctcaagtctcagctcttttaagattcagaaaataatgcaaaatgcctaagatttctgaaattcctggcttcagagacttgactacataaaagagccaggattttcaggctggccatttcaggatcagccatttcccacttcctgattcatagcttccaggatttgtaatgcctgtagacttttttctctcttgcttaaaagtggccattgaaagaaaaaataaatagcaaaatccccatcccagaagttctacttcctgttgttgtactattgagctctgaaaaacagctttgtaagtttaagctcttgtttggactatttcagtggaattcttgagatctttttgtttggacaggcaagtatgaaggcgataagtcgaaagaactacagcttactcagcacagaaatgcagaggctcaaatttaagttcttccttagctttatggtgtgtatattaatataatccaagcaatagtgagttgcttagccagggtgcacagacattttccacaatgccagttgtttccctcataatgtttaatgtttatttttaaaggacatatttgggcacacgtttcatttttgcctgtaaaagaattgggaatatttatgattcttgcaacaaaggagaaggatccaaagtaaccaagaaaatgatggactggcagccttcacattttcccacaactcttttcatgaaataaaatgtagataaggctgggtgccatggctcacgcctgtaatcccagcactttgggaggccgaggcgggcggatcacctgtggtcgggagtttgagaccagcctggcgagcacggcaaaaccccgtctctacgaaaaatacaatacaaaaattagccgcgtgtggtggtgtgcgcctgtagtcccagctactcgggaggctgaggtgggagaatcacttgaacctgggaggcagaggttgcagcgagacaagatggcgccattgcactccagcctgagtgacagagcaagactccatctcaaaaaaaaaaaaaaaaaaaaagtgtaggttagcaaaagtgcctacagttcaaatgcttccatgctaaacgttgtatttcttccggtctcatttgtgatgagagtcataagattttgagaaatacaaaaacctttccagctttataggatgataatggcttggccactcaagtagttctgattgggttaactaattttggtccagtaatcatttcatttggggtgaatggatttttcccccctaaatacgggtacctggaaagttgaagcagtgaatctggtgaaacttaatcagtgatttcgtaagggttaacaaatgtttctgggtgggattcctaatgtccagcttcctctgtgtagctcagtaagtcttctttggagacactagcctgcattgtaagactgtcacatgggagcatctttttattttattttacttttttttaaaaaaatgaggtctttattatcctggctggagtgcagtggtgtgatcatggctcactgtagccttgaactcctgggctcaagtgatcctcttgcctcaacctcccaagtagttgggctgatagacatgagctactgtgccacgtagcattcttggggattattgtagggtccttttggaccacacatggttttatactctgtagctgattgatgtactggcatgtcagtgacattgtgtgtatcattacactatttggttaattgatgtactggtggaatagccatcttctggaggctcttgtttgcatacttctcttagtggcggactagcggttgtacagtaaatagatgatcattctcgctctgttttacctttcctcagctgctcttctagtaggaaaataacagccctcttagctgtagtcttctggaggctctctcaataatagaagtggaaagaaaagactcaaatccctgggcagtgactttttagttgtttcatttgcttttaaggcagaaacacctttaactcttagtagccttacagatcatttttgaaaacacctgtgcttgccttgaatggggcggtgaccactggatccccccatgctgggtacatgttttgcagtcacagacactgctggcctcacctttggtggtgaaggaatgtttccaatttctgctgatggtgtagtgctcttgggagctgggtgctctgaatgagcagatgggcatctgcttttttaagcctgctgttcattctgcaaaatagttattgtgcaaatacctgataagcaccaggtctgtgccaggcgctgtattttgtattttgcatgtctgaggccagcatctttttccctgttcctttttctcctcatccagtgaactttccactgtggttgtagtttgtctgaaaaagatttggaaaaaatgtacagccatgtttctcttgtctagagaagctgtcttaaggacttcgacaagtttcattggcagagtgaatgagtggtggcctctgaatagttgaaatgttaatgctatctataggttctagagaatctgtgtctttaaaagtcatagcgataaagtctcagctttttgagagagtgggtttcagacatactactatacaggaaatctgattgttgcattgaaacaggatttgttatcacatcacggttagacatacccaaaaggcaaaaactacagtggtcatgattgctttacataagattttggaggagaaactgttagctccatgaaagcaggaactgtgttcactcttgaatgcctgctacctgcacatggtgaatgttctataaatgtatattaaagaaatggaggtccttagagttccaagatcaccgtcaatatcatcaccctaggcttcctcgtccttccagttacttcttttccagaagagtccattgcctcctttatatgaggtctacagagcgcgttcagagggctcttatcattgattcagcaatcacgtgtacacatagcactagaatgacttcacatatttgacctgtttaaaaataacgtgcagctatgacgaacagcgaacctttgattagggacacatttgcctgccgccagacactacaagtattatgtgtattgcttttttcaaattataatagtaatagatgattatgagaagaaaattagaaaataagttttctgtctctctataaaaggaaaataaaaattatccttaatctcaaggtaaccattgttaatattttgttgtgttttcctgagattttccccctagacttatatgtgtatctatatatttaaaaaaatgaaattagtagtatactatgtacacacatattgtgaatttctgcccataacattatatctttatcacctggaatgaggtctttaatgaaattattaaaattaaaattattctataaatgctaaatttaggtattttacaatttttttttttttttttttttttttgagacaaagtcttgctctgttgcccaggctggagtggactgcagtggtgcaatctcagctcacttcaacctctgcctcccaggttaaagcaattattctgcctcagcctcccgagtatttgggactacaagtgcatgccaccatgcctggcaaatttttgtatttttagtagaaacggggtttcaccatgttggccaggctggtctcaaactcctgacctcaaatgatctgcccaccttggtctcccagagtgctgggattacaggtgtgagccactgtgcctggcccattttataattttgatcattaaaaaatgatgtgataaaattattgtgtattgttgttgatacactactctgattaattctttgggctagattcctaaaagtggaaagtaaggaataagaattgtgtaagtgtgcatgatcctagataaatattgccaaaatattttgcagaaaattcttagtttcagcttccagaagcagtgtctgtcatccatactccaccagaattgaacactaaattgagctttgcaattttagcatttaaaaagttgtatcatttaatatagaatagcagtctcttcattatgatcttcccttgcctagtaagtttatactcaagtcaaaatcggttaatcatgcatattgattccttgtttatctttttcttttaattctttaatacttctagaatgtatttgtagttaagtgaagtaagatacctcctcctgttgacgatttagtttccccacattgtgctgttttttttcttcactggattatgtaacaatatcttttcttttttttctttctttctttttttttttttttttttgagagagtctcgctctgttgctcaggctggagtgcagaggtgtgatctctgttcaaagcagcctccccctccccagtccaagtgattctactgcctcagcctcttaagtagctgggattacaggcgtgcgccaccacgcctggctatttttttattgtatttttagtagagatggggtttccacatgttggcctggctggtgttgaactcccggcctcaggtgatccgcccacctcaccttcccaaagtgttgggattacagacgtgagccactgcgcccagcctagagactctattttattagtgttttttgtagacaaagtctcactctgttgcccaagctggagtgcagtggcgccatctcggctccctgcaacctccacctcccgggttcaagcaattctgcctcaacctctcgagtagctgggactacaggcatgtgccaccatgcccggctaatttttgtatttttagtagaaatggggtttcactatgttggccaggctggtcttgaaatcctgactttgcgatccgcctgcctcgacctcccaaagtgctaggattacaggcgtgagccaccgctcctggccgagactctattttaaagctgtcttctcccactgatttgccttttgtttgtggtaaaatcattttgtcttaaacactgtagcttcattatacatgttaacatctgctaggaagaatctccactcaggttaaaaaaaaaaaaatttgaagcaccattatttcaggtgaactttgtgtgtgtgtatgttgttttgtttttgcaattcttctccgctactcttccaaaaaagaaaacacaaatttattaggttttgattgttaataaatcagtttgggagaaaacatttccagatatttgaattactcattcaaggacatttcgtgtttctccatttactcaactattatctatctatgaagaaatcacagaaggtcatagaggttgtatacttttccttttgggttatttctggttaatgaatgctttttgttgctaatgtagaaggaatctttattccccattgtttattttatatttttaaattttttttcaattaaaaaaaatttttttttcattcctgagacagggtctcgctccgttacccaggctggagtgcagtggtgcggtcatgactcactgcagccttcagctcctaggctcaagtaatcctccacctcagcctcctgagtagctgggactactggtatgcgccaccatgcctggctaagttttttctttttcttttagaggcaggatcttgctgtgttgcccaggctggtctcaaactcatgacctcaagtgatcctcccaccttcacctcccaaagtgctggcattgcaggcgtgagccaccatgcctgaccttccttgtttcttttaggtgattattggttgtgtgtgaggaaagctctggtattttctgtacttatcttgtacctacccaatttgttgattgctcttattcgttataatagtctttcagttgactcttcctaatttttttgtgccgagaatcattgatgacaaataaggataatttggtctccatttttctggtacataatacgtctttacttaccatcagttgtgtgtcacttaggaatataaatggctgaaaataactgaaagcctgcctaataagggagtaggccgacaggggctgacttttctcaagttcaggcagtctggagggaaggagtctgtggctgctgtgaggtgctcaaagagggtgtgaggactgggctcctggcttctgtttgttcatccttagcctgtggcttttgtcctcgtgaacacaagatgacctccaggaattatgtctgtttcaggcaggaagaagttgagaaggaatgaagacaaaaggcaaaaaaggcagaatgacaggtcagcaagcgctgctcagccagtaggccctgcttctccttggccagaactgagttgcatgcagctggctagaaggtgggagatgaatgtgggtatggctagtgggttgggcatgggggttgggccaaccaagcatggttggtcatagggtcttgctgcattagcctgcacatccagaattgttacatgttgattacaggcatatttgtccttttttgtctatattaatgataatgcctctgtttctcaatgtgtaaggcatcttttggtttaagaggttttcatcatgttgaagaattgcctgtcttgttttcttgggtgatttattaaggatgggtgttgaatgtcatcagatgtcattttggcattcatttggattcagaagtggttgttacacctattaattgaggtaggaatagattacctagtagtaatccctcctcaaattcccgtgttaaactatttttggttgcggtgggtggctgtttaaattcctaattaaatttggtttgctaacatattcagattttttaatctcttattttaaatgagatagctttacagttctctttagatgagttcttttccagattttgctgtcaggcctagactagttttgtaaaatgaattaatgacttttcctttttaccttctctgtaacagtttttatagtgtggcaataaactgtcctttgaaggtttggaacaactcacttgttaaatgcctggaggctgacacttaaaaaaaaaaaaaagaatagtttttgttgtgtttctttttgttgttggtgttgtttttagtcttcagtgcagtggcataatcttggcccacttcagccttgacctcccaggctcaagcagtcctcccacctcagcctccctggtagccgggaccacaggtgttttgccgccacacccggctaattttttattttttttgtagtttttgtagagatggggttttgccacgttgcgcaggctggtctagcattactgggctcaagtggtccacctgccttcgcctcccaaggtggtgggattaacaggtgtgagccaccatgcctggcgtaaaaagatggttagtttttgttttgtgacagctttaaaaaaggtcttccatgggtgttggtctgttccagggttctggttctttcctctgatgctcttttttttttttttttgaaacaggatctcgctcttgtcccagatggtgtacagtggtgtggtcatggctcactgtagccccagcccactgggctccagcaagcctcccacctcagcctctggagtagctgggacccatacctggctaatttttaaatgttttttagagacagagtctcgctatgttcccatgctggttttgaactcctgggatcaagcgaccctcctcccttggcctcccaaagtgttgggattacaggcatgagccaccatgctggccttctggttctttttaaatcaattttagtaatttagtaatttccagcaagtcaattaaaaattatagctcagttgtatgtagtattttctgtgtggtgttatgccctctgtatctgttttctcagatgttttagttgcttttctctcttaatcttgattagacctgccagagctgtgcttattttgtgtccccatccaaatccagaattaattgccgtgctccacatgttttggtcaatggtggacctcatctgtaacagtagtcccatgagattataatggggctgaaaacagtgctgtcccctagggatatcgtgtctgttgtagtgcaaggcactgctcacgtgtttgtgttgatgctggtgtaagcccactgtgcttccagtcagatgaaagtgcagcgcatacaattgtgtgcggtacctaatacttgataataaacaaccatgttactggtgtatgtatttactatgctgtacttttaattgttagagtgtactccttatacttattaaacacaaaattaattgtaaaatagcctcaggcaggtccttcaggaggtatccagaagaaggcattgtgatcataggagctgatggctccgcctgggttactgcccctgtagacttccagtgggacaggatatggaggtggaagacagtgacatggatgatccggaccctttgtaggtctaggctaacgtgtgtgtttgtgtcttagcttttaacaaaaaagtttaaaaagttaaaaaaaaaagttaaaaatagaaaaaagcttatagaataagaatataaagaaaatatatacaagaaccaaaatttaagaaaaataaagtttgtaaaagtaaaaaaagttgtgcttaagctaagtttaatttattattgaagaaagaaatttttaaataaatttagtgaggcctaggtatacagtatttataaagtctacagtagtgtacagtaatgtcctcagccttcacattcactcaccactcactgactcacccgagggagcaacttccagtcctgcaagctttattcgtggtggtactcccatatacgtatgtatacttttttttttttttgagacagagtctcgctctgtcgcccaggctggagtgcagtggtgcagtctcggctcactgcaacctccacctcccaagttcacgccattctcctgcctcagcctcccgagtagctgggactacaggcgcctgccaccacgcctggctaattttttgtatttttagtggagacagcgttgcaccgtgttagccaggatggtctcaatctcctgacctcgtgatccacccacctcggcctcccaaagtgctgggattacaggcgtgagccaccgcgcctggccttttgtttcgtttttaagagacagggtctagctctgtcacccaagctggagtgcagtggcgtgattatagctcattgcagccttgaactcctgggctcaactgattctgttgtgtcaccctccccaagtagctagaactacaggctcatgccaccacacttggctaatttttgttttttaattttttgtagaaatggaatctcactatgttgcctaggctggtcttgaactcttggtgtcaagcaagtgcttggcctctgaagtgctgagattataggtgtgagcctggccatatgtactttttttttttttttttatccttcttactatatttttattgtaccttttctatgtttaggtatgtttaaatacacacatacttaccatggtgttacaactgcctgcagtattcagtgcagtaatgcactacaggtttgcaggttggtagcctaggagtaataggctatactgtatagcctaggtgtgtagtaggctataccattgaggtgtaagtatactctgatcacacaatgatgaaatcacctaactgtgcatttcttagaatgcatccctgtcattaagtgatacgtaactctgcttctttaagcctctgtagcactttggttatgttaggattctgtgtctttacaagtctgctttgctgatcgattgtgacatcttgagggcggctgcactactttctgcctgcaccttgtttcgcatgtctacctggcgcatgacatacacctcgttgttcagttcttgcttctctgcttgtgtctttgcattcaccaccagctattctgatagttatcaggaggttttcattgattgcagtctcgtgcaatgggtgcaggtaatgggtagccttatggaggagaaaatgcttacctatttgggttcattccaaggagtagttcaaggataaacctctaagtttggggagtgctgtaatttgctggatatgtgagccatagaagacagcttggatggcatctgatgcttcctggctgcagggatggaggcagcagaccctcctgcctggggtggttggttgccatccctgtcgggggctcatgctccaccctcaaggctattcttgggggagttgtgacatggctttcataaaaactcagtggaattttaccctgtgtattagttagtaaaggtgagtctggttcagttggtttgagtcaaaaaatctgttaatatctctgctttagacctgcatcaggctaatacttgaatttagggtctgtccctggtgtcatctgaatttttgtttgctatgtgtgaccaaggagatggtcactcttcaggatgggtgggtggaggggagaaatgctatgatttctgttgggtcatgtgaaatcaatttggaatgtggatggggcccttacactttttcttttgagcttagtgattttctgtgtagggtggagagcgattaggaaggaattcaccacccttaggtcctcaggcatagggtcttctaggggcaggactgatgagtgaacagcagggtggatggagcagaaccgttggaaccttcagggcaggacctgccaccattatttggtcacaggaagtgttcagtggtgaacttgttggaaatgattttgagtaacttccgtctcctaaatcatattaggactctttggtctcctatggttatctgagttgttttccaggaggagctgggaaggtaccaggagaaagatgactgtccctctcatgtttgctgagggtgttcctgtaaggtgagctagtgttccttttagggcccgtggagaccgaccttcacattgaagaagcatatctgtgctccgagatgttttcatggggagaagtgtcaggtgtaattataaaaggagtctttctctttaaatactgtaggcgatttagaaatagtggaggtttaattgaagagcttgtctacgtttttacattttccttaggcacagagaaactagtatctttctctgggttgcctttttttttggagacagaatcttactctgtcatccaggctggagtgcagtggcctgatctcggctcactgcagcctctgccttccgagttccagcaattctcctgcctcagccttccaggtagctgggattacaggcacgtgccaccatgcctggctaatttttatatttttagtagagatggggtttcaccatgttggccaggctggtctggaactcctgattaggtgatccacccgcctctgcctcccaaagtgctaggattacaggcatgagccaccacacctggcctgggttgctttttaaattcatacctactgtcttatttgggtctcaaatgtgatcagtggttatacttttcttgctatgcatttaagttggagcaggctccggggcaccacttccctccctagagttgatgaacccctcatatcagtgacctccccatgtcacagtgtatctcgtgtgcactgctagatattctgatcacacagtgctgagattactggtttctctccctttctctttctgtggttatagggattctttaagggcaggcaacatgttctttgtttccataggatctgacaaagtgcatggcataggtaggtgttcatcaaaaggggtggaatagggttgatctcaagggttttaagagagatctgacgagtttgggtgtgtgacttaaaaagcagatacagcgccttttcacggatacacctccgtgattcctcaagtggtctggctgtgtttattttaggattctaaaagtaaagtgttctgttctgagtctttcacgatctgatgttctccagttctgtgaggtctcctcctttagtcccatcattggggctgtttctgctcggaaggccaggaagttgctggaagtctgctgggctttgcaaagggacttttgcttgtgtgggcattgcccagttgtgttacaacttgtttacagccgttggtttttaagggatgaggtaatcttagctcagcttagtgtaatacacaacagttttgtttattgagaaaatcattgttgaagtttttcagatgttagagatgttatgaattgcaatcaagtcggtatcctcttatataagtgcatctgacaagcccatttcacaactacatctcatcagtcacagttggatggcaaggtttattgtttaaagtttttgttttttcttttttaagttgggaaaggaagacagatggtttcagaagccaagaaagggcacaaaggcgtggatatttggaaatcgggacataattcaccattcttcttaattttttctgatctctaagacactgagacagctgttaattgaattgcttgttcacagtatttgagacgtaatgaaatgtgagtgtcctaatcacctggcgggcgtagatctttgggatcctcctggaggcttagtagggctgccctgagcagtattgtcttctccagctgggcctctgagctgtaccatgtgcccgtgctcagcctcagtccctccctcagccagttgttaaatcactttggacgtgtgacagcctcaacatgtcacagctttaaaagttcagattttaaaaaggtaaggaaatgatctcctagtgagacaacttctgcctaaaaaataaaagcttctaagacataaattctgtgttatgaacaacttgcaattttcatagttttcagttttagctctggcagcctctgatagatcttaaatatgtttatcacagctggaaaaatgttttattgtcatctttgtttatcataatatgccacctactctggttgtgtcttacaactgtagctctgtggggttttttttgtttgttttatgcttgctaatgggggaggtggggggtgggggcggatgaatataaatgatacctagaaattgaaattggaaaaaaaaatgtattcagccagtactctttccaggttatagctaaacgtcagttggcaacctctatgctgtggtttattgagtaacacttaatacttagcacagccctcagtgaagatcttttatggccttttctgaatgttatacaaacataactaaagcttatccagatgaggacagggacctttctttccttcctttttaaatggagcaaaatttggccactgggttgctgtggatgagagagtagaaggagaaaggcagtcatcgggagactgtgtgctgagagagcgcatgtgggatttggcttcaggaagtctgggcttgcattctatccagcgctaatatttagtgagtgtgatttggggcaaattatttcgtctccctgagcttcagaatgtttgaaactttgtgaggagtctgaccccacactgtaggctccctccatgtatatatttcttcttccttttcctttttttttttttttttttttaaatttttgagatagtgtctcgctctgtaaccccagttggaatgcagtggcatggtcatggcttactgcagcctcaacgtcccaggctcaagggatcctcctgcctcagcctcctgagtagctggggtcacagatgtgtgccatcacgcctggctaatttttaacattttttgtagagatgggagtctcactatgttgcccaggctgcactcaaactcctggactcaagcagtcctctccctccagcctcccaaagttctgggattacaggcatgagccaccatgcccggctggaactgttggctttgaagaagaatgatgctgtgcttgcctttgcagtcctgtcaccatacttcctggaaagtgggtggacacgctggatggtagatgttgagttctttagatgcctggatgcttacatgctttgtgtgggttcttactggggctgtaacttactagaggacagactccaacttctgcttacttagtctggggaggttaataataatctagggcacccgcttcccagtgggtttccatcagtctcctccagcccactctactctctgttagccagctgggcacctcttcctctgtgtcccttcggtatcttcccagtggctctttccacgactggctcagaccatgtgtatatctgctcattgtctgtccagggtccctccaaagatgcctctgtgggctgggcccctggtggtgcttcctccagataattgttgaagatggaacaggagtgtgcaagaacaccagcgtgcttccagtattcaggtctagcggcaggtcccaggcatcagcggctcaccactccaccgcaggtagcctgattgcccagccttggagccgcagcctccttgggtggtgtggcagctgtcagtgtctgaaaccattttgaactttaaagggtggtgtcagacagcagctattgaggctacttaaaagaatttttttaaatgtacgagttcagtggcattaagtacattcatattgttgtgcaaccatcaccactgtccatctccagaacttgttcatcttcccaaactgaaactccatgtccatcaaacaactccccattgcctttttccccaagtctttggcaaccgccattccactttctgtctgtaaatttgactgtctggatacctcatgtaagtggactcgtacactatttgtccttttgtgactggcccattttatgagcataatgtcctcaaggttcattcaggctgtagcatgtgtccagaatctccttcctttttaaggcccaataatatttaataatatatgtatgtgtgataacacatttatataatgtccattaccatgtggtatatatgcttatccatttgtctgtcgatggacacttgagttgctcccccgctttggctactgtgaataatatgactgtgatcatggatatgcaaatatttccttaagtctttcagttcttttgggtatatacccagaagtggaattgctggatcatatggcagttctatttttaattttttgaggaaccactgtactgttttccatgtagactgcataagaattccaatttttccacatcttgccaacgtttatttttatttatttctttaaattttttatagtagctatccattctaatggatgtgaggtggtatctcattatggttttgatgggacttttgagttttagcaaatatcaatgaagtatttaattttttttttttttcttagagacaggatctcacattgttgtccaggctagagtgcagtgatgtgagcatagttcactgcagcctcaacctcctaggctcatgtgatgctcccacctacgcttcctcaatagatgggactatgttcctgcgccatcactcctggtgaatttttaaatttttgtagagatgcggtcttggtacattttctaggctggtctggaagtcctggcctcaagcagttcttccacctgaacctcccaaagtgctgggattataggcgtgagccactgcacctggcttatttaaatttttatgggtatgaattcacttaaaagctgaaggttttgagaggagagggagcatatgaaaaaacctaaaggttttgggaggaggaggagaaggaagagagggagcatgtgaacaagagcaactgattacttccttgtcattcatttgcccagtgtttactaagcacctgctgtgtctcagacctgtgctggtttggcccttgtgaaggacagtaaatacagtgcagttccagctgcgcatgggatcacagtccagtaggtaaacgagtgcctaaacttaagagaaatgagtgcagttggggtcctgtggcggtgaaggggcgagtctgcacccaggcgagtgttaaaggcctggcctagagaagatgggtgttttgatggaaggagctgctgggaagcatgtgtactcggtgtcttggagtttagaaacctcagttggctccatgtctcgtccttagtaaaggaatatcgggagctgagactggatgtattgacacaggtcaaatcacagagtcttaggccatttcaaggaggttggatttttctctggaaggcacagggaggttttgaaggacttaatgcagaagaatgggcactgtcaggtttgtggtttggaaagtccgccttggtagtagggtggagggtgcattatggagggctagaccagggtccagcccccagcgagatgctgtgtggtaaccaggggagagagaggtggtggtgttagaagccacgacttggcatagaagccaaagcatccccaggttgtcattgtgtaattaatggttaagttggggcaagaaataaagctcttaaaagtgtccagctgtagagctctctgcctgtttttatcttcagatttttgtctttgccatctctggcctccagtggaaggccgaagttacttaacttccttgctggaagcagggctcctcatgattgccagcccctgtttggtagtggtcctggagtgctgtggaaatgggatacttggtgccacttaccttggggctttgctcctgaactgcagcggtgtcttgtgctctgtggtttgtagcatggaacagaggctgatgggcggggagtttgagtcccagtgattgaggccccctgcctgcctgcaccttactgaaggaaggacatggtggcttctcagtgtgctctctggtgatctgaacctagattcttgtttcacgggtagggggcagggttttggattcagccctggccagccctggcccaagttcatagtgtcagtagtatagttctcccaccacccccttctctcctgctcctgttttctcccccgccccttctctcctactctccttcctctcccactctccctcctctctctgcctttcacttccccccacactctctctcccccgctcccaactttctttctctcttcgactcaccacacaacacacacctgtgtgtgtgtgtgtgtgtgtgtgtgtgtgtgtgtgtgatggcactgttatttcatgtgtatacctttgcgtagcgttggcacatgtgggaatgctattataatgctttcgttgggggtctgtgctaaccactgctgagtgtgcttcatgttttctagacagcatgagaccagagctctccaccttgccattagctggtgggagaattttgagaaagtcacccaattgctcttaagtcctcatttttttttttaaatctgtaaaatggtatcacagatgcttatagctcaagactagttgatgagggtctgtgactcaaaaggccccatagatggggttcagagggcctttggaaatggcgtgcaagctctttgtaagtgtattttttttggagaaagggcccagctttttatcagacatcctgagagattcaggacctaaaaaataaaccttgattaatcttggaagcctctttttacgcagtacgctttgattcatcagtatatgcatgtggatgggttctcagatggcctgatgtttctcctccttcctctgtgtggtgggcgacgactttggctgcccagatgttaacatcagtaagcagaagctcagtcagtgttagcaaaattaaatcactctgcaaaaatcaatgttagtgaaattaaatcacttgatcttaaaagcagcatgaaatagcagtttttcatcttcattgtgctgttttcccactctagatatcttgcagattttttttggttgcttggttggttggtttttggcgtccttttcaaggacaagcagctttggacagttgcactacttttttttttttttttttttttttgacagagtcttgctctgtcacccaggctggggtgcagtggcgtgatctcagctcactgcaacctctgcctcccaggttcaagcagttctcctgcctcagcctcccaagtagctgggattacaggtgtctgccaccacactcggctaatttttatatttttagtagggacaaagtttcatcatgttattcaaattcctgacctcaagccatctgcctgccttggcctcccaaagtgctgggattacaggcgtgagtcactgtgctcagccagttgcactacattttttttttagatgccattgttgaggatccaggggtttgtcatagattgattaatcagaaagtattaatctaaagtattagaatatattgattgcaggcagggaccttgcatagtttaaagatgactcagaaggcacattaggttcttgccacactttgctgccatcacagatggatgtgagttgcccccttatataggtctctcgggatgccccagtggagaacagcattgatgttgaacagatcctgtccgatggagagataccagcgtttcagccagcggtgtgagtgagggcaggggccacctctgagggtgcttgctccctcacactgtcctcacgctgccctcaagctgtgggcaaaggagagggatcctgtgccatcacagccctagaagcagaattccaaaatgtgggctcctttgggtgtggtttgggggtcaaggagatagagcaagtaaggaatgaactttgagggtttatgatcattttcatgatgataatgacctaaaaacatgcttggctgggcatggtggctcatgcctataattccagcactttgggagactaagacaggaggatttcttgagtccaggagttcaagaccagcctggacaacatagggacaccccatctctacaaaaaaattaaaaaattagccaagcatggtggtgtgcacctgtagtcccagctactcaggaggctgaggcaggaggatcccttgagcctaagaggtcaaggctgcagtgagccatgtctgtgccactgtactccaacttgggtgacagagcaagactatcccaaaacaaaaacaaaaacacatgcttatggtaggcaattaaaacaggaggtaaggagtaaacatgccaggcccctcctcctctcctctgactcttccttcttcccccctgcttcccaagggtaagctttgcagatacttgctatgcaagcaaaaatgctattcttagccatcgtttaaacacagatttgcaatttgtggtttttcatttatataaattttggctctcttcctatagcagaatgatctttgtttttaaaatgattttaagtatacaattaatatgtgaatgtatgtttcttatggaaattagaacaatacacagttacagagtagaaggtgataggtgatatagctcaccctctcctcttcctgctactctccccagtctgcttcactccccggaaggaactactggcccatcagcatgtctccttccaggcattttttccatgtggttatgtccacctgcataagaaactgggggcggcagggtggggcggtgttggcgggtcaggcagaagcaagccacagagcagtaagggtactttttaaaaaaacatttaaatagatccctgttgtcctgcggcttacatgctcatgcatactcactgtttctttaaataaactttttcttttagaatagttttagatttacagaaaagttgccgcgatagtctagagagatcccatgtacctcttaacagcttcgcctctgttaacattctgtgtcaccatggtaatttgccacagctaaggaaccagcattagtccatgactgtcagtgaactaaactcaagactttttttggattttaccagttttgcccaatgttcctttcctggtctaggatcctgtgcagaatagcgcatcacagcacattacatttagctgtctccttcacctcttctggtctgtgacagggtctcagactttccttgtccttggtgactttgacagtttcgagggacactggccaggttttgtgcacactgccccttaatttggagttgtctcatggttttttttgtttttttttttttttgagacagagtctcactcgtctcccaagctggagtgcaatggtgcaacctcgactcactgcaacttctgcctcccaggttcaagcaattctcctgcttcagcctcccgagtagctgggattacaggtgcctgccaccacacccaactaatttttgtatttttagtaaagatggggtttcaccaggttgggcaggctggtctcgaactcctgacctcgggtgattgcccacctcggcctcccaaagtgctaagattacaggtgtgagccaccctgcccggcccatggttttcttatgggtagtctgggaccatgggtttttgggagcaagaccacagagctgaaatgccctcccttcagtgatttgtcagcatgacctatcaccattgttgttaaccttcaccacctggatgaggcagtgtatgcgtggggacatacatctatttgccccactgacatgagggttggatctctagaagaggagtcactgttcagaggttataggcatttgtattttttggcagatgttgtccttcaaaatggctgtacacatatgctcctcccaaaagtagnnnnnnnnnnnnnnnnnnnnnnnnnnnnnnnnnnnnnnnnnnnnnnnnnnnnnnnnnnnnnnnnnnnnnnnnnnnnnnnnnnnnnnnnnnnnnnnnnnnnnnnnnnnnnnnnnnnnnnnnnnnnnnnnnnnnnnnnnnnnnnnnnnnnnnnnnnnnnnnnnnnnnnnnnnnnnnnnnnnnnnnnnnnnggcagatcacttgagctcaggagttcaagatcagcctgggcaacatggtgaaaccccatctctaccaaaaatacaaaaaaattagctgggcatggtggtgcttgcttttggtcccagctacttgggaggctgatgtgggagtatcacttgagcccaggaagttgaggctacagtgagccgagatcgtgccactgccctctagcctgggtgacagtgtgagaccctggctccaaagaaaaaaagaagattgattgagatagggtcttgctctgttcaggctggaatgcagtggtgtcatcatcatagtttactgtagccttgaactcttgggctcaagcagtcctgctcctttggcctcccaaagtgctggggttacaggcatgagccactatgctcagccaagctaaaaatatcttagtgtgcatttctctaattgtcagaagtgtatttatttaccataccctggaaaccttatgtaagatgatggtgagtttggactttccagtaacatttggaaactgtttagtaccaagctctcattaacaatataaacaaaataggggtctacccttaaggaatcaaagccattatctaaaagctctttcccgcaacaactacctgagataatgtccttggtcatatgccccagcatttaaaaatggagttagtgagagtctgttgtttaccacctgatacattggtaagagctgcttgatggtatggggacatcagtagggaggatatagacgtagccacccccgccctagatagtaggggcctcagggtggggtaagcctgggtgggggaggtatgagtggtggaacagtgggagaccctggatccttagtctccagcgtgattgcattttgccaaggctttgtcccatgtccctttgtcccgtgttccatttgcccgtggtgttgcctagagagcatggaggggctggtggagcatgctctgtggttccctaacccagggctgtgtggggagagcttgcagcacccccctgaccccatatgaacgtccttgctatttcctgctgtgccatccagcaactataggatgctgtgctgtggctgggagacctgtttggtcttggaagctgggtcctggatgagcagaatgaggcaggcatagaggtgatgttggctacgggcaggggagcatttgctttgccttggagtagtgccatttccatgtagaggggcaagatttaccaccctgttgtggggatttgagactttgggttttgttttcctttacaccttgagctttgttctacagcaggtccctgggaagactggtccacaaagctgctgaatggggctgctgtccttcagccctgcctcctgctgcagaatgcagaggacgctgtagacttgcttggtgggtgcctggggttttctgcctccctggtgcactgggcacagcggcttgcctgccttttgggtcgtctccacctcccagggatgtttttgttccctgatcgaatgacctcctgttttgtttgttttttgagacggagttttgctttgtcacccaggctggagtgcaatggcatgatctcggctaactgcaacctctgcctcccgggttcaagtgattcttgtgcttcagccttctgagtagctgggacttcaggtgtatgccaccatgccacgctcatttttgtatttttagtagagatggggttttaccatgttggtcaggctggtctcgaactcctggcctcaagcagtgcgcctgcctcagcctcccaaagtgctgggattacaggcgtgagccaccgtgcctggcctgacctcctgtcttctgtttttgcccactgtcaagggtagacttcttcaaggctgtacttgtgctatcctaaagaggagtaatgggagacatttctgactttgtcagcatgctgcttggcagcacctgcctcgtttctggtgaccatttggaaatgtgtcctttatctggtagcaaggagcatttacattgatccctatgcacttaattggcatacttttattcctctggattttttttttaaagcataattgttcgtgtctacatgatgtaacatgctgctgacttttaagcaaattaacagagttcgtgctgaagcgcaagggtgcagggaaacaaaatgggagggttattaaaggggtgaggcggctcctcaaagatgtcactgcaccattcattcttgtgttcctggcccatggcaggctcattaatcctccacgacaatccattagcatgcctgtcaacccttcagagaagatgagccataggaaggcttagggatccccacttgaactgctgtgtggctctatgaacatccccaccttcctggagtgaggtggttgtggccacctgactttccccattttttttttttggacctcagcctccagcgctcctgggccagactcagggtgggggggatgcaggtgccagtgactgacacttggcccctcacacttcactgcctgatttgctttaaaggcaagggttgctcatgcttgtctgagctctccatctgtttgagaattatattgttctcaactggaacttgtaaaagagaaaaaaatgtacttctcaatttccatggaagaatatagattttctggtggggtggaaactttcttagcatgaagggatctttgtgtgatctgcgcatcagcactgaataaagaatgggtgcgccgaagtcggggaggccgactttcctgtggcttgctggggaaagtttgaactgtgtgtaagcagtgcgtggaaggaaagctaagtgtggagataacgaagggaatgggatttaatagaaacagggtgtgatgagtggcagttgcctgatgaagtggaaatcttgtgttccaaatttgtgagatccatttctgtcctctaaggaaaatgttgtatgtgcaggaggagttcatgtagttgggttagattgtgttttctgtctttattttttttcctgcctctatgggttgtgaacaaaaacaagaatttgatattctgcagtatagttaactcgtgcaaacagtgtatgcttttcagtgggatataaggtctgaaataataggattttccctagtaagtcagtttcattcctttacatgtgggttatgagatacaaagtgaagctctgtaaagctttttacgagctccctgtgttgccctcctttgacgggtcaaggcattggggttgacagaggtttctactctcagaggctttaaagaggtgcccactctggtgagatggctgtcagcatgcacgatgtgtgtgagagagcacctcttcaatcatatgcacctggctgtagcatccttgtcagccttaagagatacctccaaagcggaattttctacccctagaatcatgtgaggtcatctcaatttaagccccagctctgctccctaaattacctgagtgatcccaggtaggtcatttgctcattgttaaccatcagtttccttagctgcaaaacagagcagataacaccccaaaagagttctcatagtaaatcacatcaggcttacacaatctcagaaatgtgcagctccacaggaatcttcattacctctttaggcagtccagtcgggtttcaaatgaatcctactgtctgttcttatatggaaccacagtccctcaccctgtgttgatctaagttctctgtttctctcctccagcagggtcataaagagcctgaccagtccccctccctggagacctttgtgtgctgggtttctgcagccgttctccatgagaagggacttctggtccctgctctcacttggatgttcttccactgacttatctctcttaatgtgtggaggcagaaacccagttttcagggtctctcccctggccccttactaagtctcccttaggtacagtctaagactgcctgactttttcttctttttttttttttttttggcagccacaacatcacatcgtcacatacagaaattatatccaattaaatctcctaagtctttttcacacctcctacatttgtgcatttctttttttgcacccaagtgtccaaatagcatttatttcctctctattgcaattccaatctgttgatctttttagctcttgactctgtcatccagtgtatttgccattgctcctggaaacttgtcatctttgaattagataaacattttatctgtgccatcgttcaagtaattgataaaaatgttgaaatctacagtactcagaaagagacctgtggcctcccactagagaccttccttggtctgttcattaatcagcactttgtagggtaaattgaacatttactaagctattcagatgtagttcatatttcttcaccttgtcaacaaagagatcttagcaaggcattgtagaccaagtatgtgttcctggaatatacatattaagaaaaaatccttatgccaagaaaatgggcacatccccaaaacccaggttattgtagtttacggcttctgacccagggcttcactttgtagcagtgtttttcttctgtttttgcctttggctgataccactgctagagtgcagataagagaatgttactaccagggggcttgagtgtcgggctatgattggctgtcatctggagcagagtgggactgagctgctcaggagaaaggtcttcaggtgattttttttgggaagctaagagcactggttttagacatcctctcctggctgatgatgggattggccttcatggggctgctgtctggctgggctggtgggcagaggttcctgtgggtgtggatggagaaatcctaaatgccgagggtacctggtcttagtagaaatcgtaggatgcctcagtgaagaagtcagggatgcggattgtcctccggatgcttggatgagcgtgcagtggaaaaagtactcctttgggggaagaggtgaatctggaggtgttagagcagaagagtaaatgcagaagttgtagcagatacaaaggctttggcaagagtgggagtgatcattgaagggaaggcaggggcttgctgggacaggctggagccgtgatggaccctcatagtaaccctgctgcattttacaaaggaagaactgtgttggggtacagatgtgccaaacactcaaagttagaaaatcaacgcagtcggttgtggcttctgcccttgaaacatcagatagtgagaacctgccactgttcagtttgcagagtggttggttgcatacagtgttttagctcttgcccactcaatacagaggttgcatgcgggcgtccacctgctccgccacctctgcctgcttgtggctgtgtgcccagagcccatttccctggggagtcagtgcagcactcctgggggacccttctgtttgtgtcctgacgaatctgactgtgctggatgcagtcccacagccacacctggtatgggtggcatctttaaaggcctggcctgtgtgtgctgtatctgcagcagagctgtggccaaacctgctttccttccatctgggttccccttggttctcggtggtggacgggctgtgtggtctcccctcagctgtccacttgcacttgtgttaaaatgcggcagaactttccctctatacttaaattgtggtgaaatacgtatgacataaaacttaccatcttaacttttttttattgagacaggttctcattctgtcacccaggctggagtttttttattgagacaggatctcattctgtcacccaggctggagtgcggtggcgcgatctctgctcactgcaacctctgcctcctgggttcaggcgattctcatgcctcagccacccgagtagctggaattacacgcgcccgccaccatgcctggctaacttttgtattgttagagatggggtttcgccatgttggccaggccggtcttgaattcctggcctcaagtgatccccctgcttcggcctcccgaagtgctgagattacaggcgtgagccgccgcgcctggccttccttttttttttttttttaagagatggagtcttgctctgtcgcccaggctggagtgccgtggtgcgatcttggctcactgcaacctctgcctcccaggttgaagtgattcttctgcctcagcctcccgagtacctgggattacaggcgccaggcaccatgcctggctaatttttgtatttttagtggagatggggtttcaccatgttggccaggctggtcttgaactcctgacctcgtgatccgcctgcctcggcctcccaaagtgctgggatcacaggtgtgagccaccacgcccaccggcctcccatcttaacattttaaagtgttcagtttaagtacctttacactgctgtccaatcaatctctagaacacttttcatcttgaaaaacggaaactctgtacccattaataactcccattctctcctaccacagccacgggcagccactttctgctgtctccgtgagtctgactactttgagtacctatgagcagaatccgcaggatttctccttttgtgactgccttatttcacttagcataatgtcctcaagctccatccaggttgttgcatgtgagaggatttccttcctgtgcatgaactagagtgatgcagggactgacctctggccatgtgatgggtggttggtgatggatccaagaggtagctggtctctgaatactagcccagtccttttccttgctaggaaagtccccagatcagatagaaagcctcagtatttcaagaagcttctgttttgacaccacatccatgaagaatcacactgcagggtaggggaacagatgagtgggatttctacactgttatcagctagacttagataactggctaattgaaaagagtacaggtcacttaaggaaactggagcattgtagggcaaggtaaagtgcttttgaaatgaggatgtgaactgtaactggaatgatgtaatgtgttctacaaaatgaagccagtgagaggacaggggacacagggccgacttttatttaggacatttgcctggttctgagaagaaagttgaaagtcacgagagagagggaaaggaaggcagaaggaacttggtttttgcaggtgcctgctcagcatgggccttgccccagcttggctgtacctcacagcaccatccactggctctacagtctgtccttcggaggtttagggtgctgtctcatgcacagtgggtgctaggtggtagtgaggacagggtgtgggactaggcaggtgctgcccctcggaaggcctcatggtgaggcaaagatctctggctccgagggactctatctcctggtgtcctgcttcatcgagaagccagccacccatgggaactgtggataattagaaaggcttagaggctcttctaagggtgttttttgaaatatggagacctagaatattgggctttgggatattttaagatgagaaaggcatttggagtaactgtcagagcagataaagttgtttttatgaagatccgggaaaacggttgttacaaatacagctctgcaccaattctgcgccagtctgtttggctacagatgctttcagtggaggggacactggggcttgtgttccctttagtctttgaattcccgttaaagtttccatgtcttaagtggcgtggcaggatagaaacatctcacccatcttagtaagttctttgctgtatgtagcactctggttttaacgttctgagccttcaggactgcccttgatgtgtgcatttattttgttgatatgcatgatgtgtgggtggctctgcggcagtaaaacagttcacattcaaattacactcggtttctaatttctgttctcagagtttcctctgtaatggaaatctcttacattcttatcattgccttcagttattgaatgtgttaggtggccaggattgctgtctgtgtgaaatgggaatgtatatatacaacgtaaacatgttctgattgacacgtgaagataaagggcttaacatgaattgtgtcggtttacacttacacagaaaattctactgtaataaactgaagtgtcagtagtgtttgttatcataacattgtctttttccctcttttctgatctctgatttttcaattaggaatgaggcctaaagaaacccatgctctctcttctctgagcgcaaggagggtgtgctgagaccttgaagggcacagcatgggaggatcatatactagggagagtctgtctccaccccatttttcttctgctttgctttgtttcgtagtttcttcgggcttcttgggggttttctgagagagagaatgtcaatttgagaagtaacaggtgcacaggctttacctgcaccacactgcagataaggtgggtagggagggtagtgacaggtggtgtggtgggttattcagttctttcctagggcagtgggtctcacagggtggtgcttaggccagcagcatcagcatcacctgggtgcatattagaaacaaattttggggcctcacctcttgcgttttaacagttccttcaagtggtcctgatgcatgttgaggactttgaacactcctcctacaagcaaagtgaagttgacctcccacacacttgtctcagtctgctttctagcatctgtcccattgcctttgttgttctccccgccacacgggctgcacccctgggattcccccagctgccaccaggcatcagctccagctgcctcccagggtgtgctcctgcctctgcttggagtaccctgcctcccactcttcctggcaagaccctgctcatctttcagggtcgtctctgctgagaagtcttcctgacctcctcggagatagggagttgtggggccttgtctttatgttcccagggttctgtctattgcgctattaaaactttttttttcatttaatttgccacttgctagagagatggttgttctgccttcgttgtgcaaaattcagtgatacactaatcctctcctaacctcttaaatcattttgactttcacagagtgatagtgtctagagagggtttttgttgtactaagttattggttccaaagaattcattttaagaggagtaaagaactattatagtatgccgcttactgagacaaaaccgacttctcacataagcccaaaggttttgttatgttggattttaccattagagttaaagatgatgattggttcactaatgtgctttaccttcacagtgtgcctgtagacctgtagtaaaagaaggctaattatgtttcctgatgtcttttatttccaactataagctaagcctatctcattttttttttttttttttttttttttttgagatggagtctcgttctgtcacccaggctggagtgcagtggcgtgatctcagctcactgcaagctccgcctcccgggttcatgccattctcctgcctcagcctcccaagtagctgggactacaggtgcccgccaccacacccggctaattttgtttttgtatttttagtagagatggggtttcaccgtgttagccaggatggtcttgatcttctgacccgtgatcctaccgcctcggcctcccacagtgctggtattacaggcatgagccgccgcacccggccaacctatcccatatttttaaagaagagttgatcaagtagttacccattttaactaaatggataactataacattctttaatggaattgttgacagagggataatcagtgtttttgctaattcatgccaccctcctttgttgtatgttagtaatatttacattggggcaacaaaatagatcagtatttccattaatgtttacttaataacagctgctaaaaggtattactgtttgcagtaacacaaaagcacttacctgattcttatgccagcttctatagggtaggtagtgacagcccattttgcaggtgaggaagatggggtttagaggtgaggtgtgtctgcctgagagcaggagctggtaaatggcactctgggctcatgggagtcacgctgtttttttttttttttttttttcctaggacctcaaggttgtgtctaagacataatttacagttctcgtgtaggtcttccaaatacttagctacacagctttggggcgttttctcagccaaatacttttctttagcccttctcatattaacatttagttcttagggatttattttcaaaatatatatagcttgtatatgccattcacctaagttgttagagcagacattctgcctcttgatctttagaaaatacctaagagtattttgttaacagtactcatttcagctgaaagactttattttaaaatttaatttaattttattattgttttttgagacagaatcttgctctgtgtctcccaggctggagtgcagtggtgtgatcttgacttgttgcaacgtctgccttgtgggttcaagtgattcttgggcctcagccacccaagtagctgggattacaggcgtgcaccaccacgcctggctaatttttgtatttttagtagagatggggtttcaaactcttggcctcaagcgatctacctgccttgggctaccagagtgctgggactgcaggcatgaaccactgtgcctgacttttaaggctttctttaaaatggcatcttttggccaggtgtggtggtaatcccagcacttctggaggctgaggctggaggattgcttgagcccaggaattggagaccaacctgggcaacatagggaaaccctctctctgccaaaaaattaaaaaacaaaacaaaacctaggtgttatggtgtacccctgtggtcccagctgcttgggagctgaggtggaaggattgcttgagcccaggaggtcgaggctgcattgagccacgattgtgctgcagcactctagcctgggtgacagagtgagaccacgtctcaaaaaacaataaaaaataaataaaatgacatctttggagaagtgaattctacccaggtaccaagcccctgcctgcccctcccaactcccttccctgactcccagcacccccatctgttttggttctgctgttgccattctctggctttggggactttgctgaggccccactgtccccatcttccagctgtaccctttctctctgcttccctgcttgtcttattctttacagggctgcctgggatctcacattccaaaagtttttgggtttgtttttggatcatgccaatatcggttgctttgagaagggagaaagggtattttgcattttccttttaatcatcggtgagtagccacaaagggtgtgtctctccctcttgtgctgtgtttactgtttactccctcggtgcatgaattatttcatggcaccagtggagcatattttcttctctttcctgtttgtggcttgcgcctcctgaacgctgctatcattcatggtccagcttggttttctttttcactgtttctatcacaaaacctcctgaagaccagtggtgtcagtcataggctccaaaacagctggttcctaggccctgcctcgtgctctgtggtttgggcttgtcttttcttccagagtaagtgggtagcttcttcctactttttttctcttttcttctataaatgggaggaaaagtgtgaagtatggagactgctctttcatttgaaggaaattcacagttccagctctgtagtgtggcctctgttaactagtggtcaacactgactgtggaaggggggccagatggcaaagtgaagcagattctttcctcctgtctgcattttgattgcagtatgaagttcaacttgcttcagtctttgtcttcatgttgtttcactaggtactgaattttgtgatctgttggaaataacaagtaaatagatgcctaacgctttatacaggttgagcctgtctaatccaaaaatccaaaatccagaatgcttcaaaagtttcagcttttggagcactgacatgacaccacaagtggaaaattccacacctgacctcatgtgacgggtcacttttcgaaactcaggcacacgacacacagttaatttagtgtccccaagggaaaaaaagaccctcccggcccccttcagctgtgatgtgtcttttccacacatgcccagattccctcagacacctccacaaagggtaataaaatggttcgttgtatacaaactttgtttcatgcacaagattattaaaaatatataaaatgactttttagagaagcgagaagagaaatgagaggtaggggagggagggaggagttgggggacagttgggggaatagttgaagctaaggtgtttaggcagagctctgaggaggtgacgtttgagtggagacccagatggctagagaatggggcagcctcctgaaggagcagaagcactgtgggcggcagggtatcacagaggaggagctcggtgtgttggaggttggtgagtcccgtggagtcttgtcagatggtgttgggacagggacggaccgtgaggaggctggatcatggggaatgtgttgctttaggccaagctggagttgatagtggctcagatcagagctaaagtagtggagacacacagacattgaaagaatgatgaaattcactcattctgcgtgtgtcccatgtcatgtgtccgctgcacaccaagtactgttttaggcactggtgatataattgtgaaccaactggagctgcggtgagagagaccatgaaaagaagggccagagcggtgtcctgcagagggtggtgtaccttgggagggaagtgtgtagggttgttgaggaacagtgtgctgcacagggaggaaagacgtggggcagcattgtgggaagagcaaccaagattctcataggcttgggagcggaagccctgaggtctgttgctggactagatatgtgaggtgtgagaggagagaagaatcaggaatgactctttgattcttaacgtgagcaactcagagaatgagagtgctgcagtttacaagcttggaaggtggattatgtggggggatgagtgagttgtttgacacctcaatggatatactcagatggatgtatacgttagagctcaaaagagtctgggccagtgacatgaatttgatcatatctagagtatgagtggcacaggaagccacttgtctggatgaggtgacagaggaaaaggttgaggatagcaaccaacatttagaggtaaggtagaaggcagagcagtgtggaatcagggaagccgagaggaggaggcaatgccaggtgactggaaggtcaagtgacacttcgacagtgtcactgagggctctgctaggagctattcggtgtcataatggggacagaagctcagtcggagtgggttaaaggtaaccaggaggtgagggtgctgagaggtgggactattgacaagccttgtgtcaagttttgctatgtaggggctgaaatctaatgtatgtgactgtgtataagtgacttgacttccccaaatctgtttcctcacctttaaaatgggtgtttgccaagtgctggtttctgctattcttttctctgtcttaggggtgtcattttctctttggtaaaacagaagaattagatgatatgaagtttcacattctaagttctcaagctttgcccactcctcagcccttgggtccctccacttcctcttctcttcgctatctctgctcagtttctgtctttgattgtaatgtaatgcccagtgggacttttcttctctccctcgtctgttcacttattccgtcctgcactgggccaccagattaatcctgcaaaaggcctcacatgggcttctctcctgctcaggagccttgtgggggctttattcctctgagatgaaagttcttatccccacatgtgatcctttatgacttgggtgctatcaaattcatttcctcaactgctcccctcttcaccctgaccatcagatctgctggcacatgggcataccttgttctgcattgtctctggcctgtgggatatttaccgagctttaaatcctaggcaccctttgggagccggcctgtgtgcagagctccccttagcacggtggcacaaagcttggacaccacctcttgtctgtcctgcttaattccattcacatctagagtggactcgctgtgtgcacaccactgaccacctgcctcatgtgacagttgttcctcatgggtcttagctctttgccttcaccatgagcctcctcagagggcagggcactgcctgttggcatttctcgtggtatcatacatgttgggtgcttcccaaattaattacatcagtcagaaaacttcactctatctgagaagctttaatagtgtacttgggattattaaatcctaaaaaaggttatcacaaagagttttcttggtgtgtgtctgtgcttagaatttagaaaataagtcatccagtattgaggccattttatgaaaagcctttaaaatctgcaaatgcgttggcccagcacttccacttctagggatttatcctaagaaaatagtcttgggtatctgccaataatgttcactggagtgttgtttataatgtgcaaaacaggagctaacctaaatgtccaacaataagggattggttaaaaaaaaaaaacaaccctcatggtgtgtattaatactctggaactactgtccccttaaaatggtgatgtagaaggacatgtattgacctagtaaaatattaagtgaaggaagtgtgtttacaaatgtcatttttgtctgatttcacttaccttcatttatagagagtggataattggcatagatagtgttaacattgtttatcgtggaatgttgagatcgttgatgatttttactggtttttttttttttggttattacctctaaactctgtaggaagcatgctttcttgatcaataaaacttaaagttggagtttatgctgcttttattcataaaaaaatcacgtttttaatcttctgttaggttatcctttatgtctacattaatgcacgtgtggagagaacacagtctactcggcttatgtcaaatggtagtgggaagcatggaagcatgcgttttttagtccccactttacaagtcacagtgacggttctccagtgtagagtagattgattgccctgtgtccttcaggcagggtgcagtagtaagttattgatacttggctgctgagctgtcgttcaggccttggcaactgacgctctgcagaacggaccaggagtgtgcggtggtggagtccggctggcctgggttgcagatttaactttcgcctctgcctctgtgtgcctctgggctgtaagctttagtttgcacggttaacggggatggcctctcccatggtcggttggagtgtgttgcacagcgtctggtccagtgttggcactgtataaatgccagctaactggttagccacctaaactgtcagtctgcaacccacagctctgcagtgaacaattgaacctcatttctttaataataatacaggattcctgaaaaccaactgtattattgtttggaaaatagtttaaaaattatttccttctaactgagacgtttaccctcttgtctcccttcagtctgcgggccaggcatcgacatccgcaacgactatcagcagctgaagcgcctggagaactgcacggtgatcgagggctacctccacatcctgctcatctccaaggccgaggactaccgcagctaccgcttccccaagctcacggtcattaccgagtacttgctgctgttccgagtggctggcctcgagagcctcggagacctcttccccaacctcacggtcatccgcggctggaaactcttctacaactacgccctggtcatcttcgagatgaccaatctcaaggatattgggctttacaacctgaggaacattactcggggggccatcaggattgagaaaaatgctgacctctgttacctctccactgtggactggtccctgatcctggatgcggtgtccaataactacattgtggggaataagcccccaaaggaatgtggggacctgtgtccagggaccatggaggagaagccgatgtgtgagaagaccaccatcaacaatgagtacaactaccgctgctggaccacaaaccgctgccagaaaagtaagaatgatgctgactgctgctttctctctgcctctctctctcctctcctcctccttgacctcccttctcttctgagtgcacgagttccgctgggcagggtgcagtcgtgttgcatttaggacgtggcatgcctgctgtgcggaagtggttcccagtgggggtcttggttggctttcctttgcatctgggactcttggattgcgggactgtggcgtggctggaggccatcatggctgctgtcaagactgttcaaatcacatgttagaaataatccagcacactcctgggctagacacttgctgaccttcagctttgaattcctgatgagaaaggtgacctggtgtgcttggaagtccctgagccttggcagctgggggctgcttatgtgtcagctctttcatcctttgtgcgaagtgatattttttgttctgcaggacttccttagtttgaatggacttggaatatggttaaataaagggaaggtaaagcactaactcatatcctgtgaaagtggtccttaggtcctagtgatgatgttatgatactcaggtgtcctggttatgacagagcacctggcccaggtgggagacctctggacccatttctgcaagtcccaggttcaggctgtacttgcaggtagctgtgtagcagggtgcatttttaaacctctgggattctgttttcgttcttttatacctgtttactgaacagttgtgaaaatcttaagatttcacgagtgaaggaactttggaaagtatttactgttctgggggtcagatggtggtattttgaagcttcttgtatatttatctgcaatatgcttattttcccttgagaataactgagctcttgccttcatgtgatcagttccttaagaaccaggctgtttggtattaaaatgtgactctgagccttcaccttattgcattcagcaatagttatgtatattggctaggaagcttttcctcactggtttgaagtcagtgtgttagctataaatagctattatttaagtgttggcccagttaaagatgtaaggaacccatgttctctagttatgaagaaccaagaaaccccaaattgttagacttgcctaaaataaataaaaggcgagaccccacaggggtgaagtgtgtaaagtaaataaaggacagacctcccaggtagcccttcagttcccgttcaaccagtcctgaggcaggaaaaggatctgtgtaccctgatctgccacgcacttttctattctgcagaattggatcagtgcgtatgtgaacattgattagtgagggcaggggtcccactggctgcagccagtaccttgtagagctctgagaatgcagtcaggccactttaaggttggctggagttggagggagatcttatgctaaagtcacttgtgtggttgattaaaactgccctatcattaagttacccactggtttgagaaaacaacaaaatatattttttaaataaccttgacatttaaaaattttatctgaaaagtaaaaggtgttatcaagggaggcagcatggagtagaaaagagatgttgaatgtggtgatgagggccaggaatgaccttggatgggccagcccttctgggctgtagttgggcttttttaggatatttctagggcagtccagtacatcccttagtggtgatcatatatgggcatgaggatgttttgaaaactcataagctctttagagaagggaggtgccatatgaaacgtcattaagtggagagttgttcacgaactaggtaggtagttactttggtcttgccataggtttttggctgtttctgatgagctactgattgaagacccctggggtaggggtgaggcctgcattctgggtccaagtctaagagtggcgactagaaatgagcaagttatttaaattgcctgggccttggtttcttcatatgtggaatggggtaaagcctgccttcctcatagggctgttggaagatgaaaaggaggaaggaaaagcaccgtgaaaatgttaacgatggttagaaggtgggctctgctggtgacagacagagccttgatatcacctgttggttggtcacctgcttccccaaggccacgccctgcagccttctccttgaccatcccagccctgctgatgttccttgtgatttcacaatggagtacttatataaaattggtaactgctttccgggaaattgacttcccttccccttgtcctgaaaactcaggcatgggcatatttcttggagattttctagttgaatcagaacttcctcttggtttgcgtagattccatttagacctgcattgtccagtgtggtagccgcttattgagtaagccacgtggcttattgagtacttgaactgtggcttgtccgaattgggactgctttaggtgtaaaatatacactagatttccaagacatagtatagcaaaaactctgtacaccatttcattaataattactatgttgataacatgttgaaatataacattttggatatattagattaagtaaaatgtgttcttaaatttcacctgcctgtttcctttttattcttttttttttttttttgaggcggagtttcgctctcatcacccaggctggagtgcagcggcgcgatctcagctcactgcaacctccgtctcctgggttcaagcgattctcttgcctcagcctcccaagtagctggaattacaagcatgtgccaccatgcccgtctaatttttgtattttaactggagacggggtttcaccaccatgttggccaggctggtctcaaactcctgacctcagatgatccgcccgcctcagcctcccaaagtgttaggattacaggtgtgagccaccatgcccgactctttttaattcttaatgtggctacttgaaaatttaaaattacagatgtggcttgcattctgtgttggtaagctgctttagagcatttcttttaacaccaggagttcttcccctcatcatctttttggctgagtcgtcactgcagcgctcatagccccgcatgtacctctccagccagaacccttaggaatcatttggggagctccatgaagggcattgagtccaggcagaatggctaccttgagttcaacataagcattaagatggccattcgaaaacattaagcacagaagaatcccattcaggtaatcttctgttggctggctgtagaactacggagaacatctggagaaacacgtcaagggtgtgtgtgaaatcgttgagcctactcgattttgtcgtgctgttgcgcggttttcacttggcactgtcctttaaactccttctgtgccgtgactctgcagtgtctggcagcgtagtagactctactccctctatggacgtgatccctctgtgggttctctgcacacttctgtatttctcggttctttttggatttaggagtggattttatacatttttgagtcattcctaaagagcgattgacccttaaagaactgtgtacagtggtttcctttcagtaagaacatagttgtgtggcaccccctgacatgtggtgtggttgattcttcttccttgtcttccaacgccaccctcttatgagtctcttcctacccccacaggtgccgcttctctgtctcccttccctcagtctggcttttaacggtggtctcctgacatagtccattcaggctgctgtaacaaaatcccataccctgagtggcttacacacaacagaaatactgctcacagttctggaggctggaagtccaagttcaaggtgcttaccagattaactgtctggggagggcccacactctggttcacagaagcaccttttcactgtcttcacatgttggaaggggcgagggattttttttctggcgtcttttttataagggcactaatcccatttgtgagggctccaccctcatggcctaatcacctcccagagccatcatactggggattaggtttcaacataagaattttgaggggacataaacattcagatcatagcatggctggagttctgtcctgggctctcttttcactttccttgttctcatctcatccactggtaactgcattgcctcctgtctccacctaaacttccaagtatctccagcccagaacccttttgagtccaggacctgtcattcatatccatcccagaacccttttgaacccaggacttgtcattcatatcagaccaccacgagcatttcactacagcctctgatggtcttccctgtttcctcacttttgcctattttttttcttttctattccctcttaagtgggccacacttttgttcccctggttcttatgtcaggaatgtgggtgtcctttggacacttccttctccagttggataccaggccctttccctcccgaatggaatggaaatgctgcttcagctgtgttcctctgctcctcccccttacagcagtgacatagcctctctcctgctattgtgtcctgtggctccaccgagcactggggagcttttcagtatgcacttttttttttttggagaaagagtcttactctgtcacccaggctggagtgcagtggtgcgatcttggctcattgcaacctccgggctcccaggttcaagtgattctactgcctcagccgcctgagtagctgggattacaggcccgcaccaccacacccagctaatttttgtatttttagtagagacggggtttcaccatgttaaccaggctggtctcgaactcccgacctcaggcgatccaccggtcttggcctcccaatgtgctgggattacaggcatgagccactgcgcccggccatctagtgtgcactttggactgatgagctcccctacctgaaatcctgtagcaagtccctataggataggcatgtggtacagtgtgaagctcctgagtggtcaacagctaccccgtgacaacatgccacactccatgtgccactccctcccgcctgcctgctgtgtccttggccccagtggtgctctcccgtgctgaccagccggcacggctcacctggccgaactctagccttgccttttcctctcaaggatgtaaaggctctgcagatttcgggaggcctgtctcccagcacctgatgggacactttttgccccactgtaaattctgggtgtatcctccactgtatgctgtcaccccaagggcaagcactgcatctgcttagtgaaggatttattgttcggaagatacattttccccttgagcagagagtggcgtatcctggcagtcttcggtgagccagttgtaccaggattatgaaatgcagatgtttactgtgtcattgttgctgtcattgctactgaggagtactgaccagaatcatctgcaactcttagttggcagagaggaccactatggcgggtagctcttttctttcctgccattgtggggatgattccaggccaaagatgatggagaagtatggaaatcatctgaaaggttgaagcttggcacgtgaagccattcatgactttgtaaggcagttttgctgaaggccagttctgccctgggagggacggaggtgaatcctcctgagtacctgtggttttcttacttcctgctgaatttacctaagtgcctgttgtttgcttgctgtggaggctttctggtatttcatttcaggtgcagatgccttcactttcccacaaaaaaaaccccaacaaaacctaagaccttactgcaactaagtctccaagtactttttaacccattgggatgaacagcctgtggtctgctcagatcaccctgagtgcgtgtgagaaggcctgggctttgccaggaaatccaggaaggcagggccgggctgtgttggaagctggcttagctggtggggcagccttatttcaattaaaagggcattgactgggagcagcagtcctggagtttgttgcatttcctattgccctcaaaatgagaaaccaggaaaatagcagattggagccttcgagaaggcagtaaatggctgtttttattgacaaaaggaaaacattttactgccatctcactgatggcatctcactgacttaaaatgaaggcaggttgtagtaaaaaaaaaaaagtctacatttttccaccgccacgttcttatatccttgtttgtcagccactgctcacaagggcagtgttgtcttgcggagtagaggcgctctccttccctcgttttcctctataggttggtgtggctgacctgctagatcaaagtggaggacctgtttaagaatgtgtaaattgaaggctgggcgcagtggctaacacctgtaatcctagcatttggggaggctgaggcaggaggatcgcttgagtccaggagctcaagactggcctgggcaacatggtgagaccttgttcatataaaaaaatttaaataattagctggttgtggaggcacgtgcctatagtcccagcactttgggaggctgagatgggaggatccgcctgagcctggggagatggaggttacagtgagccgtggttgtgccactgcacttcagcctgggcgacataatgaaatcctgtctgagaaaaaaaaaaaaagattttgtaactaagttttatggctagctttgagaaaggaaaataataataaaaaaagaatgtgtaaatcacctgctggatggggggaagaggggcacattgtctttgtagtgagacttcactcatgtgatgtgcagtatttcatcttaacattttttttttaaacttaagctacttgtgaagagctgagatgtttctgttaagcactgtgtggtctgctgctggtcttctgcaggccactgttccccagactgctaagacgatcatgacacaggcttgcattttcaggtggactcttgggaggggcttgtggaccctggaggagaaggcagccaggagaggggcatctggctttgtgttgttggtaggaacttgtctcggttgccctggaaggcctctgctctggtcagctgctcccagtgtgggggtgatctttatttagaagggggtcacatgcccccaggcctcattgctatgccttttatagtcaggcgtggagctcacattctcttctgcctgattgccgacgcttgttgccgagatggtgaagcagtttgtgtgcaggttccctgggacctggcttagcccacctcatttcttggggcgtgtgccttgtgcctcaaagactttgcttttggctaattgtcattagtgatggtgtcaccatcctgggcctccttcagaagtttttaatagggatctcgtctaagagaccaaaaagctttcagaaccactgacttgtggtgatttttgcatgccaagtatttggaaaatatctggagccccttcagctctcaccagttaaacctatttgtacatttgttctggtttcttcctgtgcttgaaaagcctctttctttgttgcgttaatacctctgtcttgctttcctcatgtgtatgccagtgtgacattctcggcagagtggggatgacgtggagcgtgtgggcccgtggttaatcttgtcctgaattgccttgctcaacttgcgtgtatagggtggttcaaaagttaagtttggctggtggtgaagttggaagcatcacttagaaacacgcctcctttgggcatatggtgtgaatcagggactctggctataaaaggtggggtctctgagcaccatcctggttggaatgttcccctgacttggaggtagcgagagacagccaaggtgtttgttccagggaggctggtgggtgggagatgggatttttctgtctgtggcacaggcagtattaagtagagcaggctgtttaaatcacattttaagtaaaaaccaaagtgcacagatgatctgcagaacttctgggggataagaagctgctttcctcgaagaagttcacctccaaaccagcgcccatggctcagcagccagcatggcagccccaggggtacatgggacttgggcatgtgaggctggtgagggacagggacagctgggtccagcagtgcctttcctagggacggttgccacgtcacctgtctgccctgtacttccatttcctttctttgaactcggggggcttgcatcggactacctgtgccgtttcctcaaactctaaaattgagtaagttactgagggtttccgtggtctgctctgagaagatttcttgcttcctgatctgcctgtgtgttcgtgttgcttggtctctctctctgtctctctctctctcctctttgatcctagtacatacaggcaaggtatgcagcatttaaaatgttcataactcatcaaatggcacactgatcatcatgtataatttgggaatcagggtttaagaaatttagagatcatttatatggaagaaggaaccccaagtagaaacccaaaatctagaccattctgggttctaatctgtacctgccactggctaacatatggctttaagctggatgttacaatgagagctggagtttcgtctgattgcacatagccttgcttttctgtctttggaaaagtagctcactgcagagccctggtaaacgtttgaactgcattgcgggagtaggcagaagaacagaacagtccttggagcttggtaggaggtgtgagggcttatgggggacagttgtcttttcaagtcaaggaggaataagggcttctggggccggtggaaagggtgagtcttaggcagggaagggtgaccatccaggttagatcacttcttctgcggggtcagcttggccgctgttaggttttcaggatgtcatggggctggccaggcctcacccctgatatccctgagcatctgttccttacaatattgtggagtccgtgggggcagaagctaccatcctgtgcctgccctcactctcagtgtgactggtcttcaggatgtttaggtggctccacatgcggatgtacagctttcccctgcttgttttccccatggcatattaacagcgagatctgcaagaatacatcattttgtacagaacaggatgtatttcttttaaactacgttcctgtgtggacaagtggtatcatatgcaaaggtttaaggaccgttgatgccttgagatagtgccatctgtttgcctcaggtatgtggtgctaggacaaagctgccagacctcaccttccttcagtgagacaggaataggacagtatttgaaaagcatctaacatgtttccaagcacataggtttttggtaaatggtggcagctgctgctattttttttttaaattaaactatctaagagttgcattctgagaccatctaaaattctgagtcttaagctgtgttgactatatatgttcactaccataactaaatggtccttctgtattgcttttctaaattgtagaatttcaattattgtaaatagcgggccatactgtaggtgtggttcttgctaatttgattcgtactgttcaaattcttgtgtctgtccagataaactgtatctttacagaacattcagcgaggtacatatgtctatatcggggtgccagtggagtcaccctagtcatatgtaaactctatttatttggttccgaaactgaatttattttgtttgcaagtttggtatttgggagcatttaagaaatatccatagattcttgtatgatactgacattaaatcattaaataccatattttttaaatgcctctgtctgtttgcatggataacattaaagtggttagagtgggcacagttattggtaaagattacaaagatgtgcatttttatgacaactttaggtctcacataggtagccaaccatctgctccaggatgaagcatgtgcctgtttatcctcttctttggtaacgctaggtatatgtgtgcacacgtgcacgtgtgcgtgtgtgtttgtgtatgtgcgtaccactttattctcccacccagcctcttctcctgttttgtttagtttcattttcctcctctcacccccattgcaggaaacaaacactggctctctgtcctcccttaggtcttccttccgttcaaggggatcaggtgggtgggaaaatgttgtgcaggaatgccaggcctctgcccgaagccgggcttctgtttcatctcattattgaacagaagtcgctttttgtttctttgccttggtcacaaacaagcgcccagtcctctcttctttcttcctgccatttttcccagaatccatgtgggatgggaacagaggcagcgtatttagggactgtcggttgcttgatacccatggccttgtttagagaagctgcacccactgccccaacgtgtagctgcatctgatttgtttttgcaagtcctaatgaagggacctggatgaagttagtgaggttgccgttcctggggttaatgcagagtggcccatggagcttagccacccttcatgcagaaggtggggctgagggcagccagtgtgactgaggctcgctggcccaccctgagctgcttgtgcccatggggcccctggggaggagggcccagctgcagtgcgcatacatctgcccttggcagcagatctgtgaacccaggctgccattctggatttccggatagatgcaaagtgcttggacgtgttttagcagctgctgagaccaggagttgggcttagtagtaaaaagggggaacaaaataaaagaagatcaggagacaaagagcctacagtacaaaaaaggaaagacgaaggttgatattattagaaatacttcctgggcagccttactgtttgaattaggatcacccccacccccacctcccagaggtattagttgtaatgcagagacaaatggaaactagtcagatccttgggtcctagaaaagaccagctttgttcctggggtggtaacctagtacaacgtttccgttcctatttcttgacctctgaatggccccttctgctttgctaagtagatgatattattaggtgcttagactattcttcagataggatgtaaggatatatttttgttctcttcctcagtgaacttgaaatgattggattattttgtaatacgtcgatactacttttagaagcttttgaataactgtgtcaaagaagctttagaagaggttttaagcaggattgcagagaatgtactgagtgtgtttttccactcacaaggaaagacagcagctgaatgcagaagtgtgtgtctggttctaactctttatcacttcagggactgtccaggcagcaccatccgttgggtctcctgcccttcctcctcccacccctgccttacccctggccattcttttgtgaccagtagtcctttatgaatggaattctgagaatgtataattttctcagaagaatgcttctttagctcaccaaatatttcttgtttgctgaggggggaaaaagatcctccttggaaaagtcactgggtgccaaaggtgggtgatgaggagagatgaacttctgggtgtgcctagcaaagctgtttctgttgataggcgattaacaaaacagccaaacttgacctaacagactgccattttgagaggaatttgttttgcaggattaattggcttcgaggtgtactggtggctgtgcagtgatgacggctgtcgtgcctcctgtgtcttctgctcattgtgatgcagggcaagtgcttaggcctcagacacaggctccctgaacttcgtgttcagtgctttagggtggggggacttgagacccttgacttgactcggtcccactggaaagcttctgttgcttatttgggtaaccccaactctatcttattgggcagtagtgttatcctaattcttggaaatactcagtgtagaataaagagctgatgaaaatgtgtaagaagggagtaagtggtcattagagagaaatggtaattgggatgatgctctgaccccttcagcaaaaaataaaaggtgaatggtttattatgagctagttcagattctgtttttggaaatgagcttggttatacatagtgcatttgaaaagcgtgaagcatggactttcagatgccagctcctcagcctcctgtaactccagtcgcaaaatccctccagtgtatctaaataaatgcaaactcatcagtgccttaccattataaagctgggctggagaggcaggtggcctggagaatcaaatgacaagaagtatagggagcagcccagcttcatgatcgggggaatttgcatgaaaattgtgtacacttaagcaccattgtctattgcagaaagcacgatctggcctcttctactgactttccttccagctctgagattcagttttgaagacaaggttgttggggacctcggatagatctgttggccgtggctttcagtaaacactactagagactgaggacatgttctagacttggaatggtatgaagcagtcgaactttttaggatgggccctacccttagggactgcctacgaaactagatctagaagaggaggctgtggacattaggaggtggctgcaattgggaagttccagagagcttactgagggataacggatgtaggacaggaggctggcaaagcacctcagtgatagggcagaaggaaataaagtggttagggaaggagttgagagcaggaaattcaggtaggattgatgttaagtcttagatctttgaagtgactttctctggtctggcttttgctgttaccaaagtgaattattcataagtgcatatgagaaatgctgatgtaactcgattatgtggaatgaatttaaattcatttaagtcattcttttccactaaagtaagctttccctcatccagaatctgagcagcccgatagccaagcaggagtttccttgtgccatggccagtgattgatgtcttcttctatgatgctgctgaaatgctggggactctgaagcgcagctggagtgatcaaagcaaaattaaaatactttctcagtggtttgggagttgggtgcgttctgctgtattttttggttttcggcatctgggtttggtgtgcatgcatggtgagctctagctggagcagacgttacctactgaggctacgctcttcgtggtttctccttaaccatcacccacttgatcttccatgaagccccccaaatcttccttactgaggactcttgcttccaggttgcttttgtgctcatccattgctgggttatttggtcagtgatgatggtttctctgtactttttatcagtaggttcagaggaccttgtttactcctcattcatctctctccccaaacagttgagaaaccacttgtgggttaggactcatgctttgtttataatgtttgattctccaacctcacagctaatgggaagcccgtggaggagatactctgtaaaaatccatctcccatgtgggcttgaccccacttagtgtctgagtggtttggtcctcatagttctcttgggggaggaggaagggaaggaggaggaggtggcgatggcagtggcagcagtggtggcatcttggaccagagtgagaaatcttggaccagagacaaaagaggtcttctctcagggtagtgcaccatgagagggagcacctgtttacattttgtatcctggacaccaatcttgccttgctctggtgctggccctgagaggtgcaggaattttataaagagatttacaaaacatttttggatgaccaaattggtccctggttctagctggaatgaataaacaaactaaataacagtagagtgtgagagtaagtgtgtgtgctagagaatgtgtgcacatgtatggcctaggtgagttcttcactttgctgacttgtgaattatttggggtcctatggtcctccccatcattcttattcatgtcagtccaccatcattaaggaagtggaagcgaacacattgtgtacatatcactcccatagagagggagactggggaagaggtttgagttataagtcgcacctaggttaggtctggatgtgtctttgcaggtttccttgctagttccttggccagagtttccatcgtgtccctcagctgcacaattaaggtgcccccgttttgtgcaagtctcatgctaggcagtatgagatgacacaaactaggattctgttgtgagataagataaaaacacttgacatttaaaagagagagacaacttatgcggtgtgacgagacactctacgacttttgccagaagagaaatagaggcaacaagtgctaggagctcagaggagggtaagttccacatttggaactttggattaaaagaatatttgggtctggttgaaatcgaggcctttcatgagaaatgtccacacttgctcagtactgtttgccgaacactgtatacaaggccctcgactcgtgaatgagttgtaatgcaaaactttgccaggcatttggaatgtggagtatactattttgtaaagatgaggtctgaatggtggtttaggtcccaggccagtgtccctctgccccccacctccatatgtgccctcaagccggtttggcttagacattatttatctctgactactgtgtacagcttagttccatggggaggaaaaggcttgatgaaccctaccctggaaggctggtggctctgttttctgatggatgaggtaggagtggtggaaagctggtagtttctactttgtgcctgtttaaaaagccccctctgaggccttagcacttaacagatgttcaggattgggggaataaaggagctgcctttgcagaggtctgtgggcatgcagtgggtgagagagcaggcactgagtgccccgagtttcctgcctgtgtgggcaggaggattctcagtggaatcaggagcatctccgcctggtgctggaggaggtgtggagttgaaggtgggattcttcctcttgaaggacttgaatgagtttctgtgtggctgaacagaaactggttcaacacccatgtcatgatttttgtgaagcgaggacttggggtcccaagtctaggttttaggttccctgctgtaacccgtggccaccgagagagagttttatgataaaatgtcagcaaagtacctgacaacgtctcacgctagaatgagtttcgtacatgtttagttccctctctttttattccacgctcccccaccccaactttaaatcagaaacgtgagggtgctgattgaagctttttataacttttcttattgagaattgttctctggagttgtctccaagaacaaaggaattccagacgttctccttctctccttgtctcttctgtcctccagtcaaagaaaaactctgcatatgatctttggcctggagaaatattaaatctatgttaagtatgcagacatgaatgggcaaatgaaggatttgtggcaaagaagatctgccgaaacaaataagtcatgtaaatgggcagagggaaatattaaattgattgcatctttcagctcctggtacttaatgcaaagataaagtagtgggaaaaggttgtcatttgaaataatggaaagatgagggagttttgaagctagctgggatttttctgcctgttaatagagtgacttggattacagactataaagataaagagtagggccgttgcatttagtatggatcatgatgctgattgctgtctgagcaacctctgtactaagggaggagaagctaacatccccgggcctggaagatactggatactagctcattaaactcttgtgagaagccttcattagcattatgggaagacttgctgtatctatattatgaaggcatttagattttttttaaaatgcatgttcttaacattttttgtttattaagtggggcagtagattaggactgaatggatttgattctctcatcctacatagtgtgcccagaagccagaaggtttcccagaatttgtattatggcagcgagggcaaatttaattagcagataggaaaagctttggagcagtttaggccaatccatttaattgtatcagcaattaatattttgagaaaatggaaataattaaatttacatttcttctaggactttattttgttatcctttaaggttattgtaaatgaggagacttttgaactcacagactaaagcaaactacaccagataatcattaactttttctattgtgtgccacccttcccaaccagattgttccatagtatcacttatgaaccaagaacctgtgagcttgcaaaacgcatttttaaggagtctcaacttttctgatttgtgttaaagtttaggtgtgggtcccagaaatgagtttcatggaggggagagcttgtctctctgggtgggtaatacaggggccactgggggctcactgtggctttctggcacagacagttatgaagcaggggttactaaagtgggagagagcagccagttctccagcagccccagtgagagctctcatggatctgcctattgcactggggtaggagccatcaccgtcagcttttctctggcccacagtgccattttctgattaagctgagacctctgtaatagacacgttgtcattttttcttgtgtctaaaagtttgcttgactgcagtgggtctccagctcagagcaggtctggctagagaaaacaggaggtgatgactggagcactttgcccttatggaacgtgctctgatgtagaaagcaagaggattttccttgcagtcactgaaggtaccttgtgtacacagaaagaagacagagggagccccggatgcctcggtatccctcagagccggatccttcagacctgtgcagtacctgtggatttggttagtcgatgatgcgctgccattaaaacaaaggcatcggccctggaatagagaagttcagtgagaacctctgtactccatgggcattttctaggaaataatttcacctgccctgtgtaattctctggaagaatcacagtgagttggaaggaaacttaagacttggaaaaggattgagaggttagcccagaccacaccagggctctgaaggcccagctggggttagaacctgggacaccctccagcccactgtctcctgttccctggccatttactgccccactcccctttctactctcaggggccctggatctaatgaggggattcgtgcagtttgctgcactaatacattgcaagtggtgccaacctaaaggtattctgatggtggaatcagagcagtagcatcttattaggtcagaatctgtatctcctcttccaagatttttacatgatttagtgttttctgaattggaaaaaaacaaaaacaaaaacacacaaaaaaaccatgtctaaatcctagcatttcatcccatgttgatgaaagggcatcttttttttcccctaatctgtggttagaactctcagaaacttttagaagatccctcctatgttttggaggtttgcagatttgaaccccagttcctcccacagtgcttctccaactcctggaatgaggtaaacctccaggcagcctgttgacccaacccatgcatgccggtctttgggactcctagatgtggaccctggagtgaatagggatcaggtgggaaatgagttcctttgatgaagatccttgtaccagtgaactgaccccactccccgtctggattcctgtggtgattaccctctgtattagtctgttttcatgctgctgataaagacgtacccaagactgtgaagaaaaagaggttttaattggacttacaattccacatggctggggaggcctcagaatcatggcaggaggcaaaaggtacttcttacatggtggcagcaagagaaaatgtggaagaagcaaaagtggaaaccctgataaacccatcagatctcgtcagacttattcactatcatgagaatagcacaggaaagaccagccctcatgattcaattacctcacctgggtccttcccataacacatgaaaattctgggagacacaattcaagttgagatttgggcggggacacagccaaatcatatcaccctcttagcaaggactgtgttcgtgatcatgactggcattcactgaacaatgactaggtgccaggcacctcgccagtattctttaatctttgcacagtctgtagggtggatatggatattactgttccattttttgtggaagaggaaatggaggcaagagacctgattataacttgtgcaaggtgccatgcagctaagcagccagcccaaatccagacctgctttcctatgattttcctgcccattactctcccatcgtagctcacctaatacttcctagtgggctgctgctgaacacacacccagggatgacttagtggcttgtcttgctctgaagaaggctaggcaccatgttggatgagttcttgaagatgtcttgctctagtcaagaaacttttaaatctttggagtttttgtccacatctgcctagttcttagtaaacatgatgtgggttctattagcatggcgccctccctcccttcctaccacctttatatgagcggagaacatctatgactcttatgagaaaggaaagatgaaaatcagagtgacatagtatagttaaattgcagatgcttaattataaaacagcttgtttctgaattttaattccttgcttttctctgactttttaaattcccctccttaggcagaattcatttttacattgatgattttttttttttttttttttttttgagatagagtcttgctcttgtcaccccggctggagtgcaatggtgtgatcttggctcactgcaacttccgcctcccgggttcaggcaattctcctgcctcagcctcctgagtagctgggattacaggcatctgtcaccatgcccggctaattttttgtatttttagtagagatggggtttcaccatgttggccaggcaggtctcgaactcctgacctcaggtgatccacccaccttggcctcccaaagtgctgggattctaggtgtgagccgccacacctggcctgatgaattattttcatgtgtggaacaaaactttgatgctgatcagtgattaggtacctttgtttggttcatttttaactaaggagatttctttctttttaaaaccattctttaatcttgtaaaaatatcatttaatgggtggatgttttagctgtgatgaatgacaggttgtcgtaaaggaagaaaggtatgtggtttccagtaaacttttaattcttttgcaaaataaaaataacagtcgtacagagagtaaaatatatgaagagtcaggaagtgatttatcaaaatcagatcttggactgctggttttaccatgaattaggctcttggaaagtgattgggccagtgtaggtttacattttttttttcttgttttatttgtcaaagcaaacttgtggttgcctgcccgtagtttaattctgcctcctttgggcaaacaaccgacttttactgggagtctttctcagggagataaaggtgcaccctgaaactctgctctctgattcctcagcaaagtcagtcctgagtatggggcttgggtgtctctgcaaggccttgcaagtgagatgggctgtcacctgagctcaggtggggctgctcctgccttggacagcctccccagcttctcctgcattatacccaggggctggagggcagagagcaggtcttcttctgctggtcggggcagtcacaggctttcctctcggcctgcttgtcctccgggtgggtccagcacccgctgggattcctgtgggcttagtcactgtgtggcggcggcagaaggactggggaaaccgccggccggccctggtgcgctgtcaccccgaaggaatgcgggccaggccggggctgctgggcctggaaagttctccagtccctgttgcggatctggcctgccgactcaaagtaaatctctcttcccctttatttcccatcaaataaaaaaggaacacgaggtagccactgtactcactgaagatgcattgttttttttttttttttttttttttaagcgagcagcagcaagatttattgtgaagagtgaaagaacaaagcttccacagcatggaaagggacccaagcgggttgccctgaagatgcattttttaacttgctttttaactaagtatttttgctctgagctttcctggatctgtaaacacacccccagctattcaagatgggcttcttggtgaaaagtgatgtgtcctaggagaaatcacgcctgttgttgccgctggccatcacagatcccggtgcctgtctgtgaaaggctggccgggctgggtggggatgagaatggtcgggttgtctagactcagcctggactgtctttgactggaggggcctgagctcctcctccactgctcaagaccccggttaaggggacagcagagcagggatgagaagtggccctcttcacatcacctcccagcaagagggcctgacttagtgctcccaccattgccagccccagtttcagggtcccactcagttgtatttgaataggtctcatgacatgtgctttgcttgaagagcggctattagcagcagacgttcaagaggctgagctcaagcaggtgagcatgttctgagccattgtgaacccagtgaggtgcctatgctgatgcccagggccgcctgggcggggtcaggcccccatcgcttcttcatcctagctctgggagtgcattctgcactctcccgaggccagctggtggcctttggtgatcaccctctctgtaagtttttaagtggcttcctttcctctggtggagaagccagcacctttatcctatgacaagaaagctctttgtagtaggtggtagtagaatcagacagatctggcttaaaatcttggctgtgctacctcttggctctgcacattggtgaagagaatttaccttcctaaggcctctcagctacacgactgtggacactcagcttccttctaaggtcgttgtgagaggtaaagaaaaggggttagtccagggccagacatggcacaatgcctcaatgaaatattagctgatactatcgtaatttttaaattcccataggactcactgttaaaggattacaaggctgacacaaaaaatactgcattttgaatttgtgtctgatttatacatttccaaagagtggaattctcactacaacagctgttctttgaaaggttagatctttgttctgagataaattaagtggaaaaaggtgtagagcattatatgtactctgattcttcagggcttaatttaaaaagagcatgtttgctggtgaatgctggttcaatcattaagaagtttttgagaaggaatcccagaaagtaataagcacttatttttcatggaaaggaaccggaagtgcttggtgacctccacaggtaatcttgtattatttttgcactgtttggaattttttaaccatgtgcttttatttcttctattcttttcaaaggtcagtaggtgttatctggacaatagggttctggtctgttttctgttttcttcattgtactgtgcattaagaaaaaccctaatgtgcttttttttttttttaagtgaacctttccacatctcattgtccttcagtgagagcaggctgtgtgtgtggtcttggtgaactgtcccgttccctggagacagtatctgggggcctccctgcccttcccagtaagagctgggccttcacaggaatagaggcctaggattcgccttcatcctcttgaagagccctaacagtaggtcctggctggggtctggcatagaatgcccttggcacgatgtgtgtgagtgtgtctttccttagtaaatggccttgaaaatgccatgtgcttctggcaggcctggataaggtttgccctgcataacccttggaaagcacagttctcacttgtaacaccctgtctgcaggtccatgatattgtaattaaaaagttatgggatcacaagggcctatttaaagggcatctggtctaaaggcacagttaaaagcagaatttgtgtcagtggctcccttaatttctcaaatatggttctgtttctaaattcatcccactggatgtctgtgttgagttttctgttgatgaaagaatgtttaaaaatgaggcagatccaaattctaatgtctgagtgtaccactgcttaattactttgggcaggtcacctcacctctcttggaaagaaaggtgatatactacatctgtgattttcaatttttttttttttaactagacccacagtaaaacatagatatacaccatgatcccaggacagaataagtatataactaaaataagtgttttgaaatcacttcttgtctgacacagcactcacgctttctattcatgtagtaccacgatactttcttctattctaatgctggtaagagatgccttaaactgattttgagaactaccaatgggtagcagctagcggcttaaaaaggatgttattaaggtccttttcaccctgattttgactctgttggctctcagctgagtgccccatacttagtgcacatagagttggcctctgaggtcagcctcctgttttcctgtgaaaatgaggatggaagagagtcacttgtttccctccttcatggctaccccctgaggactgggaagaatttaagaatttgagtatatgttcccaatagcatgatgtgtttcattgttcatctgtaagcatttttaaatattcgagatctgtatcttgggtaatttttatcaactttttatttgtaaaataatttcaagtcagttattaaagtaacaaaaataatggcaaacttgataccttcccgtatttttttttcatatttttccttgaatgcttacaaaaatattaaagaatattatcacatcattgtagtcaccgatgaattattttctggtggcttatgattagaagagcttgactcggagtggaaacagataacatttgagtgctctttctgttaattcatccttgtcaataaccccattagctaacttccagcaaggctgtgttaggaatgtggaatcaattagatgaattttgaaaataacttggtctgttctaaaaggccctatgagattcaaactgttgtggcctggtgcctggtaactttgatggccattttgaaatgttaccgtagtgataattcttctggaatctcaagtcattaaaagtgatatggctaactctgggccctgtgctataaaaatagatgtcatgggatgtgtgaatcctttcttcagtgttatagttaatagcaactgaaggaacgttttggtcaaatcccgaatacttattaggggctcactgcttggctgcatttttctcctctgcgtaaatcatctatccatgtaattattaacccctaagaatgaatagcatttttaaaagggttccattttcccctcatatgactttggttcattctcctccttgtttctgtctctcagtgaactttccaaaagatgggttatgatgaaagatgaatcgtcgttgataactgctcttacttatctgtgtatcgaaactgcaggtagtgctcttcagctctgtggctggatttagtgcctcttctagggaggggtgggtgttggcacaaagcgtatcccatttccctgaatgtcgtgtggacacgtgagaggacagtgcaccctttgggcttggtgctgcccccttcacgctactgaaccccagggtcataattaaaagctgtgttagctcttctctggttagaggcatacaggttggaggcttgtacatagacgtgagccggttggtctaggccaggaagcaaaccattggaaaatgtggttagcagtgacagttgacagcatgtttgcctgcagtagtggtggttggtgctgcgtgttgactggagttgcttgcattgggagagcctgacttggccaagtgtgtagcttgagaccagttggattcctctcacagagacagtcttcacccccaagctctgggtgttgggcgtgcagcattcgtattcagcaaacatttgctgatttccgcctctgcaactactgagctcagctttggggatctgaagatgaatagacacagccacacttctggggaaatctccctgtggggaggctgacatggaaaccaaccaaatgggagtgtggtgcatatcttattagagctttgtgcaaagtgccacaggaagcaggagaaggggtagattggtgtggagggggcaggggaagacttgcctaggagcagggcctcgcaggatgcagaggagtttgccaagtaccagagattgtggggtaggtgaataaaggctgagtataaggataagtcaattcaggcagatgtcctctaagaatgaaggtgagaatgctggcggaaaccagttgtggccctgtctgccttccctaggagactggacctgactttacaggcagtgacggtgaagcagggcagtgccacgagcagatctgtgtttcctgaagggtctctggcagctgtctggggaaggagggaagctggcagagccgtgggtggaggcagatgccattgctatggagtgagcatggggaagggggtcggaggccttttggagatagatacagcaagacttggtgaaggatgaagttggggcaggtagaggaaaagcaatgagcttacggatgactggagactgactggagaagatgaccacccttgccattaactaggataggaaacaacaaagggtaggagtttgacaggggagaatgtttgtgctgttgagttgttgagtttaggtgcttgtggcacgagcaaggggagtgagctggtctaggaggtttttggaaacactgacctggctgcagagagggagatcctgggacacctgttttgggagttatcccagtggggaaggatcactgggaagggggccacccctttgggaggggtcagtgggacgactcccaagggaagaggttggttatagggagttaaaagaaaggagcacccctcacgcgagcccatttttcaaggatacatgtttgtcttttagattctataaggagtagctgctacacagaaagatgtctacgtgtgggtgaacacctggcgtatcccatgcagggaggcttcagcagaccttggtggcgatggaaccaccacagtgatccgaggattgggtctgaaggctcctccgagtctccaataaaaggggttgttttgaagggctcaggttcttcctgggcttttttgggacagtcttgctctgttgcccaggctggagtgcagtagaggcaatcatggcttattgcagcctcagcctcctgcctctgggctcaagtgatccttctgcctcagcctcctgcgtggttgggactataggtgcatacccccatgcctggctaatttttaatagagatggggtcttgggctcaagttatcctcccacctcagtctcccaaagcgctaggattacagacatgagccactgtacctggctgagaaggtttttttttttttcccccttccaaacccccatgtggtccagacgaggccagaggatctcaggggaattccctctccgaggagcctccactgctattgcatggcccccagcatagtcatttgagtgaagagccctccaaaatcattaagctgatttgtagaatcagtttgctgtctgactacctgatgaagatgagaagtggtagacctccccccactgtaaggtcttaacaagatctaggtggaacatgggactgtttgcaagctacttctgtttctgaaatcacatgcttgggatcccaaataatctactgaaagctgtcttcgggaggcaaagcccagggatttgttttgtttgcccctaatcatctcttccatcccctttctcaaaagtcttatatctagataatttagtacatttgatctactaacagccagggccataacaggagctgatattacataccccggaagtcctttgcaaacacactgtagtggcgattgattagtgttccgagccataggtaacattagcctgcctcgtaggaccctcagatgctgaccgtatctgctgcaattcttagatgtaaaagagcgcgcatcgtataaatcaaaactagatgattattttcatttgaaattgttgttgcactgtaatttctcagggttttgtattttccaacagtggtgtcacttaatgggaagatcgctcaggctttgtaactgggcataataccaggtattctcgtttaggcattctgctcagtagtattaacctgaagccataggacatgccaatgtttttttccgtgttttttaaaaaaattaaaatggttggctacaaatgcatccttttttacttcagagtaagtcggccttggttaagtcttaatatttctcatgcctatttttttttcttcaaatgaaaacatacggagagaaaatagcatgtttatgccttttggttgtacccagcactgcccagaatggcttacagagtttatacccatggaggtttcgtaaaggtgacattaacttcgcagtaaagtcactgaccccgaacctgtgtcacttcaggcttagccaaatgctaacagagcagctcaaagcttaagcagaggtatgtgcttgctaagtaagtgtgtgttttggactaattggtgactaccattctgaacattaactgccctttgtgttttaatgttgccaggaggccgattgtgtaacctttggaggcttccctgagtttggagaactgaattcatgtggtgacttcctatttataatgtctttgggggagctatgaaataacttttcttctaagtgtgatttttgcttttttaaaagtttttatgttgttgtcaattgggtatttcccttctatgccaagacgaattgtaggttcaggtttctatgcagcctgtatgtaaacactggccctaaagaaggactctatcactctactttcagtttcttgcattaaaacaagtatgggtagcggtatccttcttatttctgcttcctggtcctgtgtgagaccctgaaaggtcctaatggcagtgctgattagattgtggccagggttcacccacaagttccgaagctggggaaggtggaagtgctgttaactgacttgtcccatgtctggggttttgcagcctggggagaggtgaccacccctcgtttcagtccaggtagggttttatgtccctgtcaaaaatgtgttgtgtgaagtaccttgactttcatttcccagggaagaaagcccgtttcaattggctcaagcggaaaagagcactgtgggtccacttaatggaagagtctaagagtggcttcaggaagtccactgggggctccccgtgactctgcccacctgcatattgtcttcattctaaggatccatgtggtagcaaaagggttgttacaactttaaccctgcatccccaccttcaggttcagtacccaagggtgagcaatctgttccagtggcacagacctgtttcaagaggtctctagccgtgatagtgctaggccactgccctccaccagtgtgttccagagaaagatgctctgatgtgccagcccaggccatgaggttcccggcctcagtaaggaagaaggaggacaaggtggtcccttaggagaaaatgtggatattcaagaaagagggtcgcaaaatagcaaacacccactatggctgggcagtacagggttgcagaaatatattttgatgtgtgatcgcattggagctacttcaaagagcaaacacaccactttgatttatttctcttagtgatacagtatttagagagggagatactttttatcttcatgggatacttacagtggtgctctagaagccatgtactgcttctggcttctccttcctttcctccaaggctcctcctgcctcctcccaaagctctgtgccctgaaagagccttgagccattgctcagatgtcaaaattgtattaagcagacacatcaaattaaaacttttgggatcactcaccaatatggtttcctgtacagtactgccctgaggggggattacaagtagttatgcatccatttcattgatgtatcatttttattaaaaagaaaaacaatccaaccaagagaggaagtgtagccagctgcctaaagagtggcgatgatgggagatgatattttgattacattaatccatatcctgttagttcactttgcttctgtcgctgctgctggtgaagttactaatgtgaactaattacatttgctctgaaaagccagaatttttaatgcatctcagcaagaaaggttaatattatcaatttaacagcatgaatgaaacattgtgtgtattgaacttgaactgtcctaaaagcttggataataaaaacccagtggcttcttttataactcactggataaacagttattggtgagacatggataaggctttcttctctttcagttttatggggggtggtaggcagtcagcattagatgctgtctgtttacagggtgatatcgtaacttcgtgaaattggaggccacatttaaaaaggcactccttccttttaaaagctttgcaagggggctgcatatattttcctaattagtgggaatattttcttttttctttttttttttttttttttgagacagagtttcactttattgtccaggctggagtggagtggcatgatctcggcttactgcaacctctgcctcccgggttcaagcaattctcatgcctcggcctcctgattagctgggattacaggcatctgccacctcacctggctgattttttgtattttagtagagacgacgtttcaccatgttgcccaggctggtcttgaactcttaagctcaggcaatccgcctatctcgggctcccaaagtgctaggattacaggcgtgagccaccgagcctggctggtgggagtattttcaaagagaacaacaattcaccacaccccaacatggtaacagtctttttgttttagaagcatctgtgaattgccaagactcgtagaactaagatgtattcaaagtcagtcgattttctggaaacgacccagtccctgaagatagtcttttggggagttgagtgttttgagagggacaccccctctacagggacttaaaatggaatggctttttgtgtgtgcacatggtacctgcagtgatttcttgtgtttaattacttcctgcactcatctgacttacacagtggtaaacaatgaggatgggaacaggcggcagctgctctgtgccatccaccgtcttgggaaccccagcgtggcattctctctggggcagcatgttgaagtgtttggctggtgacattttggtgaccagttggctcctcattgtctttcaatgtggagattaggaaccgagcgaggatttggaacccttgcgtttgttctgccaagaacatgacttgcctctggcctgagagcagtggagtaagctgataggagctagaaatactgttttgggtaggacttacccaaaagagtgggctgagtcacagaactcccaagtttgagccctgtcaaataaattctgaattgttctcaggtatgtttctcaattggaatttttttaaaaatttaatttaaaaaagacttcgaaaagttaccttgttctcatttttcttctccctctttgccccgtccccacaatatcttagggcgaagaaaagcaggtttgagaaaagctttttttcatcatgtatttgtaatagctggagcctgctgagatgatgaggtggagtggagggagaaagagaccttgaggaggtgtggagggggaaggggtggaaagttctgtcgtcttctgtgcctctctctctctcttgctcagggtctccagtcagccctctgggtttgtgcccttcgtgctgcactgacaggtcaaagccgactcaggcctttgatgtctgctctaggagcaaaagtgattcctggtcccgcagccgtttccactgccttgtgtatgaaggtctgctgctctgaggtggatggtggctctaggcaggctgtttccgctgggtgcggttgttgctgcaggtttttctatatagcttggtcatgctcctgtatctagattaaaatcctatgacagatgggcctgcttatatctaaacttattcagagagtcttatgataggcaacaggttaccctttaccggggtaaaacatggtttattctacagtttggtcccgttgtaaggccaggagatagagtctcactagtttgccccggctgaactcaaactgctggactcaagggatccttccgactcagcctcccaattagctgggactgttggtgtcaggcacacaccaccttgcctagcttgaagatctttcttctaaatgagcgggctttaaagtgatcagtgggacctgggcaggttggctcttgcctataatccaagtgctttgagagaccgagacaggaacatcacttgagcccaggagttcgaggctaaagtgagctgtgagcacaccagtgcaccccagcctgggcaacagagtgagactctgccccaaagcaagataaaattatcccacaggattttagtcctgacttgtgtattactatgcagttgtgtctgtgtgaggctcagattcccccccatttaggatttgtgtggctaaatctcagatctcattttcaggtgaatttctctattaaggttataaaagaccaaaataactggaaattcaactctgtacttgaatacttggtaatgcccagcattctcttgactatcccatttcacagtttgccggtcatttccccagtgtactcactggattcttcccgcagccatgaaaggtaggtataattaactccagtttacattcaggacaatagaatgttcgtcaaaatgcttttgcacatgttttctcaccctgagtggctacacttgtacagtcataccctccaaactctaagatgtatactcttacataccaaaacacaaagaaacaacaggaagtaagaacaaaactcaagaggtctgagtgacatcttgccttgcttcacaacttcagagtttgcattgctttaaaaacattggttataagtgagtgtggaaacagtgtgttcactatttttatgctgtggctgtgctgtgcaggagctgggcttttcgtgcattttagacagaattgaccttggttaatgcttgacttgggaactatgcagaaacatccaggaagtggtggtggctgatcctgaccgtcctcagttttgtgaagcaacagcctctgtgcctctttctctgcatgctctgttgacggtctagtcttgagagagaacctgctgctgtcccgtctgtcgtagccttcctagcaactcttaggcctgcatgctgtgttttcatgatctcccccaaagcggcactttgatgttttttcagagtcaaagtatcactgtggatatttatcccaaacaaaattgcaaactgatcaaatgttatgtcttttgataccaaatcaaaaacgattcttggtggctgatcaggttgtctcctaaaaatttgccttttgaacctatactgcctttatgagatgattatgaaagtagaaaatagcctgtgaaaaatggtacctttgctaaaaagaaaaaaaaattttttttgaaactaagagtctctgttgtccaggctggagtgcagtggcactatcttggctcactgcaacctctgcctcccaggttcaagtctcccgagtagctggaactgcaggtgcacgccaccacatgtggctaattttcatatttttagtagagatggggtttcaccatgttgcccaggctgttctcgaattcctgagctcaagcagtctgcccaccttggcttccgaaggggctgggattacaggcctgagccaccgcgcctggcctgctgtaagaaaatattaaacttaggatgggaaatgtgatctgaacaggattcctgtgaaggtacccagtgtaggtcttagtctcctctccagtgtacatttatggaggggcaagatttcaccattctgtgaagaactctgcgtgttgacgactgctcacgcctagggaataaatttcagagcatgcgtagatagtgccattttctacttaaaatactataatccattatttacttcggaaaataaaagcattaaggctgaaagttttgggttagtaatcttgatgttttaaaatgccttagcattccttcatttgttttgcttgccacgtggttttgctctgatttacacacctctgtgcatggctaatccactgtgccactcttggggctttattaactcttctctgccagtttttcccttagagaatatcatggccattctctaagatgataaatgggactaagagtaaatgcaggctgaaaaagcatttaacaggtcaaggatctgaagcttttaagaaggcaaaacaataaataagaaacccaaacagagtcttgaagcacacccatcgaaacccaagtttcagaatttgctgcagccttgctgccaaatcacagtaaaagctgaaaaggcttttgtggttagttacgtgtgatacaagaaatcgatgtgtctgagagaagtaggatttctctttttgagggggaaaaatacagcaaggggaaatgttttattaacaataaatatgcggcttaccatatctgtagggcacagatttggttagtagtattttgaaggcaggataaaggaagatcctaaaatctctgtgctgtgtagcttccattcgagctgcacatgttaaaaacattctaggatccacacagtttaaacaaggtggctggcttaggaaatgcttctccccattccttggcatccccacaaccctattctcctactttctcttatgtatctggactggcttttaaaagatatttagtgaaatttaattttctagggaaactccactttgtcaaaagtgtagtattcctcaaggatagctttgctggtcggcaaatctcagttgagtgtatttgtggtttaaaaaaaattctttctgaatagaaatacaaagagtgataatgtttaacattttattttttaaaaagctttacgctgtgtaaattgtgggttgacttcatgtttctaaactttgtcttttagaatgactctcttgggtaaattattagcagacactctcgtgttgacatgtccattttcctttccattaagctgtctccattgcagttctgttgatatggctttatatagttttcctgagcttttttttttttttttttttttttttgggaacaagatacctatgcaagctgaaaaactcttggctttttagtttgtatcacttccagaaacttttaaatgctacgtatagaagtggctttcttttagggttaggtaagatacttccttttttggaaatagttttgccatttggtctcgctgcctgatttgtgctttttcttcttcagcaggtagtgggaggctgtgtattgtattgccttttaccagacacccagaggggtcatgttggaaaatagcatcctcttagcaaaaacacaatcccttctctgagaataaattgccaagtctttccaggtcattgatggactctcaggtgctgcatttctgcacgtcggggaacaagggtgaagaacagagctagtccagcactgctccgtcctcccgcatttcttcttctgtagagtcttttgcaaactagagagtcttgcagagagttgttgggttttcccaggagatactgtatgcaaagaattgtcatgaagacataaaatcaagtcttggtgtaaaacttttaataaatttaaaggcatgtctctgtttttctcctcctctatggggattttcatgtggttagtaataaaactgtaggcagttgtatgtctagatttctatgtaatttgtttgtgttcgtatatgcacacctgtatacatgtgcacatgtattcaagaaagacctgcagtatgcttgaaaggattgaggtgcctagtttgtggtagtagctgaacagagtgggaggtcaaagttaagtcattgtgaggcaagggaacttgacttagccctttaagaattggtctgtccctgctaagccaaggctattagtgttttcttccctagctgtgttctgaaatggttcacctgacattcagctgggttgggggagaacctctttaaacatcagatcttattccggaggagtgtatccagccttctcacagcatatcctgttaaatatctgttcaaggttagcctaggcctggagtatggacagcatgaagccagatctaaaacagatcagttcatggataaatgatgaatttaataaaatttgaaaataaaccccacataactagtgctgctattgatcattcatatagccagcaggagtggtgagaggcttggtctgcctgaggtgtggagatgcttgtggcggggggcaaggtggacgagggctggggctgctcctggagcatctttacgcgggtggaggagctctgacacagtggcagtgtttgtaacactttccaaagggattaaaataattctgtagagttaaccctaggctagtgtggcttgatctgaaacagtcccagccagaaggtaagaactcctgtgttatgttgttagcatacaatttgctgaagttcacattttaaattttatatttaaaaaccaaaaagtagtactgatcattttggactgtttcaaagtgatattgtttttacttgttacaaacattggcttgcctgcatctaattgcactcacaatgggccggatgtggtggcttacacctgtaatcctagcactttgggaggctgaggcgggtggatcacctgaggtcagaagtttgacaccaacatggtgaaaccccgtctctactaaaaatacaagaattagccaggcttggtggtgggtgcctgtaatcccagcttctcgggaggctgagacaggagaatcacttgaacctgggaggaggaggttgcagtgagccaagattgtgtcattgcactccagcgagtgcagtgtaaatcccttaaggaaacagtgtgttgtggtaatcgtgatatcatagtaaataggttttgttcgttatttttttcttttacttccttttctaccagtgactagtcctaatgtgttctaacttttgaaaataaagtacaaattagatggatttaaacatacgggaagtaagacggaaattcattacttttaaaaaacaatttgttgtggataagatttagaaatggaaacacaataaactgtgtttccatgacacaggtatactaccaagttcttacaatgtacctttgaggtaacgaattttcatgtcatttggagtagggctgggccagtgagtcactcatctccttgttcattcattacgtgaatacctagtaaatgcccactaggcaccctggagtcatttgtgtagagtggcatctctatacaactgttcgactaactgtcggagacaccctaatcaccccagccacaaacaaatagaacattgtatgtgtgctgaatcccacaaaggccagacatgatgccatgagaccaagaaggaaaagaaataatgtggaaagggtttggggtggaaaggtggggaacctggaggcgggccacatggggccccagaagccatgttgagggttttgtcttcaccaaaggatcagtgggagattagtgtagaacattaaacagaggtggggtatgtgtcatatttccattaaaaaattcatcctggccacagtgtaaagaatagattagggaggaagccaatcaggaagcaattggagtaggcaatgcaaaaggcaaagtgaacttggactagtggtggagataagttgactgcagagagagtaggaagtaaaattggccaggcctgtgttgggggtgggcttgtgagcaggatatcaaagataatgtccaggattctggcttggatgacaactatggcaatgcccattactgagctaggagatgctggaggaagatcaggtggggactgtgagcatgagtttgatttttgcagatactgggtttgagacacttctgagtcaagcaggcatttggaaatgtggactggtgccgagaaggaattcccagcagtgacttggtttaggtggtcctggaaagtagaaacacacacgagataattctggggatggagcttaaagggacgtcagcgttcaagggccaggtagaggatcatgagctgtaaagggacccaggtggttccagcacagcgaggaaagcatgcgagtgtgatggccaggcttccagggagagaggagggttttaaggagaacaacgtgctaaaagccactaagaagccaagcagagtgagaaatgaagacctccactgggtcttgcaagaggggaggcctttgaggacctcacctgagagctgatgaatgaagtgatggctggaagcagctctggagagggaggaatactgtggggaggggaggaactgaagaagtagagaagcatggctgtgcacaggggaggtgggatggcagccagggaggagcagaggtggaatgtggatcttgttttccccaacagagatagaggggggctaaaagtccatggaagggactctgctgagagggaagggtggatccatgagacagaaggggagagctccagtaaggacccagaggtctgaggacaggccaaagcacagatggagggattagctttggatggtaagaggaaggacagatggccccttaaacatgacggtaatgcaaactgctctgttttttttttttcttttggcgtttgtgatgaactttgtatatgctttccctgtttgannnnnnnnnnnnnnnnnnnnttatatattaaacgggtcgtctcagatagcgtgaaatcaggccaccccccacaacaaataagaagcccgggggcgggtaacaagccctcaggatcagcgggcacccccccacaaaataaaaccggtcggaaccccataagccaacaaagacggaaactccttcaccaaagagcaccccaaaaaacaccggcgcccaccgccaaaagcacaagcacgcagtgaaccaaatagaggaacggaaagaggaaaggccacgcatagccccaatgaaaaaaaggcgacgaagggccaaaaggcaatgtggcccgcgcaccctataggacgttggcatgaaaacatggaacaacgcacccccagtctcgatccctcacccccccattagaaaaaggaaacaaccattctcctcacctgagggaaaagggcccctaaccccggaagaggccaggaaacattcccagagtccctcaggaggaggactagtgctgggctcctttcctcctgttctgctgcctctgagaggagccaggattgaatcgtagccttgtcctctgacctggagtctgggagtaactctcttatgacttttttagcctagtagaattgaacatgaacttcatgttttaagggatggttgcatttgtttgaatggtcacttctttttctatcagtattagctaatatagggagaaggaagtcatgcttctcaagtaaagcaacagtatctgtgtatccatttacttgattgagctttctactgaattacaggagttaaattatactttgttacactcttggtattacaaaatgatggccatgcctttattataaaatgacaccagttattctttcctggaggatgtgccttgtgtcactagccgcactaagcacttccccactagtggccccatgtggttgtgtgtcatcgctgactacctgttacaggtgaggaagctgggtggtgcagagacagaaagccggtggcccagtcaggagctcctaagtggcagagccctgtctcctgggttccttctcctgtctttcttgcctctcacttgaaataagagaggacatcagaactggcctgaatggggccctggtagggcaggaacaggacacctctgtggttttgttatgatgtcctgaggataaaggagtgaaaaaaaaatctttgaggaattgaagatttctttatgaaagatggctgaaactcctgacagcttttcaaattcatctttggagaaacttccgttttctctttcctgttccgaggcttaaagctgccctgaaatctacacatttatcaacagtctcttgtcaagactccagggagacaagaactcttatacattgctgttgagagtgtaaaacggtacaacctttatggaaggcaaattggcgttataaatgcgtgttacctttgacccagaaattctacttctaggaatttatcttaccaatacacctgcccacatacaaattgcagcattgtttttgatagtaatacgttagaaataacccacgtgttcttcagtgggagactggttaatacactaagatatatgcacaaaatggaatgctctgctgctgagagaaaccacaagtatgccctgcacccctgtgaatagatctccagtatattaggtggagaaggcaaggcaggcttcttttttgtaaagttaaggagggtaaataagactgcatgtttgcatctgcttgtatttgtgcagactgacactagaagggaaaccaagtaactgaaaaacacgatgattcaccggggtaggtggggaaacatctaggtcgggacaggtatgggagtgacacacctcagtgtacatctttgtatcatttttaaaagtctgtgcttgcattatgtatcaaaacttagtgctatctcctcaggtgcagggttctctggaactctgtctaggttggtctcttggatggcattcttggagacttgccggaaaaccaaacaaaaggtgtgagtgcatgcctcctggatagatgtctttttagtgtaacttagcacaccttgtacactgtcagggcgcctctcagatgagtcatcccggcagcccctgctccatgagtgtcttccccacagtcctgagtgcttctaaaatcatctacaccagtggaggcaaaactagatattttcttagtttgcagaaaggaatatttccagacaacatgaacttgttctcctttggtctccttttccttgtcattgttcaagtcacaaggtctgctgattaaatttccccttgggtttcaaaagaacttgcttgtttggttgttgtgttttgccttttaatttgagagttgaggcccccaggtgcatgtggtaaagaattcaaagggctaaatgggtgtgtgttgttcgttatttctttgaacctcttggcacttgaatggtgtcagtaatttcactaattatggttggcaaagaaactctgacacatggctttggagctgtgttgttcttacatcatatctcttgagttgaacctatgctctcttgatggatgaactcgtaattcaccaggtgcgtggatcgctgtgattaattgtttcaagctatcagttatttaactctctagtgccaaatgttcaggagaaaatgtaagtgcagtgtaatgtaaaatcaagccggcaactccagcaatttgctcttcaaactatagctctatcagttcccattcatttatacacttacactactcaatttgtcgttgttgttgttgttgttgttgtttttgagacagagtttcactcttgtcacccaggctggagtgcaatggcatggtctcggctcactgcaacctccacctcccgggttcaagtgattctcctgcctcagcctcctgagtacctggaattacaggcacccaccgccacacccagctaattttctgtatttttagtagagacagggtttcactatgttggcctggctggtctcgaactcctgacctggtgatccgcccgcctcggcctcccaaagtgctgggattacagccactgtgccctggcactactcaatttgtaataaatcagggtaagttatttttggtgccaagtcgattaattgaatataggttattttgcatcttagattccctctgacgactaaatcttataagcagaggtatgtgagcatgagaactgtgtcgggtggtcctgaagagattagtggattagaaggagatttggagatttttaaaaaagcctctggacagtgagttaaatggtgggttgacactctgtggtcgggactttttggagagtctataaagttctgctgtatttctcaagagctagagagagatgatactatgaccaaatttggtttgaatgtattataatgtactgagtatcactaatttgttgggaaatgactgttaaaaatacttactgacgcttaaaaatatcacctatagcattagtataagtagccaactgatttacatatatttcatgtgtgtgttgggagaggggtgtggattcgttaggccaaagatttcggtaatatatttggaagagataaatgaagataaagagataaattaccttttgaataattccaaaactaaaaatgcttcccttaatttttatttctgattttcttatttctatcagagaaatgtttctcatgtgacaaatataatgctttcatatttacttctgcatgcacaacttttaattaagtattaattgattaattttttagagacaggatcttgctgtgtcatccactttggagtgcagtggtgtagtcatagctcactgggacctcaaacacctgggttcaagggatcctcctttttcagcctcctgagtagctggaactacaggcataagccaccttgcccagcaaatttattattattattatttttgtagagatggaggtcttgctgtgttgcccaggctggtctcaaactcctggcctcaagtgatcctccttccccagcctcccaaagtgctgggattacaggcgtgagccaccacatgcagtccgtgtacactttcacaccttttaatttctttactcattaggtgcattctttagcaattatgtgtaaagtggaaatgagcgtgcaaatcgtcattttctattgacttgcactccagaattggaaaattggaaaactgtaggaaactggaaaattagaaaactgtaggatctaaaacaaatcgcttctatgacttataatattcacttgtagaactcactggcctttgtcagctttcagagtatgtgaacactttttgccatgtaagtagttagtccattggcaatggatatatgtaagttggtatcttcactgcaaacatttagttaattgcgtttattcttgagccattcttgctctacccttaggacttgattttcagtagctacagtggttattccagaagttgttagaattaagagccaggaggaggtactatgtaagctacatttagactccactggacactcacatattgcacgtggaatatcttaaaggggttgtgtgctgtggtcagggtgggaattatctcttttctttccatgagacctccactgtgcattatttaagggcctgtcaattgcccgttattcaagttttgttgttcttggaggacactattgcctatttctttccttgtttaaaaaatttcatttaggtaggcttagcatagttgcagtagaatttaataaatccttttttttttttacagaataaatctttttattacgtaaataccctttaatttgcctatttttaaaattcttgtttctgtgcttaccttgttgttagacagccaaggggatatgctgctctttttagtgccaaggtaaaaggtaaagctgtatcttaaatatttgtatttctctttggtcttggtgacccaaagtgatttgggtcattctgacatttaatcaagtttaaacaacatggctcttagaagtatgtttaccaggtaatctgagggctggttacctggtaacgcaattgagaaatttcatcaagactaattgattaatttattaagcacttattgtccagtttgcctttaattttcatttttctaagtttccattagctatcatggcctcacttgttatttcataatgaatggttacaaattgtttgtgtgtttttgtaattagaatgtaatagcaatcgtctaccagatgagctgacattgtaatgacatgaagtcagtaacaattatgccttacaggaaaattaattctgtaatcctatcatcccatattttgcctaagagattcgatttggctgctgctaggctgcttaggcaggtgacagcatggtgggacacttctcatttttctggttagactacttaaccataacattcatggtgccacctgaaaaaataattttatcgttttagacttttaaaatatttttaggctttttttttttttggcttaaaaaaagaatctgttctacttgggtattttgttctccttatttcttagtgaacaaagatatttgctcgacttctatcccagaaggaccatcctttcttcttccttttccttacctctaagggatatgaagctgtgagagggaattgcatatagcaataccattttgattccagtgaaagttcttacctttctcttttgtcattctcaacctcttacctgaagagtccattccctcagtatatagagcatctggaagtctaaggtgcaggcaggactgaaagagctgagaaaggcctcacatcaggtgacactggggcacctggctgtgctcccttgttggggggtcccttggcctgggcagttttgcgcttctccctgtttccctgtgccctgagactttgtgggtcacaggcaagggggctggcctccctgatcaagggcccttggcctaggagggcccctggatttatctagtccagcttctcgtcgtccaggtgcaaaactgatgctctgagatgtttagggatttgtccaagagcagagttggagccacagtccaaatcttctgagcctagtatggtattctgtcatccttggtttcattttgttctgttcataaaaattgcccaaaactgctgggcaaagtggctcatgcctgtaatcccagctcctcaggaggctgtggagggtggattgcttgaggccaggagttcaagcctagcctgggcaacattgggagaccctgtctcttaaagaaaataattgcctaaaactattcagggttaaaaatttgtctctaagcttaagaatttggaaaaactcagaaaagtagccacctataactccagcattctgagaacagttaagtgtattttcttctagttttttgtttgtttttgagacgggatcttactgtcacccaggttggagtgcaatggcgtgatcactactcactgcagcctctacctactcaggctcaggtgatcctcttcacctcagcctcccgagtagctgggactacaggtgtacaccaccatggccagctaatttttgtgttttttttgtagagacagggtttcatcatgttgcccaggctcatctcaaactcctggcctcaagtgatccacccacctcggcctcccaaagtcctgggattacaggcgtgagccatcatgcccggccttcttctagatgtttaaaacaaacacattttagtgtagttgagcctctgatcgttacatgtttatttcctagcatttaaaagcctttcagcgacatacactccttattagcttaattttttcttttaagagccgtgttcttgctctgtcacccaggctggggtgcagtggtaccatcgtaactcactgaagccttgagctcctggcttaagtgctcttcccaccttaaccttctgattaactaggattacaggtgtgcatcaccacgcccaggtaatttctaaaaaaaaaagttttttgtagaagtgatgcctcgccatgttgcccaggtgtctgtcttgaatgcctggcttcaagcgatcctctcccctcaactctcaaaaggctgtaaccctgattttaatggtagtgtaaagtgacatgggatgaaggaaccgtaacattcttaaagtttccccattgttgggcatttgcattggtcccagttttttataagtaaagaaggctgcagcaaactctgttgtactacttaatctttgtcctttatttcaaattatctccctacaatacgtcccttgaaataggatttctgtggaaaggtatcagtttaaagctcttgacccatatggccaagttgctttccaaacagcttacctgttgagactcggacctatgcttctaaagcctatgtgtgaaatgttcacattgtctttgggagaagcttcccacgaataagaaaaataagggaagaacaaataacataattgtttggatatatgctgtggtttgtgtggacgtctcccaccctttcccttccccagcccaagtcagtcttctgtataaacaacttacataatacagactcttcactgtttgtattatacatgtattttgtgagtctgtgtcagtatttgtttacacgggaattagggcatcaggctgtcttcctagggttcctctgtgcagacttgtagacagtatgggttctttgcgtgctgagttgaggtggccccaaacctttcagacagttgctcagatacctggcagttgctcatttacccttccagaccttcctgcctctatattagccaatgacaagcagatgctttccacaaaacattcgtgtgtgaactgttgacatttatgactgttttctgagcccacaccaggtcatttttctataaaatcagaactgtgagagctcagggcatgtggccatcctggataatgggtcctgctgtctggggagtcgttttcatcaaaattcacttttaaagaatagagtgtttattaacgaaaatatgtgagccttggctgggcactgtggctcctgcctgtaatcccagcactttgggaggccgaggcgggtggatcacaaggccaggagatcgagaccatcctaacgcggtgaaaccccgtctctactaaaaatacaaaaaaaaagttagctgggcgtggtggcgggcacctgtaatcccagctactctggacgctgaggcaggagaatggcatgaacccgggaggcggagcttgcagtgagcggagattgtgccacttgcactccagcctgggcgacagagcgagactccgtctcaaagaaaaaaaaaaaagaaagtatgtgagccttatcccccaaatgtacctgacatgtgaataatatggctcaaactaatgatgtgtataatattaaattgactttgttattataagtgatacataattcaattttagttaaaatgcattatttcaatcaatatcaaatattgcagaaggaaaacctaaaatagtagccaaagttactcagatgagataaagaatatgtttagggctggaaaatcatactttttttttttttttttgagatggagtcttgctgtgttgcccaggctggagtgcagtgacatgatcttggctcactgcaacctccgcctccagggttcaagcgattctcctgcctcagcctcccaagtagctaggactacaggcacgtgccaccacacctaatttgtttgtgtatttagtagagacagggtttcaccatgttagccaggatggtcttgatctcctgacctcgtgatcacctgcctcggcctcccaaagtgctgggattacaggtgtgagccattacgtccagccttttttttttttttaaataaagagggtctcaggctggcgtgcagtggcacgatctcggctcactgcagccttgacctcctctgctcaagcaatcctcccgcctgagccccccaaatagctgggaccacaagtatgcaccaccatacctggcttttttttttttttttttttttttgtattttttgtagagacggggtaattctatgttgcccaggcttgtctcgaactcctggcctcaagcgatccacctgccttggcttctcaaagtgctaggattacagatgtgagccactatgcctggccaataattatataaattttgatataaattcctgctcttcaaggagatgtgggttttttttcctcctgagagtatatttataaagttaattggattttatacaaaagaagcttttgactcatttcatttagcttttaatgttatcatctgggaggagatggtgaagaattctgttagccaaaccatggcgaattaatgtttcttacagatggttttattactttttatgatattatttggatcatgaaacaagtatcttggaaaatgtgagatacaaagatgtgagttgggaggtctctcttgtatgtgagttccttctataacagagaaaggatactttcagtttaagctgagatgctttttccttttcactcttgaaaagtctttgttgcaggaattttctgtgccctccctcctctgggacagatctgcttcttgatactgcagggctccagccttccttccagccagctcatttctcagggaagccttgttttcctttttcagaaaatttaaatgtatatttaacgcacaatttaactccctttcctgttgataatttttttcttcttcatattttgttattaataatagcttacagaatgggatcagtatcaggatcgggaggtaaccaggtctccaagttttccctttcgtttttcttttctgcttttaatgagccttaattaatccagggagctaggctgcagtatctgtggctctccctgatgttttctttctgcatttctgtcttggaggggaacctgaggatttggaagtagagggctctactagtgcttcctttttgtccttttctcattgtccaaaagagtcttaagcgatctccaggaaatcccctgctcctgccaggaatctgcctgtgagtatttgagtgagttgctgctttttaagtaccagttgagaagctgaaggttggtgttgtggttgtgataaactcccaacatgaaaactgaggaccaccagcgttttcagctcacctttgactcacgctggcagctccaggaacactgaacaggagtccccactgaacctttgctgcgttccgaagcagcacagccatggttaggcactgccaggcagctcttggaaaccacagggagggaagttttggttccttctttctgtctttgtttttgagaggaatgagcttggaataaaagaacgctagtaatgactgatttgcaggttaggtgtaaacattaaatcctcataacaggctaatgagaggtgggagaaattatccccattttacagatgaaggaacagaggctcctagagactaaagaacttgctactcaatgaggtcaggattcacacctaggttgacctgaggatagctgctgcagtgctcacccttcctaccttcccaagaaacaatacgcagagaatttcttttctaaatattgtgtgcctagaaggtgctttgtgttatcgaaacagatatatatgtgtatatctggtctctttaaaattctctttaataaaaacaaaaagtgatgctagtgtaaaataaaagatatatatagaaaattgtgtgtcctcgttaatcttctttaggaaagatatatgcatatatgcagtatagttttgggtttttataaaaatgagatcatgctattagtatagtgaatagcctctatatagtctttcgtaacatttttactttttctcggtgtatggatatcaatttaggtcagttgctgcggagtttgaaacgagttaaaatttcagcagttcacaaaatggatgattcatagtttagtcgagccatcatctgttgatggacagtcatgtggtttcttgttttttctttctctgtgtttcactaatgaaacaggattacagtaaattgactcgtgtatgtgtatacatccatctttgctggtactatagaaaagtgtattgctggctgggcatggtggctcatgcctgtaatcccggcaatttgggaggctgaagtgggtggatcacctgaggtgaggagtttgagaccagcctgaccaacatggcaaaaccctgtctctactaaaaatacaaaaattagctgggcgtggtggcagtggaggctgaggcaggagaattgcttgaacccaggaggcggaggttgcagtgagcctacatcgtgccactgcactccagcctgaatgacagagcaaaactccattgcaaaaaaaaaaaaaaaaaaaaaaaaaaaaaggcgttactgccttgttcctgatttaaaaaaaaaaatgggttttaacaaggaatatgttaagttttgggaaatatagtttatcatatttaaggtggggatactcattcatgttttaatttttatcggaagaggctgatgaattttatgaaatgcctttttggcatgatataattgtgagcttttgcttttatttggtggtgtaataaattacgttgattagatttcccaatattgaatcatctttgcattcctggaataagccctaatttgttatggtgtgataatctttggatatgttgctatttgatttgctaatatttttttaaaaattgtgactgtagcctacaaagccctacagataggggtctttagtttttttccttgtttgcattctatcaggtattgatattaggattatgttttttaaataatttaagaagaatttcaccctttcccagcatctagaagcatttacataatataggaaataacctgtttttttttttttttaagttagagtaaaattaactggaaaacttcataggcatcccctgtagtcccatcccagaacattttaaaacaaattttttagtttttcagaatatattatagttgttctgttcagcttttaagccttttctctggattttgatattttctacttgctgggaaagaatttatctacaatttgagtttatcgcacagttatttgtaatattgttatcatttctctggtaatcataaccctttctcattactaacacatatttttgctctttttttgcttttttcccccttaatcaagtttgttagaagtttatatattttattgtcttcaaaaaactaggtatattaattttatatttatcctgcttttaatttcatctcagtatttaatttttattcactttttccattcctttaagtttattaagttgaatgcctgtctcatttgctttttagtcttcttaaaataatggcatttaaggctatacattttctttgaaaattgcttttgttacgtatttttggttttagacagttgatctcctttttgttgttttctagatggtttgtaattaaaatatttatttgatctttgattctgacattacttagaagtatgtctgtccttgaatttttcttttgcttaccttttgatattgtttatatgatttatgaatgcagctctgaggtatctgagaggatttattaacgtttacttgcgtccaagtacatgattaagttttaattgctttgtggacattaaaaaattatgcccttggtaaaatgcaaaggttttattttctgtatttagtaaatcaaacttactgattgcattatagtcagatcttccaaattcatgtatgttttcagttgtcaaattgacagttaatgatgcaccttttataatttttttttttgagacagagtttcactctgtcgcccaggctgtgtagtgcagtggcgtgatcttggctcactgcagcctctgtctcctggattcaagtggttctcctgcctcagcctcctgagtagctgggattataggcacatgccactgcacctggctaattttcatatttttagtagagatgaggtctcactatattggccaggctggtctcaaactcctgacctcaaatgatctgcctgccttggcctcccaaagtgctgggattacaggtgtgagccaccacaccgggccccttttataatttttaaacttttcatatttccaagagaaatgcttagtgtatttatctgccgttttgcttgatgcatcaatatgtgtaatttttttatttttcagggattacatatttatcacatgtaatatccctctctgtccagtttaatgcttaatggccttgagttcttggtttgattttactattgccagctttgctttctttttacttgactttgcttggtatactcttgttcaattgtttgtttttaaatagagctggacttttaaaacccattgagacatttttgttctctaatagggacgttctgccttgtctttctttactgtgataatgcatacattttgctttattgctttcatcttattcaatggttgccatttattttactttctgttattctcaattcccatgttaattgaacaagtcctttgctaatttgaaaagtgtgttattttcaaagctaccggtgcctaacaatttgaaaatctgtatttttctcctgaaataggtaccagcattaaattactaattcttccaccagggtttgcatttccgcaatttctgccgttcccatgactttctctgtctcctggatgtgttctctgtcttttcactcatggattctagtagattcttattccttgctcttgggcgctcgcatttcttcttcttaatcctccagaatctgatactctagagcaacagatcttttctgttcaatttaaaattttaaagtgtttttttttttttaattcctgaaagtttttatactccaattgtgtctccacatatgctcttagactcctcttcccgtctagttctcctttcttggttcaattagttctgtttcagctggtgccacctgttgcagctgagcttggtcaccctccctcaggctcctgcgtcgtcctcagtgggtcatggtttttctttgcttgccgatggctgccctcagccgtcacacaagtcatgggttagtgtcactcaaggaatggcagaccagcagatggtaggtgataagccaggaaacagatactgtgccgctgagttgctctgttcccagtctcttccgacaacataaggcttgggaacagttccaccttccatggaagccccccttccctctggtttcacctgggacagcaggatgagcagggtgcagggccttcttccctgtggatggactctcagttacaatgaccatggagaactgtacccgctctctgttttggagatttgggagatcctgagggcctcagaaggccctcactctcatcccatgcactacctgtaagctcattagattactgtccttgttactttagagaggggactgtgagggaggcaggaccaagtatgtttattcaggccactgtcttccccataaagactatatttgtgtacatttttctttgctgtattgtgagaaggaggtagaaaaaagatgtgcatgtctgcatttggaaacagttctgagagtggtgctgcatcagcggggctggattgccctcaactataagaaagtgggatacttatataaaggaagcataatacagcatgtttctcttacaggaaggactgtttcttagagtcctcatcctctgtctccatcactcagtatagcaaatcatacattccatcaatgttaatgacatcaattgtatgcctgtaagtatgtacacacgcacaggggcagggggcacttcttcactccacagctggaaaacttgggacaaaatgcctagccagcttggcccaaatttgagggtattgccatctgtatctcagtgcaggtgtttctgtctgatgttcacagtctgtttatccagagtgccccagaaaggacagtagtgttaggttaaacctgtgtatgtctgttcttggttttaataacagtcctgtctttggaattatttagtgtgttctctcatttctcaggaagtcaggatgttagtgccgaagcacttctctgacttggtccgacattgaagtaccttcccctgcattacagaagaacggccccccagggggtctgtttgatgaacacatgtattattgcagtgagatactctagaaatagcttcatgtccttgcaaaattgccagcacaagtaaggacctggaaattgttgctatgcatgtatgtcagaagatttcttaaccaattctgtactgaataaaataaaatttattttcaagttttgtagggacctggggcaatatgtcagatagagttgaatattttcaaggcatttttagttcatggggcacatagttggcttaagatatctatgtgtatcaggactgaaaggtaaagtgcccgaacctgctaatgaaagaggtgtctgtgtggccatctgaggttcagccacaatgtgtcttgcagaattattttattttgctagtttttaatttctcaaacagttcagctgcctgtcccgtggtaccgtgagacttctaattcaagatgaccagtatttgcagacagagccactgcctttgctgccacattttgcttggttattgtgtgagaacaccatttttctctttttaaatgaattgtgtttctctttttaaattgagcatctgactgggcgcggtggctcacgcctgtaatcccagcactttgggaggccacggtgagtggatcacctgaggtcaggaatttgagaccatcctggccaacatggtgaaactcctgtctctacttaaaaaaaaaaaaaatggaaaaactagctgggcatggtggtgcacatctgtaatcccagccacttgggaggctgagggcaggagaatggcttgaacctgggatgcggaggtcatagtgagccaagactgtgtcattgcactccagcctgagcaacagagagagactgcctcaaaaaaaaaaaaatccgtttacatagtgataaataaagtaattactatagtggtggcattctgcctaagtcatcttgaaaactgaatgcaaaatctttttaatagctccataatggtctcttgaagtgttacagatttttataacgatagctgtaatacaagtgcctttatttactgtgagacttgaacattttgaccatttacatgggtacttgtgtgtctccagctgagctgagtgcatgtcgctgcggcattgcaggcgtgtgtgcatgttggctcttgcaacggggcgtctgccaggggttgtctcgggcaggagaaggaggccagactggcaccacttgtagtgattggaatgtgtctagtccagctcttcagttccatgtaggaggttttaggatggagattgtgttttgggaactccaagtcactgtccaatttggagagtattatgtaagaaggcttatgttttctgattacccatccttcgatacagaccaaataataccacagtgataaaaatgggaaaggagctgtcgctcagctcttcttggccgtgttgtttgcttttcgatgtctaatttatgaaagcatttcaaagtgacatatatactgaacagcttcgtcttgccaaatgtaaaataaactggagatgagtttagcacagagctttgtagattgttgtcctcttggtagagtcggggcctaaacaccacctggcctctgtgccagtggacaggtgacctgcctgtcctactgctggtctctgcagctctctgtcttgggcaaccctggctctgagttccagagtgttctccagtaggagagtctgcaggggcactgtggagcacctgggtatgtgcacatctgttgttggctggcgttgtctctgatggcttggggtgtcacagagacatgacagtactgtcactgcatacctctcaagcttttgctgagtcctacatgagttgcaggggcagagagggagggagaaaacaatgcctagccacactgagaaaggggaaagtgctacagagtcctggaaggaagcgaggatggacatggacggggaagcattcataccaggcaggaaaagtgacttcatggaccagtcacagaggacagggccagggatcaaaccttccgtaatttgcctccacagtttgtctgagactggctacctggttgagtctgccagagccctgtgtgcaggtactaccactcactgtcacctccaggcaggaaaggccatgtgaatgcatgcatctttgcaggaacttgcccctttccactgaggtttgaggcagactccaaccacatttccatccagtggcttagtggtcttacccgtgagcttgaactgttgtccctgccaggacagtctttgcctctgtaagtatctccatattcctccatcctttcaggtcccattcagtccctaggtcctccatgatggaatattggttgatgcacttattccacaaacatttgttggccacctttcaagtgccagacaacccttctaggtatggaggggtacagtgatgagcaagccactgtttctggctgcagagggctcactgtttagtgggagaaacagacaaatcatacatcttaactacactgcccttgattgctctttacctgttatatcagtcgatcttgcctgcctagcatttgttccctgtttgggggcctgtatgatgttcgtttggatacctcagggtacattttcccatctttgtgatgatgtagctcacttggtctgaatgatatgtaatcctgcacatgtagagtgaccattatatttgcataaatagcattggaggaatatataagaaatgaataaaagttgttatatcatttgatttttcttttcttttcttttctttttttttttttttttgagatggagtctggctctgctgcccaggctggagtgcactggcacgcgcatagcccatcgcagcctcaaactcctgggctcaagtgatcgcctgcctcagacttcattttgatttgtgaacctcgtgattctattacttgttccacaaaaaattttaaatgaaaaagtatttcaaaaatacatatattccggccaggcatagtagctcatgcctctaatcccatcactttgggaggccaaggcagacagatcacctgaggtcaggagtttcagaccagcctggccaacatggtgaaaccccgtctctactgaaaatacaaaagttagctgggcgtggtggcacgtgcctgtaatcccagttactcgggagactgaggcaggagaattgcttgaacccgggaggtggaggttgcagtgaaccgagattgcatcattatgctccagcctgggcagtgagtgaaactctgtctccaaacaaaacaaaactaaaacaaaaacaaaaacaaaacaggctgggcacggtggctcatgtctgtaatcccagcactttaggaggccgaggcgggccgatcacaaggtcaagagatcaagaccatcctggccaacatggtgaaaccccatctctactaaaaatacaaaaattagctgggtgtggtggcaggtgcctgtagtcccagctactcaggaggctgacgcaggagaattgcttgaacctgggaggcggaagttgcagtgagctgaggtcgcaccactgcactccagcctggcgacagagctaggttccatctcaaaaaaaaaaaaaaaaaaaattcctccacaacatatattccaatgtttagtttttctgttacagagatcacatgtactctaacttgtcaactaaatttaaaaggaaaagacaactttgagagaaaattaaaaccaatgcagtgtgtgtaaatgccattttgataagctcttatttcatgttgacatattctatggtgctcgtcttacataacctagttagggaaatgttttgttccagtctggctttgtttttcttcatgtgtttaggtccttccactttccttttgttaatttttggtgttgtacttcaggaaatgaattgagggttgcaaatgacctggagggccttagtttgtttgcttgtttgattttagcaacagtcaccgtggtacacctgacgtggctgggactcctgattttttttttttttctttttgagaacaaagaatgtgtccttgtcttggcatggactgggtagccttgttcacctccccacccatctctccttattggtgaggcattgtaaaccgtgttaacaggtagcatccacagaaccctggaaaggttgtgaagtccctttggaagcctaagggttttgatctcatccaggttgtaatcttaaattctggtacaaattcccttgttacaactgggttaagtggttttaacctcttttgtgccttcattttgaatgcttagactggaaagtcgttcagagactcctgaccgaataaagcctacttccaaatgagtgggttgtccaggtgtgcttgtagatgtcacatacttctaacaaggctctgcagctgcgatgtcaccttgcccagcgtgacctcattagcatgtatgtggctttcagtggccatgtactttgcttctagagctttctttcccattctgggttcttaggagggggctgtgctttgtgtgtggccaggcagaagtccatgttttagcttttcaattctcttgaagaaaacaaatgttgttgataagaacacttgtcatggcatccgatttgttcttgtgagggctgtattagcaataaatagacatttagtttgcatatttaacacctcatcttctttcagcccacacgtcttcactacaggattagcttttcattacttagtagagcttttaattacctgaagctttcgtgtctttactgggatataacttttctccttattaaccagaaaaagtcacagaaaatcttgtaatttataatggaatggagtaatattcacaaacaggctttggcaggattttttttgttattgtgttttttgtttttgtttttttgttacactagttttatcacaagacaagaaagaggggaacttttagaaataaaaattatgtgctaaaataattaaccttcctgagtaacacacacagaatgttggtatagtgtttgcaccagaggaattacatatggaagaatgctgggatcttttaccaaataagggaaagtagagttcattacaaatagaggcttctagcacagaaaagaggacattttataagtactgtgaagcattttcagagataattaaataatagaaaatattaaaccaatttaaacaatttgtagtttttttctaataaccagtaagttcttcgtcttcgaataattcttttatactgttctatttccagctccactgagtgcccctgtgttttcagagaaaacaggagtctgttttggacttcctctttggtatatatggtgggagatttgtttaaaaaatttttttatagaggtaaaattcatatgacataaaattgtccatttaaaggtgaacaactcagtgacatctagtatattcatactgttgtgcaattgccatctctatctagttccaaaatacatttgtcatgccgcaaggaaagcctgtaccccttaagcagttaatccccattcccctttccgctcagctcctggcaaccaccagtctgcattctgtttctatggattcacctattttgcatagtgcatataaatgcagttatataatatgtgaccttttgtgtctggcttctttcacttagcataatatttttaaggttcatccatgttgtaatgtatcagtacttcatccctttttatgggtgaataatagtccattgtatccagttgtatccagaagatttgcttttcattgcctaacttcagggcttcagacacctcaatctttgttctgagatggatgtaaacttaatgtatatctctctctctcacccaatgatcatgccaacaccttttttttttttttttttttttttgagacagtctcgctgtgttgcccaggctggggtgcagtcttggttcactgcaacctctgcctcccaggttcaagtgattcttgtgcctcagcctcccaagcagctggggccacaggtgtgagccaccacacctggctaatttttttttcttttctcttttttgtttttgtagagatggagtgttgccatgttggccaggctcgtctcgaactcctggcatcaagtgatctgcccgcttcagcctcccaaagtgctgggattacagacataagccaccttgcctggccatgccaacaataattatttagaagtatgttgagaatacatcccaataatagaagtgaaagctctttaaaaagaaaaatattcaaaacttaccagctgatcttatgtttcatttagaatggctgcattctttgcagtaccctagggttgtagaaattctcccccatgattgcacaacccactccttctcagccagtgtgcacctggagtcagctgtgtttggccttaaggtgtccatggtccagcagggagagggcagatgggtcagtgttgtcctgctagtgatgagtatcccatggtgggcatgctgatgccacgcaagggagagggtgtctggttctgtgcagtggcagtggtgcaaccccttaccaaggtaccgtggggacctgggttagggcaggaggaggaaggtgttctctacagactgcagggcttggaggcagcctgtcatggggaagggtgtggatgaagggtgagccgggaccccaggcaggtacggagcagttcaaggccgtcaagtgtgcttcattcttcagtcattagggtgtctctgaaaggtttttcattgaatcagaattcccctaattcacgaattctaaagcttaagtaaattcagtaataataaactgtcaattatccaagcgatgaatataaatccataaggtttttcaaatccccagaaatccctttcatctcccacctggttttgctgagcgcctgtctcttctgtctcttttctgattcccacctttcacttttcctccatttttcgcttaatggatttatactttaaagtaggtattctgaaaattccaattttatgaatggtgtgacggtgagaactttgattcattgaaagataaaaataatcattacattttatactgcaagggtcatccttaatattcttcgtatttttaatatagctgcatgatttgagtagttgagttggggattggataatgtatttattgattgattaactctctgggggtccatacatacccctctttatatccctgtggtccctttttagtccttttgtaaaaacttgataatgttaacctctgccaaagttgatgcggtagttgtgagtggtgggacgcaagcgtgttgatttattcttggagacagcagaaacagcaccaccttcaactgttttgtcatgatcatcttgtaaccataattctgtgctaagtcagaattaatgttattttgttaattcaggttattgtgaaaatctccacaggaggttatttaagcaagtcacaaattgatgattctgtttgtagaaaaactccagctcatccagccagccacattattccagggctgcatggtgtcagcgtagggaccaggctcggtgtagagaccaagggtgcctttccccttcctttccgcccgttaattgcctactcgcccagtggtaccttctgaacttttagaaatccagataggatttccacatggttcattagaattcatttatttttttccatctgtatttctttttgttgtactccctagatcattatttttagttactttttacatgcattggttaggtttttcatgtaatctctcagtaagcgtactgggggatgagtgacctcagtatttaaatttttcataggtgggatgaaatgtcttttctgagtgtgagtatttctgttccattcttcttttccaggcaggctctcattctgtgctgcagtttggattcagggagcactgacccttctgtcaggttgctcctgctatgaaggatggaagggcattttgatacatgaggcataactgtaattatccggtggggcttggtttgtgctgttttccacctcttcgtcatattttggaaaactgaggccaaaagcaaagttcattttcccctttaaaagcttctttaaaaaaatgatgaaagagctttatcaatgttttgaataacccagaaaatatttcttattgttgataatctgcagtttgcaagtgcagcgaatcttgtaggtagatttaccttgagttttttgaaacggtagaattaatatattaaaacatatggtttttagttaaaataggatgttaaaggaatagagcgcacgaacaaagaactttccacttgaacccatgttgtttcatctgacagtgggtatggtgtccctggcaggatagggcttccacctcctgctggtgccggtaggacagggaagaggtggggaacactgtgtctccatctcccaagcatcttacctcccaagtcagatccctggcattgtttgcatacttgcgtgtttgtgtgtggggtgatgttttcctgagaatgtggcaaaataatagaaggtcccagggttcctcagtctgcagaccatagctgagtggtgtgtgcctctagccatgaggtgaagcataggtgaaattcagatccataggaagacagacagactttgcaagttagtaagctaacttgctagaggaaacggtagactcctgtgctggctgccaactaaaaagcctttctccacagttctgttctcatgtacaccctcaggaccttggatgagcttgtgtgttcaggaaattgggcaccgagattttttttgtatctttgattttagttgatatgtagtccttccaaggaaagtattcgttggatgccctttctacactttggcattgtgcaagaggtatcaaattttaaagtaaaagtgcacaacctggccaggcgcggtggcttacgcctataatcccagtactttgggaggctgaggcgggtggatcatgctgtcaggagatcgagaccatcctggccaacgtggtgaaaccccatctttactaaaaatacaaaaactagctgggcgtggtggtgcgtgcctataatttcagctacttgggaggctgaggcaggagaatcactttaaccagagagttggaggttgcagggagccgagatcgcaccactgcactccagcctgggtgacaaagcgagactccatctcaaaaaaaaaaaaaaaatgcccacaactgggcatggtggctcatgcctgtaatcccagcactttgggaggctgaggcgggcagatcacgaggtcaggagatcgagaccatcctggctaacacggtgaaaccccgtctctactaaaaatacaaaaaaaaaaaaaaaaaaaaaaagccgggcgcggtgccgggcgcctgtagtcccagctactcgggaggctgaggcaggagaatggcgtgagcccaggaggcggaggttgcagtgagcggagatcacaccactgcactccaacctgggtgacagagtgagattccgtctcaaaaaacaacaacaacaacaacaacaacaaaacctcacaaccctggtctcccagagcttccatattaataaatctagacaatgtgaaatgcaaatccacttaatatttgatgcaaaaaaaatttatttgacctgttattttaactctttgacataaaatctctaaatcaaaataatcagcaacagttttaagtgtataaatatgtatttctttcagtgcttgaacatttttagacaggaagattcttgatcttctttgtaagcaaatagcatcaaagagtaacatttctgtacctttgtggtatgtaccttgtggctaatttgtccatgaagggataggcattgtgttttgttgcttaagtcgcttaaggcctttaaagcatttccaaactcacctatttttgctctaaggggtataaggtgttaaaaaatgaatggaagttaactcattctcaccttgtctgctaacttccttttgttctttttctgtaagaactcataaagctgtatgcatcagctgctcccaggggccttctaaggcctcagtccaacaacagtgctacaggtgaggaaaggaaagaaggcactatgtcatcatgtcattcttttagacttggtaagaagtatattcaagcagatcagatgctctcagaatcacagcgtgttgtactgctagtaattaaaactgaagtccacgttgaataagaaataattttttattgattgctggcatttgtgagaaagggtttaattagaccaggatatggaggggacttatcgacagttccgttgtacattgttgacatggttattttctgtatctcattttgcctgggaatttgtcattctcttctattttcttatcagtagcactgcttttacacttattagccctagctgtttgtcttgcttatttaaacttgtacatggcacatgctcaaagatttttccaggcaaaatttctttaaagcaggatttgagattttccatccccttccgtctgctggattattccggtgagtgttaatctcccgcctttgtcttagcctctctgtggtcttcggttgcttccttgttctctgtagatctcctgagttggccattagctgtcaacagtcagcacttgctgcctctcaagtctcttcccctcctggctctgccctggttttgctctctgacggggatctaaattgggattctttccagtgtggaatcctgggtgtccaccatgtcactctgacttccagatgataatgagtgtgaccatgggctgaatgaatgtctctctgctgggattaaaagttagaggaaggcaaaaacagacattgcgtgttctcacgtatacgtgggagcaaaaaaagttgatctcttggaggtagagagtagagtgatggttaccagagactgggaaagggggcgatgaagaggggtagagaatgagtacaaacattcagttagatagagggaatacattctaatagggtgactatcgttaacagtaatttactgtatatttccaaatagctagaaggttagaaatgttcccaacacatagaaaggatacatgtttgaaatgatggatatcctaattattctgatcattatacattgcatacatgtttcaaaatatcatattaaccccataaatatgtacaaatatcacacatcaataaaaaataaaggggaagacataggtgtaggcatagatttttaagctgagaaccttttgacagggaagaccagggatggttttagggtgtggggaatctgtgtaagttggccgttagctgtcaacaggcaacaatcactgtctctcaggtccctcccgctcccggccgtgtcctggttctacttgccggcagggatctaagttggaattcctttccaacatggaatcctgagtgtccaccatgtcaaaattgtgtcaaaattcgtctgtatgcatttttcttggtagaagggtccccaaaagtcaccacattctcagagacttctgatccctaaaactttagatcaacagtcaataaaaaggtcccagttgtgtcttagtccccatggcagtacttttgaacatttaaaggtggagaattgctactgaggactttgttctgtggatgaaacttcgaatgaggattgttggtgagagttggattgttgttgtatgaggaagtgcaccttggaatctaatggggtcttcacggagggggagtcagttgtggcactgtttgtgtattccattcatcattcatccctccatccaagcacccacgtggagctcagaaagatgactaacacataccccctgctgctcctgtttttctaaggtgtgctgggaccatttacatttagttctttggagaacacaactacttaggatttttgttgttgttgttgttttcctgtacattgtcttcctatctcccttctggtacccattccaccctctctccccttcctcactgccgtttcataggggttctcagattcctgtgaataaagcaaaccgatgtgcagatatgtgtgcttacacatgtggacgtatttgaggaggtaagagggacctgcacaaggctttagtgagtaagcagagaagttatttatatatagtgagacccagtaaacggcgatgtcgcaggtgaggcagttgatctggtcagaatatgcctccagagacatcactggtgaggcctgcatgcatgttgaaaagagtgtatcttacatctaggcttgggtttccccctgcagctcacttatgaataacaacgtatgcaagagatttgaacattttcatgttcaaatgaaacatgaaaagggaaaaaaatttaaggttacggttaagtttggattgtttgcttattggtttggttattggcaattgctacaaagtccagggtgttctttatcagcagcatgcttatcaagttactgacgttcaagctgagtttccttccctccctccttccttcttctccactgacattttttttttttaaataggtagggaggcatttaatcttgtagcagcatgagagtagcttaaatgtccctcctctagcagtatgtttatagcagcgtaggtaaggaaagcccagcttgcacagctgagctctaaagtgcatacatcccttaagttctcatacacacactggccagtgagacccccaaactgcgaacagagaattctaattgaagtaaaagcatgaagtttttctttattgaccatgtagcaactgtggaatcatttgaaaatttctgaaaacatgaaacaggtgtttataaggagttttctgacttaacaaaattggtgaaataccaactttactaaaaactactaattcataattttttgattaataatttctagtctggaaaagaggaattttttgaaaatcactgatatttttgatatactgttgttttcaaattgagttctcatagtgtggtcggctctgttctatggaattaatattgaacaagctgttctgaacctaagaaaggtttgtaaaaaataaacatgaaggaagacttcattcaagaggtcacttaaaaattattattattattattattattattattattattattattattattgttattttaagaattaggtctctgttggccaggctggagcacagtggcacaatcatagctcactgaagcctcgaactcctgggctcaaacagtcctcctccctcagcctctctagcagctagaactgtatatgtacaccaccacgcccagctaatttttttttttaacttttttttacttttgaagaggtgagattataggcactagccactgtgcccagccaaaaggtcactttttttttttccttgttggggaggaatcaataacaggaacaccagtcatgatttggtgttttttccagggcagacaaataaagatgatattacgatgtttgttatcacagaatatgtttgcttttgataggggttgggtgctgaagggtaagtggttagaatcattctttttctaagggtacagtcattaatactccttgattcaaatcactatttaagttataaatacatggatttattttctaacctcaaaattatagcatcttaccacatatttgcatgcctctcttgagttaactactggtgatgattcttagctcatctgtggccaagtatagataagagaattagaaagttgtttccagcgtgtgaacttttatgattttcttccttggttactgtactcagttcttttttgttttgtttctatacaagatgagtagctggtggctcagatgacccccgtgctgcatgtacagtcccatccagagagtgttgggggctgtgtaaacctcgaggctcagagtggctgccattttcctaaaagagaagtatggctgctgttggcctcaatgttcagctttacaaaaattcccgtaattaatgaaggtcaaggcatctgcaaacattaatggggtcacaagggacaaatcagttccttgaggggaagttaaaatgctagattgcttaccgctccagacaaggcattctcaagaagtatgtgcagtttcagcacaaggattaacacggagcattacttgagccatggggtgccttgggggacatggatcagcaaccatttccttttgctcacagcgcccagattttgttctggggaccactcttatctgcactgcatagcagccacacattttgagtgaaattaaccccaactagcattcgagcgtcctcccctcccccaaaagatggactgtaccccacactgtaatcagcagggaggcatttcctggccacagttcaggttggtcccttagaacgctgctcagaactgtggtttggtggctctgggaagcagtgctctctctgagtgtgaataaggatccacatagctccagtaggtgtctgacgacatcttgtgatccggggggaagccagcctaaggacaaagccattgtggggtgagagacaggattggcacaatcactgacaaccgcagtagtagcccagaataaactgtgcctgaaacctaccctatttttgtattttttccagttttaaggaaataaatcccctttattgtatactcagtttgaatcaattatttttatctctttgggattggtttttggttaatctcagcaattcagaaatagctgaagaactatgctgtgggtttagacatcatgccgtgacaaaaagaagaggatcttagaagcgggggacattcactgaagctttatgagcctttcctgaatcccttcaaatcagatcaagttctctctctcctgtgcttagaaatgctgcctgttaagtcacgttggctacagcacccatctcagatcccttgtgattcagttgtaaagtagattcttctggtctgaattagaggccaaaacacaagacagatcaaaaatggggaacatattgcaaatttccccacaaaagactgaaggatgtgtttaccattgattgcacagggactgcagtgtctatgcttttaggcatggaaaatgcagggtttgactatcgagtttagattttaaagttgaggattgtttctttaagaagaaatatagaatattattcagtcctaaaaaggaaggacattctgacacatgcaacagcgtgaatgaaccttgaggacattatgccaggtgaaatcagccagtcacaaaaggacaaatactctatgtgatttcatttagatgaggttccctggagtagtcgcattcagagacagaaaacagaatgatggctgcggtggtgggggggtggggggtggtttggggaagggagtggagtgatggtttcacttttgcaagatggaaaaagttctggaggtggctggcggtgatgttgtacaacagtgtgaacttacttaacattgctgcactctatacttaaaaatggttaaaacggtacattttgttatggatattttcccacaattaaatttaaaaggaagatgagtagtactcgactcattattggatattacatcagggaactggaggtagggtctcacttactagttacgtagctcaggaacctggaaccagactccttctccagctgggcagtcccaggtttgagtcctggctccactggaggttgtctgacttggaggttaataataacctgccttagtcccagagtccttagagggaaaataggttataatacctgagtccatgtgtatcaagccattgctggttccaggcccctggagcactcagaaatggatgacccccagctgggtcaggccaagtcctccctgctgtagcaagcgggaccattgcctcgttccccccacctccacatggaaggtgccttttgtgtcctgccccatctctgttttaacagtcacaagactgtaggcagatctaaacttgtttgcacattattatcacctggggagctttgacgattccaaagccaggctgccacccccacctctagaccaactgaatcaccatttccaggggtgggactgggcatccgtgttttcgaggcttctgggtgagtaccttgtgcaaacaagttcagggaccgttgccctagacactgttcttcccctcatgtctcaacctgggcctcctaccactgccaccaccacagctatgccacctgggatgtgtcccaagcccccacttgtcggggaagcagctggggaggggtctttggccacctctgcagctataaggatcagagcaacacctggcttctgtgcctgtggcccctgctggtgctgggtccctggtccgcactgaaggatccaggcagagtacagtgggtctcccaggtcagaatcccctgggttgcttgttaaagctcacagggctgggccccaccccagggtttccgattcagcaggtctcgggctggttggatgatgagaatttgcatttctgtcaagttcccatgtgatcctttttggggtctgggaccacactttgagaaccactggtctattaaacaaatctttgcaaattagggaggtgtgttgtgggaggaagagactgatagttgaaagaatatttgcctaaatacagtgcctagtatttgccaagtacgcagccttctttctggctttaatcatacagactttctcaatcacatgtaattgcacatcctttaagcagcttttgactgactttggttttctcttttgtggtgattttccttaaactcccgaagggagggtggaaggggcaagagaaatttttatttatttattttaatttaattattttttattatttatttttttattttttttttgagatggagtcttactctgtcgcccaggctggagtgcagtggtgtgatctcaggtcactgcaacctccgcctcccgggttccagcaattctcctgcctcggccttctgagtaacagggtctatgggcatgtgccaccatgccgggctaattttttgtattggtagtggagatggggttttgccatgttggccagactggtcttgaactcctgacctcagatgatccacgcgccttggcctcccaaagtgctgggattacaggtgtgagccactgcgcccagccagattttatttctttaaaaaagaaacttactagttatcaggacacttgtgttcttggtacttgattttgtcagcattatttttaagagcctcttccctccttccccctacctccctgttgagcccaggctctgaaataacataggtgcatgtgaagttcccctacctgccattaccagacattggtgctgggcggccctcacctccacctcctctcacctgaggccacagcggtgtgcaaggatgtggtctgtcttgagtgtgttttcaaagcagctgtttggtctgtgccttggatgtttttccacagataagcccaaaagagaaccacatcttaaaacgcccgtgaccttgaatggtctttccggaggggcggctggatttgtgctctcatcgtctcaggtatgtgtcaagccactgttgtttcagagctggacacaggtgcttaggaaaattcctcactgaagggttttcaggatttacaagttcttgctgtttttgtgaccttgtgtggtttctggtttcacagaaggctttgtttcttggttcttgttgctgctttcagccttggcctgtaatcactgggcgccagggagggctgcggtctgtttcccggggtgtgctcagataccgtgtcagttcacatgtgttgctgcagcggcagggggccaggcaggaggggcgggtgtcctgaagcacgctcaatttgctgatcagggccttcacttggattttgcacttgccgcagtggagacattcctcgtagctactcagtgtggtttgttttaagtgggccatccgttaattcatgtgacctggaacttggttaatgtacttgccaaggttaaagttgagacgctgtttgttaaacctttcaaagagggaagaaggttgccttgaattcagttccagggtttgggagtctgagagggaggtggtgaggggcccggggaggccctgagaaacaaaatgctggttaaggacacagtctgctcaccgacctcggaagtctctagacgtctaaagaagtccaagcaaggaatgatgaccgaagaggaacctcaagggtgcaggcggctctgggatctcagcacatctcagtgatggaatgagctgccggggaatgacccctgtgggggctgtccaaagtcagagcagacacaaacgtagctctccaggccccataccttggtgggcaagagggcagcaagtgcatcctcacagttgatggggagagcagcatttcagcctgcagaaaagagaaccacacagatgtaagatgaggtctgcactcacttgcctggtcatgcagagacggagctgggagcagctgcatgacttttcagagaagtggcacacgtttactgtaagggtcccaaatgtagaccactgcagatggtaaggtctagatggagggaccaatagtagggaagtaggggagaagaaagtaaaaccttacagtataaagacccatagatgctcttttgtttttgatgtgtgtacgggggttagatatttattgagcacctactgcatgacagagtgttcagcaatgacaatgcagagcttaataagaacaggttctagactaatcttttagggggtgaggatagaacagaaataggtaattatgtcctgagaacatgagagagtgttggtggacagaacggcgatgtatccccaagggcaactgaagccttcacagaagatgcaaagcctgtacgtggtcctcggagtcatgccacatggtgactggttatcttagtcgtaggaaaactgagaagctttgaggcatgttctatctgtctttgtgggcatcatcttcattatttgaacaattcagagtgcttgatgccttttgcttcgttctcacaatccttgacactaagctgtgggcttgggttatagtcactcattctgttattcatgtcattttgcctatccttccacttcacagatgagaagactgagacccagagagggtcatggttttcattagccaaatggtgcagaaacccagtggtcacagtggctctctagctctttgtcacccacagggcccttgataagagtacggtctttctccaggggagcagggttgaggagtgggggcagccctggcctgggtggccatatcctgatttcccctcccttggcccatagctctctatcttgggtgaggtgagaaagtaaggctgctccttgactgtggtcccttttgtgtctgtcctgcactgggccaccttcccaggggccttgtgtcagcctggtagtggtgctagtggccttgaagtgagagtgggtggatcacacatggcagatctctggcagtgaccttttctgtggatttccggtgactgatgatagcctctttggaagtcagcatatgcatagctctctgtcttttgaaaacaatggaaaaacccaccaccagccccaaaaccagctgtctttcttcttatgaatagatatccatgaaaagcagaagagtagtttcttgtaagtactctgggagtgcataatacattttaaataagattaaaaattatgttttattcttactagcatcactgtcagataattgagcgtgagagcattcagtgctgtgtgcttggtacgaagtagtaacatcaattcagtgttcagtacatccactttgttccagaacaatgtattcaaggtcggtgtattttggctgtgccacagagttctggaaattcccaagagaataagttttcacctgttatataatccagcacaagtgactgtgtagcagcaacctcatgtttcatgatgactttaaaatgcaattgattctaaaatttagcttttaaaaatttcgacttcagattttctctgaaggtttaaggtaggcttctcctttattaattttttcaagaaatatttaagaacactgctctgtgctatgtaccattctaagcactttacagatactaattcatttaatcctcagcctggttaggtaagtactgctattcccaccgtacagatgaggaaacagcctcagaggagttaaaacaagttgctcaggttacaccgtcagcggtttggactacttcagtttcagataatcactgtgaaattttactgttttgagctacacgtttcaaaatcttttctgatgcggaactatcattaaatcatataatccgcttctctggagtcagaggttgacaacacattagcacttgactcgagcctctccctggaggaggacattccgtctgcggggagccgagtccgaggctggagcaactctggaaccacagccctccagtagagggcacacgagagcaggctatctgtggagatatcctgttggcacaggggtgaagatgacagaggcgaacccaagcaaagagagttaattagcagagtttgccctccaggctcggagggcaagtcagcctggggacctggagttagttcccttttcagctgtgaccattgaagacattcatcaagttctctggctccgggatgtcagctgtggtagtgacttgcatgggaggttatccgacatacctcacacactttaactccacctcttcagagtttgtggccaagaatggagccaggtggctattttttttttttaaatttatgtaataacaaacattcgcatttattgaaaacttaaagtataataaaaaaataaataaaataaaaaaagaaaaaagaaaacttattcctgtgtcaggcacttttctaagtgctttgcagtgtattgtctcatttaatagttgtttaaattaacagagtaggccgggtgtggtggctcacatctgtaatcccagtactttgggaggctgaggcgggtggatcacctgaggttgagagttcaagaccagcctgacaaacatggagaaacctcatctctactaaaaatacaaaattagccacagtggtggcgcatgcctgtaatcccagctactcaggaggctgaggcaggagaatcgcttgaacccgggaggtggaggttgtggagagccaagattgcatcattgcactccagcttgggcaaaaagaatgaaactctgtctcaaaaaaaaaaaaaaaaaaaaaaaagagagtaaataaaattgtaaggtgaatatgttatctacttgatggaattttttaaactaccttgaaaagttttatagtttcctatttacagatgaaattaacatactaattataaatcatgcctcactattcactttaggcagtctatctccttaaggatctccttacggtttagatagataagtgaattgcttaatgtttttggaagtaataaaactgcatttctttttaattaaacaatccagataacaagaagtaattctaataggaaacttgtaggatgtatttacagaaaatctacacaatcttactgaacaatgtagaaaagaagatttaccagcctgggcaacatggcaagctttgtctcttaaaaaacaaaacaaaacaaaatttagccgggagtcgtggcatacaattgtcatgtccacttctcaggaggctgaggtgggaggactacttgagcccaggaggtcaagactacagtgagccacatttgtgccgctgtactccagcctggatgacagagcgagaccctgtttcaaaataaagaaaaagagatttaaatgaagcgaaatgccattttctctaggtgagaaactggaatattatcaatgtcacttcttcccaaattgatttataatttaaaaacaatttcagtacttctgcagcttgtttggagcttgataaaatgattgtagagtttgtcttgaagctttaatagtgaggcaggtttaaaattgggggcaaaaaagaaatgggttttagggtgtagaagggacttgcctgatcacttttgctagaaataaatgtccctccaaattaaattactaatgtcgcacatcagatcgtatttaaatccattagaagattttactgttccattagagctacccatagctggtgaagactctgcttatagtggaacctagtttctcagttttccatttatatttatttacctgagctttttgtaaagtagtaagtacttgactgaatttctgctatttatcaaatgctttttgaatagaaataatgagttaataacatttagccttttttggtaaatagtataaacaagatagggcaaatatgtaaactacttagaactttatctaccttgcatattttgtacctcttatttgcatatgcatgtcacatgctccttatgtaccatgtgctattactgtgccggggtactggggctatattgagtctatttcctgtctttgtagacttgatggataatttggacagcattgtgatattccaggtttaagagtcttaaggttcaagactacattaaatgttaatgtagtccaacatttcttgaactctgaaatcctctgagcatcttttcatgcactggcctaaaatgttttcatagcccagcaaaaggctgattacttatttccctcctattgattttttttgagatggggtcttgctgtgttgccctgtctgcttgtgaactcctgactccggtgatcctcctgccttggtctcctgtttatgttttaaatagcatttctcaaacctatttgagcaaataactttcctgttaatatgtagtattccttgaaagaattgaatttgtgagtccctaatctagacacttttaaagaagaaacaaaactcagtaacacatttggataaaaacctgaatatgtccattttgggatgaaaggaagcagctttgtttaccatgttgaattaagtggaaaacatcttattttaatcatgattgatagaaatctaaatttgtaaattctgatttttatgttttttttacaatgaaaatacattttaaatgtcaccatccccttccccatgaagtcttcattacaactaattttgaaaatactctctcatttatttatattatatatgcatatgttctactgtataattttaaatacttaaatggggttatctttttgcattgttctgtatcttttttcagcttaataatttaccttgcttataattattgtcagtgcttgcggacctgctctttatgcatttttaaccattgcataaagctggaatgatggacatgatttctttaatcactccaaattagtcatttagttgtttccagttttttagtattacaaataactctgcaataaacatgtcttgggtatgcattcttttagtttaaaatagtcttgttccttcagaaagttgctcaataatagacttagaaattcttttgtgctaattactgtaattgctcattttaagatctccttttattgttttcatagtatataatcctaaactgttacaactgaaatagtccttgagctaagaaagcaatgtggcttaaagataggatttctaaatagagacttaaaaattaacctttttggagctgtgacttcctgatgaagtggcagcacacaggctgaatatgttctacatctggatggcccaacatcatgatgctgtgatttgcgagaagctctctgcctgcctaggctgctggaggatggcaagttaatttatttgttgttgggagacctccccctgcccccattaaaaaaattattttgaaatacttgtagattcacatgcagtttcaagaaataataaagagtaattccatgcaccattttcctccaatagtaacattttgtgaaactagtacagtatcacagctaggatattgacgttaatatagtaaggatatatgtcatcaccacaaaggtacacctacttcccttctatctctcctctctccttcatgcctggttacaaactaacctgttctctctatataaaattttatcatttaataatgttctgtaaatagactcatagtatgtaaccttttggaactgaagtttttccatcagcataattccttatagattcattcaggttgctgtgtttatcaatagtttgtttctttttattgctgaatggtattctgtggtgtaaatgtactgcattccatgagcatggcatgtccctccatttatttagtttttctttgatttacttcattagcattttgtagtttttgtagtcctgtgtatgttttggtagagttacaccctaagtatttaatttctttgctcattgccagtatatagagatacaacttattgaactcactttttagtttatgctagtttattactaattatcaatacatgctcaagatatgtcaactccttttatttttattaggtgtcacttgctacattttgtggagaataccgatgctgttgctagaaagtgctgctgtcacaaagtgggtttatagatagtaccacgctatccttcttcctaggctagattagaagttatttatgtgctatatgcacatagagtttttgattggtctattgcaaatactatggcatctgaaattttttttttttttttttttttttttttgagatggagtctccctctgttgcccaggctagagtgcaatggcgcagtctcagctcactgcagcctctgcctcccgggttcaagcgattctcctgcctcagcctcccaagtagctgggattgcaggcacccgcaaccacacccgggtaatttttgtatttgtagtggagacagagtttcaccgtgttgaccaggctggtttcaaagtgctgggattacaggcgtgagccaccgtgcccggcccctgaatcctatttttaagtataaaaagtcttttttcagctctggattatggtgctgcaagctgatattcttctcatggcagtaaacagagaagtcctaggggtaatcttacccctctggggagtccaggatatctgagcatctcccttttctttttactgctagaaagaatttctgctagtagaatnnnnnnnnnnnnnnnnnnnnaccccccaccaccccaccaccgcagccatcattctgttttctgtctctgaatgcgactactccagggaacctcatctaaatgaaatcacatagagtatttgtccttttgtgactggctgatttcacctggcataatgtcctcaaggttccaaaatacacattttcctgctgagcaatttagtctaggttaagtcatacttgaccatatgccctagtttagcgtccagtttgtgaacattctttacctgagttattgtaattctaatctcttatgtaaaactgcaggtagtcagccctttgtctccttcagttctacatctgcggattccttcaactacagattaagaatatttggggggaaaaacagtaaaaaaaaattacaatacaacaataaagacaacaaatttaaaaactagtataacaactttttatacagcatttgtattgggtattgtaagctagagatggctgaaagtctatgagacgatgtgcatacgttatatgcaagcgctgccattttattgcagagacttgagcatccaaggattttgtatccgtgggagtcctggaaccaatcccccttggatactgagggatgactgtatttacaacatgtctagattttcgacaacttgaattaaaccagaaagaatatgaacacacagaagttcatgtgtatatatatatgtgtatgtgtttagaagggagcaagctgttaaacatgggaaatagttgctagtagtttgtaattttatgattacaattttaaaattcaattttgcaactggaatttgacttgattggttagtgccttacagtaattaacctccaaatcatcagaatgtcatcttgttatttaggtaattgaatctacttttcttgtatacagaatgctttttggaaacaatacactgtatatctagtttgtaccaagaactaattgtacacagtcagatacttgcagttcttttggacttgagtttctttatccttctatcagatgtcacaattccctcttccctttgtagcatatgaaagtagttgtgtgtgcactgtatttgagaatgtcaagtaatagaatctctagaaaacattcatgatttcagtcccaggtaatccagagttaaaaataatgttcataaggaagggtagcaaaatttagattttaatacttataggaggtgtgttaattggccccagggccgcaggctttagcgttcagaggactttagccccaaaggttttgtggaacttttccagagtcctcaccagtacattgggaataaatggaatgcctttggaagtactttgaagattgaattcgatagtgttggtaaagcagtctagcctgctgtgattgtgctattgatgcaaatattctctagcctgtattatttttccttggagctcaggaagtgatccccacccacctcaagcagtaaaggaaagagaggcaggagggtctgaccatgtgaggtgccccaataaagcatctgtattgtaaatcaggaatgtaggtattgggtttccttaaaacaaagcacacctacgtgaccactagctggagcacaatgtgggctcggtctgctgaaagagtcagttggttgcggctgtctaatccaattatggatggtcccagcgctcagcctttcagctgctgcccctcccctgcagactctgcctctctcaccctcccttttagggcttggtctgtggctaccccagaaatcacgtgcactcctaggcttcagcgagtacagccttgttaatctcagacatggaaagcaagttgcctaggtctacagatgagtattcagtttccccaccagttgacctcagtgcaggttttgttggttccagtcatttggggtcagcacctgtttgaagccaggacacttagaacaaggtggaggaaaacctgagggtacatacagtgtggtttccttggctcatctaatgcagagtcagaatgattagccacattgcaaattgtctttactcagtggtttaattgttaaccagggagttaattttttttttttattaaacaaagaagaaaacacctctagatttttctgggacagatggccccattgaaagaggccatgtgctgcagcgaatggccaggcctcgggtgtggcaagtgccttccagctcagtgcttgctttgtgctcctttgcctatttgaagacgtggatgaatcaaaatctataagcctatttcagtcaagtattctaaggaacctggaaacacaggggatttctctgttgcctctaatacagtgaaaaaccactgtctttttttgttgttgttgttgcattgggggaagaaagtccaggtttgcatgtacattttcactcataggatttttttttagaatagtttggggaggacattgtgctctggccaataactgggccagtgtctggtcacaagatgatcaggcaggtgcctgcatgactgtaggacagagaactgggcagctagagagcctgtgtggaacgtgaagcctttccccactttgttgccgtcctaaccttttctcaagtcatggagaattgatccttagacattccttacctctctcacccacttgaggattgctcagagcctgggtttcggattgaaatagcactatttctggttgatgacgacattctgtgagccagcaatgtagtttaaatatccacaagagcgccctggttccatcagcgccccttcgtaattggtcatgagacttggacctccttcggggctgggactcgggcaagggagttgagtagagcttctctttctgggctcctgggaaggattcatggcataaaagtgggacttcagcattctctgggcacacctgtctctgtttttgtcctctcctgaatctttctggcctgcagagcagaataaagtcactctgtgccaacctgacttttgttcatgactatattaggggcatggatagaaagtgcccccatagcactctcagataaaacaccttcaaacaaacccagaaacccatgctcacaaaaccacccaccttaaattatgaaactttcaggctgactaaatcctgaaggcgttggagcgtgagcaaagggaaaatggtgacacagagctttgcccttcctaatccaaatgaaaagctctgtaaccctccccccacctttgctatcaagaaatgttggacctttgggaagcagatgtagagtattgatccttaaaacagagacctctcaccctaggtctcttaaaacagagaccttaaaacagagtattgatccttaaaacagagacctctcaccctaggtctcttaaaacagagacctctcaccactttctaactgaagtgggttccacattggaagtactttgcagaaacttctattaccgcaattacttttgcaccaacaaatagtatcctcaactcagaaggaaagaattggaacactcagctggaggtgtctggtagggacatgtgtctgctttttgaatcagtcgtatatgtttttgttcctgtgcctggaggccctttgtggtgtgagaacattgaatttggagagggaaagggagacaaaagagaaatgggggtgatgcttaagggaaagtagggtttttagtttgttcaccacgcttgatggcagatttgcctctggatcctcaggccacgttcctatggtgggtagggatctctctctctctctctctctctctctgtgtgtgtgtgtgtgtgtgtgtgtgtgtgtgtgtaaatagtgatttctctaagttaataaagaatgtggggtgacctcctacacatgcccgtatgctattgtgtaggaacaaatgcatggtaggaatgggtagactctaatctgaaagcatcaagttgtatgcatcttctgcaattaggaatctgctcaccagcacgagtgctgtggtttctgtagttctgggattcagaggagcattttaaagatgtaggatgttggaggaggaggtgcagggatctccccttgggtaaagagtgggagacagtctctgagtcataatctgggaccagtggaaggtcaaagggaagaactgtcctgttgtctgctaagtcacaggcttccttcctgttctctgagccctgtcacttacccaaggtgcagcaacaattagtgtctgtttacacataacagacatctctttcataaaataatttttaaggcatttgtttggtagaagcttccctgtttgggggagtcttttccctgaatgcatgtaaataacttcacagtttgcgcaagtttgcaaacggtctatactgctcagccttgattgggctacccaaggatgcgcccgccctgctgaggtctgacagctctgggaggccagtgaggcctgtcctaatccctgttctggccggtgattcagctccaggtggaggctgtgcagaaacagccccggtcatctttgtgtgaaatacatttgtcgtcttcattttcttttttcttctgctggtatcttcatggttttcagcaaaactgtgtacattacatttttttctttaccatttctccgtagttatttctagcatttttttttcagctgatgaaagcaaatgaagaatttgtatgctccatagtcagtcaaacattgatttctctgacttttaacttagaaagtcattttgcagtggcttgcgtgtgtgtatttagactgtgcttctacaaaaaagcacacgtaggcttatggctcagtttacttgttccagctcactttcctgttcatttaccttcttgtaaaatggaaagacaaacataccttaaacttaactcagatcgtgattgccaactttgttctctgtgtgtaagtagttatattattcctaggttatggcatcttgatttatctttgaaagaagaaaaccctcactgagttgacagggacacattgttctaggcttctacaattgtgctgatgacgctttttcccattggaatgacagggatgataaggtcggctggctagcctttttttaaaatgtagaaaaccacaactttaatttatagcatcatcattttccttatgtatgtagtatgtttcaaaaataatccaatgtcagattcttgcttctgtgatcaaggtcttgtttttgccctttctttgctcaccacttccctgcccctgacgccgagtcctcgccttagaggaggtggtcagcttatattgcaacattgaaaatgttataccttacaaagaaggtgatatgccatttcttaattataatgatgtgcaacagtgacttctgatgtagacctttaacattgggccacgcagctttttctttggaggaggggcatttcaaattggatgatgctcttatagtttaataaagaaacaagcaaacaaaataggctatacagggcatgtgttcttaaactctgtgacagtggaggtgaacccaggcccctttcatggccttgggagggtcctcagctttgggggcgagttatctgggtggaaaagcaccatgggaggaagaagtcagagaggcgggttgctggagctcagagaataaaagcaagtctctgccctgaaaatggccctgatttgcttcagatgtactctgtctgccaacatttagtgtctgtgacttagccaaaggaaatgtacattaactgttcagtttctatgtagtttgtgctctaggattttgcctccggaggatttctgtgaaggaagctctgttcaagtggctctgttccacttgggtttggaaagaggccgggacaggtgatttcgaaggaaggatgaggacaatggaggagatgggcttggtcattgcagtgtgtgaggtggcccagcttatctggcattttggggtactatatgtgccatatgaggtgggtatgggtgtttgaagggaaagggggtggcctgggcaacttgtgtccttgcctagaaagatcatcactctttttatttaaaagaaacatgtgaaagagccatcagggatagttttgtcctccctcttcttacaagtgatcattcccttggtagggcagtgccagaccctgcttgtgagcacagaaaacgccataagctcctcatgaaagcatgtctggggaagcttatctcaaatgcagtttgcacttgcaaaggtcctgtggtatagcgggggagcaggggagatggagtctgggagcggtgaaggctgggtcactagctggctttgtagcctctgggcgtgttgtttttatcctcagaggggccactgcacctgctccatggtctcttcccacagcagacccttctgtctctgtgcctcgaggggctatgtggaaagcagagaaagactcaaccagagtcttcccttaaggaaatcggaaggaaaacaaaattaacggcattagaactgagtatgtattaaaacttctactgtcttacaaaatttagttttctttcttatttttctttccatgttgactcagtaggtaaatggactaaacacacattcatttagggcaggaagaacttcatcatttgattacctttagttcatttaccttataatgcctaaaacaaagcagaaagtgacgttggttaatcaaaaagatcactttcttttttgtgttcttttgtgctattgtgagatgcctcttctccagcaagctgtagttgttcacaaagtaaagctgttcctaagccttcattagattgaagcttgtcccagactttctttaaagaagtttgcatagcttagttcatgctcagatgattcagtgatgatgatgggttgttggttagaaattacttaaaaatgcctaatacattattgactgataaatgttaagacatattctttaagggtctaaatcctattcttgtggagctgcaaagatcttgggggtgtggttgcccttgtctgttgcatcatctttcaaatgcaacagctgtaatgatattctgtatcttgaaaaacttaaaaaagcaacaactaacttatttgtatcttttcctctaatatttagtttttacttcacttgtaacttattacatgtattaaggagtttatttttttatgacattttactcataaaaggatgaaaccaagattggtgatctgttcacatagattaaaatcctgtttgtgaccacttaggtgtgtaatgtgtgacttgtggactgtgtcagaggaagattttccaaccaaaagtacccattggtatcacagatgaaaagtccttataccatctgaaaaaaagtagaaggtggggagaagcttgaaaacctaaggaggccattaggaaaggctgtatattttctgattccgtttaaaattttaagttggtgaaaatactatgtgatcgaaggatgaacatattttagtaaatagagttatagtgctacaatgagataaatttcacaggtaaatgtgacgtagctaatgcataatcattctttgtgttgcatggcaattctgtacaaatagaaggtagcatgtttaacgttcctgttatttcacataaatacagactgagagtttcagtggtctggtttgaaagggaagaaatagaagaaggaaggagagaagttggcagaggagcaatctgctctaatatcctccagtacacaatctagctataggtcctcacctggcagggtttgaggatcagaatggtggctcaggtttagacaattctccctgtttgtggggcccagcagctagttaagagaaaaatcttttttccttccctattaccctataaggtccccaaattcattgtatgtagaatacttgagtcagaataactttcctaacacttaagtttcaggtttgttaggtatgcctgacagctctcttatcaactcccatttatttgctaatctaaatgaaagtttgatggtagagtattgtaaatgtagggaaggtgaagtgttcaccttccagatggtagctatttatctcagcaagaagagcagatgactaacacccaaatacataaccattattatatgacttagcatttataaggcatttctatgcatcctgagagactagagcactctcaaatgaggtttcagagtaagattcatctttgcaaatgaagacaaattagcaaaatcttcctatttttaaagtgtgccttttgatttgatacctatttatttgtttggaaagaagcttttaaaatcaaaaccatgaatctgtggttatcttcaaaggataaattatgataggtagttgttacccaggttaccattttaagatgattatggctggcccaaattaggggatcttttcatatatgtattatatattttaacttcagtcttttaaaaatgaatattcctaggtggcatgggagggtgggaaggtcaaaagcccaaacttctcttacttattggctgcttccttgaacttagcgtttttcttttggaaaagtgagcttttgtttttggatattttgtactgatactctgtgcctacacagattttgttttggttcaataagagttgatattttgccaggggttgcctcccatgagattccaaatacagatgtaagtttaacaggcttctgaactggatgtttctatgcgctgaaactctgtaaacgcgtgtagctttgtctaccattgtatattgctgtattgatttgttgggttgttttttttcttcctcctgaaaagctctggtctgtcctctgctgatacaaagactggtccattccccagggtcactgcaagagaacctccagggcctggccactgttagatattactaatctgtgaagttgctccaaattctcttgccccgatcataaagttccattgagttcaattttatgtgaaggttctttgtcaaaaggaataaatgtttattcaacagatccagttgttgtcagcattgacagatgtgaaaattagcaaatagcaagaagtctcccctttagaaaaggaaaacaagtacttaaaaaaaatcttgtgttgtcaataaacaagtccattttaaaagcatctttgaaggtgtgtaatgaaaatggaggccttaggttgtatcagggtttatgaggagccagcttatctgtaatcagatgttcctgttactgttatcactgtagtatagggcttagttctgccctttaagtcacagactcaagttactcctgattttaccagcagtcagaatacatttttctttaaaaggaaaagagacgatatcctagtgcttctctatactaaaacaggaagagaagcttccttgttgaagtgacagtttagatgttgttattttgacagaaatattagtaaatatgtcacattatcccttgctaaatatttatagcatagaacgtatactctgatgcataatattttatgaaagaaatatcttttgcctcaaatccctttcactgttttgacatgaatctataatttatacccagaggtctgcaggaaaaagactttattaagacccttttatttcagccaagataaaactccatcctaagagggaacaccctggaatctttgagacccttaaaggtggggtattctgaaatacctgtgttcgttcctttgctagaatttagatagcttcacttttgcaaaaaggcacaaaatgagggcaatttttgatggaaaattttagtttttgagatgaagcagggggcacagtggcgaagcgccctatcttagcacttaggtagcagccgtaacaagtgtcctgggtattcctccctagaaaggaaatgttggtcacaaatggcagtgtcctctgcattcagttcagctatgtgactgaaagacactgttcttcagcagctgtgagtttacaagatgtcgcacattgagtatttttctctagcttatttagaaacgccagtctagacttccgcagttttggattcgtggccatagttttggcctttattagatggccctcaaaggtacttttcaggtggacattgatttcatgccagctgtcagagatgattttccctagaaatggctgggtatatggagacattctgtattagaatggaggtatacacccatctcttctgtattagagagcaggtgttgccccccgtggtgctcagattgcttagtgtgagaaggaaaagaccagtgataagaggaggaaaactgcgccttccatgtagctcagttaacagcatcatgattctccaggatggccccatttctgtttttatttacaaaatggacttgagaattaattagtaagcaaactgtctccattaggtaagtggcattctgatttgtctgtgtaaagttccatttcccaagtaatgtgttccaaagcatttttatgtacaactactggaaactgctgtacaaatgtttgctgctatttggttgtaacaaaatcagtaatgagtttcaaaatggaataatttcagagcccttcatctacagtagtttgggaaacacttgaaataccaagtgatctgaattcactacaagctctccaactggaaaatgtgcctggtgtcgtcttcaagcaagaatcccccgccccttaaccactgctgctgtggacttgagtcttcaaccttgttttgtagactttagcatttgtattgtgtcatccttgacacctccccaaccccagccttcccagctttgattgcttaccttagcaatgctctcagcttggaccagaaggcacggatgtttccctgaccttaacctcactgtgtatcagctcaaggaagaagccagatttgctgatgttgtaagcactaaattatgttcataacatttaaccctcacatccataagcaaactaagtgggaaaataaagattgactattgtagcagtcatagattgtttaggaagcagcaaaaaggcaaatttttctttaaagttcaaaatggggcgaaagagggtaggaaaggaaaagtttattaagaaaattgtatactacattaatttgactttgccgtctagacttaaattaaattcatgtatttttttggtcttaacacattgacatgtatcagtaagttaaaaacttaaaaatacacaaatgattagattagcattattatgtgtttctttcttgttttttgttttgttttgttttgttttgttttgagatggagtctcactctgttgcccaggctggagtgcagtggcatgatctcggctcactgcaagctccgcctcctgggttcatgccattctcctgcctcagcctcccgagcagctgggactgcaggcacccgcaaccacccctggctaattttttttgtatttttagtagagacagggtttcactgtgttagccaggatggtcttgatctcctgacctcgtgatccacctgtctcggcctcccaacgtgctgggattacagtcatgagccactgcgcctattatgtgtttcttatagaaaatctctctaattttttaataagcatgtttttacaaatgctgtttcctgagaactgtcgcaccacatgcgacatgccatgcatgcgactggaacatgccagatatttgtgggtggtcccttcgtgtcacctgtgccttcttaccaagtaatttgaaacacccgtgtaaactacctttggcaaataggatagctaaatcaccgctaagatttataatttactttttggatatctgaaacatcaacaatatagccatccatggcgtgttcctctggagtgtggtccgtgccgtctctgcctgctccatctggctgatcccaggcaggcagctcagctctcagcagacacagatccccagcacatatgaacgtgaaagaggcttctccgtgggagcgaagtggccagcaggtgtcacaggctgtgtgggcccagcatcgtgtgggcactgctgggggaatcccatcacagcatgtgctggcgttagtagtagactgtgtgtgtctcagagggtccagaaagtaatacagtaaaggcgcctgggggtgtgtgggggtggttggttggggtttgcttgttagtttgttgtaaaagcccagcttttcattcttggaaagatttcagccaactcgagagggttacctgccaggaatgctgcagaagcaagaactcagtgggtgagcacttccatttcttcaacaaatgcttctgagtccctgacctgtgccaggtgctcttcttgagctgagaatcctgcagggaaaaaagagataaagaccccatagtcctgtggtttaccttctaatgagcatacttttgtcgatcaaacagggtgacctctctggtgtctctgcacactacctgtatggtctttccgtagctgatggggtctcctgactagtgattggtgattttaatctggattttgccacagcacttattttctaacatatgacttaatttacttaataattgtgtctattgaatgtattcttatacatacacacaggcatgcacacacggacacgaatataagctttacaaggacagaaaccttatcttttatttatttcttccttgtgtatcctgagcactgagaacagcctggcacaaagcagggctcaggaaatgtttgctgaatgcatgttcacactggatgtgttcgaaggctctcactcgcgactcctgttggcttgtggagagtgcatctagctgtaaaagccatggtgcttggatgtcttggggtgctgagcctgttcccccctcatttgggggtgtggtgctatgctggcgtttgggtccatgccccgcatttctgatggctgccccatctgccctgtgtggggtggcagagttctgtgtacacagagttacatttcgttgttcctggcttctctatggatgacagcagcactgataaatgccacacctgctttctcagcagtcttgcggggtgatttttcctcttaaggaagtcacctgatgtccatgctgagtaggaaatgcatccaaagctttgggagctcagtgttggcccctgggctgcagcccgagccccgttttagagctgtgtctcccaggcagctgtgatgactgctcgaaagcccactcagggggaaggtaaacctgatgcccgggtgtttggacagtgagcatggcgagtggaccgttacctgtgcatagagttgttcatatgtggtgacagatgttgggctgttatttagtaacttcaaattgtttttctttgcgtcggagccatgtctaggttctgagtgcttctcccaggtcagatggagagctcttcatttggggttgggggagcggggtggtgttttcaggtgcccaaggcattccatgcacatgcacctgcagggtatgtgtcatctggggtaagacagagccctcccggttcctcttctggatgtgtgcttttagtttttaaagaatgtcagtatatacattgccatttattcaacaaatacggactgagcattctgttgtgctgacgtagctacttggggttacagagacaaagccaactccattctccaaatggaaaacaaatggaaacattctagtggtagaaacagacaacaaacaagtagacagaaaataatgtcagacagtggtaagtgctatgaaaaaaatacagactcactgattgtgatggagacttttaagttggattctcatagaaggcctttctgaagaggggacatttgccctgccactgtgaatcagccatgagaagacgtggagaggaacatgaggtggtaggccccagcgagggaaagatctccatgatggcatcgattattcgctccacaaatattattgagcacctgctgtgtgccaggcactgttcctggtgtcagggttatagaagtggacaaaatgaggcctctgcctctgtggagcttttattaaagtagggaaggggatgggagggctgggtcacatgttaggtgtggggtacagggtacgtggtgccaggcaggtatccgggtacctttttacgtagggtattcagagaaggtctctagagaggtgacatttggacgaagacctaaaggaaagggaggggaaaggcgaggagcttggagagcttggtgcatcttggtgggggatggggtaaactgagtcagttatgtagggccctggaggccacggtgaggacttcggctttgactctgaaaggagatggcagagtttggagctggtgtgtacgttaacaggaccatgctggcagctgcgttaagagagactgtaagggcaaggacagaagtagagagaccagtaggagtaggctgttgccccagtgtagggcagagaagatgaaccttagaccaggatggtggagatggtcagtggagagaagtagtcagagtctggaagcaccagcaagactgtctggtgcacacaggatgcacgtgggatgtccagtgaggaggatgagatgaggttgggtggctggagcctggtgagtgacaggcagagagggctattagatcacatgggccctggagccatggtgaagaatttggattttgttctctgtgttggaaagttagcagagagcttatatggggggtgagatggcatagggacaatgttaataacagcaacgaatatttattgagcacttactgtgtaccagctgttgcaacagcctctcaagggttcgttctgctattagagccatgttataaatgaagaaactgaggcacagagaggttagctaacttgtccaagatcacacagttagggacaaacttgacagaattatgtgtgtcctggtatgtatttcagttttctttagggaaggtaccacaactttgggtaactatgcccctaccccaggatttaagatgttttgatggttgaagggcgatgtttaagagtgggaccagagaatattgaggtattaaaatctcactaaatctgtattcattatatctgtattcatggtataattcatgtgcctccccctttcgtgagcccctcaaacatgatcatggatatgttttctccacccgtaaagtacgttcatattcatagaaaacccacagagaactgcagacctgaaggtttctttgtaagagctttcattggatagctagaagggctgcagtaagtttaaaaaaaaaaaacccaaaccaccctggattccaggctgcacagcctctaggaggtgtgggtaatccctttataaagcttggcataatttctgttaagacttgcttattttgctctcagcttgctatcttgatatgtttgcctttgaggaggttagagttattgtgatttaatcacagaccatgtatttcgcaagattcatttggtatctccagcttgttttcttgtttcctcggctgtcagtccacaggcagaggtgggaggcggccggcatgggggaccgagtgtggtagaaaggagtgtttacttagcggaggggagtgctgagggctgctgttaccttcccagaatggctgatccccagcagtgatgagcaggctgggatcgtggtgttaaatttggtattttctagaaatatatagcaggctttcccctccacctgccccccttcaaggtttcgaagccttgtgttttgcaagagttgagaggggaacagttaatagcttggattatcttgtctctggagagaatttatgtatcaattcaccggaagactgctctggtattagggcaacaagaatggttttatttctcccttcctttcctgcactctgttcttatgtaattcttgtattaaaaccattcctggtaaattagaacatgctcttgtatttgggccctgctttgaagaaggctgctgagtctaaaaagtttggtagcctctcgtttctcatggtgatttctgagatttctagggacttggtgttttacagagcttgttgagttgcacaaaccagcctccttggcccttctaggtgataaaagatgctgggctgggagggcagctgtggaaaagggtgtgggcgagggagacagtgcttcatcctgcctggatgaagcatgttggttgttggtttattcataaattagaaaaatatattaagaattgaagttgttccttatctcataagatttctagcaggctgcataaagtctgtagatggtaatatccatttaaaagtggacaatgaaaaaattacctctttgggagttgtgttgctatctctaccccaatttggcaatctttaattaacttggcaacccccgttttaccaacaaagaacaacctttgattaaaaaaaaataaaatgtcagggagtgaaagatacggagtgtgactcagcagatgggaattcctttaataacacgctgggtgttagcgttagaaccgccactgaacagctctgcaggatgccctcccagccctccctccgcctatttggattagaccaggagactgcagcaaacttctcaaggggaggcgaacttggtgttggtatctgagcgattgtctgtttcaattgtttccctctgtcttggaaaacaccggcacaaaacacaaatccagtcccagttcctgcagctgctggggcgaagcaggctttttatgaatgaggcccagaagggggaggagagggcttgtgttacagcagcagttgggtaatacatttcattcacttgcagccatctagcccaggcttcattttaaaggatattgttcatttttggcaattcagattagactttttttcttccttgtgcaactgttggtaagttagaacacgaagcatgtgtgtgcattctttttgcttgcttttttgagtgtttgctcctttagttgggataaatggtaggagaggtaggaaggctttgtcatccccggggaccttgcttacttctccctcccagcaccacttaagagaagaggaggtggcctccctctccccaacctcagagccctcaaagcccttgatagtgagcctgagcacttgttaggaggtgacttctacctggggtgtgctggggtccacatgtgccagtctctctgccctgctccccgtgagcggctctttatttgtggcccttgaggccccattgttgtggccaccaaaacctgaattggaagctgtgtgacaatgctggtccccctccctgcactgcttcctgctgggggcagaacaaagagagcgggcattgtctctggcataaatgaacctctatcaaaacaaacacccagagagaggggcagcctggttacagctgcctgtgtgagcctcgacagtgggcctcattcctcacaaagggagctttgaggcccggaagaggcctttccttgatgatcgagctgtgcacagggagcaaaccccaagccgactgcttgtctgtgccaccctcaaacaatgatttccccaaattggacagcctgggtttgtatccttgagcacggttttgggaagagcattctgcatgaggcattgtagctatgtgtatggagtataattctgttttcaggttgctctgccacagaggttaagaactccctcttccaaggtagacattgagaacagagacgaccacactgggttttcactgcagcttttaaacaggatgactcccagcccccatccccgtggctagcagcaagcagggactctgaaacactgcaagccaatggactgagcatcttacttttgctgtccgtgttttggtgttttgtaaacccatctggtaatgaccctgatgccccatgtcccagcaagggcataggtacctgccattgtgcaccaaagtccctttcctcatggccctggctgttctcctgcatggggtcatgtgtgtcccgttaccaagttgtggccccttttcaaccttgagtgccacatctgggctgttgtaggcatgggtagtacaagctgggtttgttactctaaaaatgaaagggaggatcagttgttaataccttcctgtaggtgcgagagggaatgagttgaggattcgatcactgtttatagccagtctcggatcctgattgtgaagtcattctttctggataataactactatatccagcatcttgagagtataaaataaaggcacatgttgtacgtcatctctgagatgtagcgatggcttggactttggaggctgatgagagaaaactcatggtggtgagctggagcagggtgtggctggcggattctgaaggtgctagccctagttttacagctgaccagggaaggtcattgaaccctacagtcttggccctgagagaaccttggaggacttaaggatggagaaaggtgacaaaagagatgcaagccaacagcaattttgtggaacaaagtgtgtacaggatttgaacttaactctgcgaaagacaggggttgcttgtatgcacgaattcacatctgaagaatgcatctgattgtggctgcaatttctgtggacgtgcaaacatctacctgtgcattttatttgtctagcatcattgaaagagttttttgcttgagttgatttcccaggtaattgaagcttacttctcaaagcacaagatattttttctcatatattagcggtcttaagtgagtgagacccctaagaattcttaattcctttatcttacttttcctacaggaaacttattatgttttcctagataggaattgtgctaccaaaaatgaaaagtaaacgtaatatgtaatgttctactggtaattgtttccattttaggttgacaccgaactaatgatatttaaattgtagctgacttgaaacacagtgaaaaaatggtttcctgctgtttttttaaagctggattcagtaacatgaaggtaattaaaaatgtacagatctcagtaatagacagtcatatgttgcttaatgacagggatatgttctgagaaatgcattgttaggtaattggattttatcattatgccagcatcatacagcgtactttcacaaacttagttgatacagcctactacacacctagggtccatggtatagcctgttgctcgtaggctgcaaacccgtggagcatgttgctgttctgaacgctgtaggcaatggtaacacagtggtaagtatttctgaatctaagcatagataaggtgcagtaaaaaatatagtgtaaaagataaaaaaatggtacacctgtatagggcacttactaggagtcaggcttgcaggaccagaagttgctctgggtgagtcagtgagtcagtggtgagtaattgtgaaggcctggataaatactgtacacttaggctacacttagtgaatattacattttatttatttatttatttatttatttatttatttatttatttatgagatagggtcttgctctgtcccccaggctggagtgcagtggtgcaatcacagctcactgcagcctcgaccgccaaggctcaagcgatcctcttacctcagcctcctgagtagccgggactagacgcacacaccaccatgcctgactaatttttgtgtttgtagtagggatgaggtttcaccatgttgcccaggctgatctcaaactcctgaccttaagtgatccacccgcctcggcctcccaaagcactgggattacaggcatgagccacggcgcctggccacagttaacttttttaataagtagaaggtgtacactcttaaataactataaaaagtatagtaaatacataaaccaataacatagtcacttattatcattatcacatattatgtactgtgcactgttgtacgtgctgtacttttatacagctggcagcacgggtttgtttgcaccagcatccccacaaacatatgaggaacatgtacatcttaccacggttgcaatgtcactaggcaataggaattttctagctatattctatccttacaggaccactatcgtatatgcacttcatctttgaaacgctgttagctgcctcatgactgtatttctattcctcagtcatgggctcaccatgcagtacacatgtgtggtcactggagggaatggaagaacactgaggaaatgcatagcctgtttcatatatttattacactattatttatttagaggaatgttaagaaatcttgcttttatgtagttttagaatgccatgaaatatctagttggggcattatctgccattttgcaaggtaatcttccacttctgaataacgttacaagtaacccgcgtttggaggactgatttgggactaaggcaaggaatttaggaggcacaagtagaggggaagaaataaacacatgacttttgtttttgtttttgtttttgttttttgaaagaaggacagtggtttgcttgttgattctgctttgagaggatggggatgcactccagagaaagtgaaacggggctatgggaggaagagagcagcgcacacacagcacctgcatttgattgtgaatgcgattgtgactccttaggcaggaaggagagtgctaagaccgtcatcatggacactcagaaaatacctgctaatccgtttactggaagatacagggagctgcagataattattgttttttaagatggagtttcgctggagtgcaattgtgcaatctcggctcactgcaacctccacatccccagttcaagcaattctgcctcagcctcccgagtagctggaactgcaggcgtgcaccaccacgcctggctaattttttgaatttttagtagagacagggtttcaccatgttggccaggctggtcttgaactcctgacctcaggtgatcctcctgccttggcctcccaaagtgctgggattacaggcatgagccgccactcccggccgctgcagagaatttttaaaataaatgatagattctcacagataagaagaacaggataattatttgccaaagtttgaaactgccattatattcaaaggcattctcttttgggagtggttttatatttaaggtttgaatttagatgacctcaatcttgaggtgttatcggagcattacaggggagtcttatatacatgcaggtgcgatttaatttgaagatacttccatttaaactttatgctgccagagttggccagctaagcaaaaagaattctgataggtcttattctcctccccatcccacacgctgattttttttttctttgtgtttggccgaaacattttacatttctcatttttcacagagctactgtttctctaggattgttttccctgaagtgtgtaccctgtgtttgggcagagcagcaagaccagacttccaaatggcatgctgcgttttaatgtgctttcataattgtctgttccaaaagggtgcctgtgtgtgtatggtgtgtgtgtgtgtgtgtgattcagagcacctgagagcacactgcccgttgtcccctccagcccttctgaaatgcaggccaccctttctgtttcagttgccccttgggtggcagtctgtgataactcaaggtcaggaggaagtatttgttttggttgtcttgtttaactaattaaatctttaatcttggtccttaaaagaaactaaaataaaatcgtaaagtagttctgataagtccttgccataaattattgcttttgtaaacgcacataaaggactctgaactgttgctactcataacatttctgacgccaaatgtgtggggttttgccataccaacaaccagttctctaactctccagacaccaactgggggccttacaattcagtgcagttctgacactcaccacctggagttagcacagactccacagggatgagggttcagtcccacgagtctgcccttgctgcagatgcgagtagcaggtatggggtgcccacacttctgtctgacttgcctgaaaggttgagagtttgttgccaggccccttgctttcaggtctgataacttgctaggttattaaacctgaaacttgataacttctgtagatgttgaaattagaacggcctcactcacctgggctcacaaaattccagaaagtagttgacgtcctattactggtttaccgtgaaggctctatgtccagagtggacaggacaagtggaagagtggcacagggcgaggtgtggggggtggcgtggagctccttttcaggagtctctaagaaggtgggactccagcggcaatgccttgtccatgtgctaagccagccgagggcgcacgaagtgctgtgtggtgtccaagctgacttgggagggaccagtttggggccagccccccagcctcacttgtcatgtcccacctctgctggcatctgtgggcttaaagtgccttcactcccatccttttcaactatttcttgattaaaaaaaaaaaacaaaaaactgttgaatagtaggagactctctctctcattggtatttgtgggaataaatattaaataaacactttctaataggtgttaccaggacgcctaaggaaattatctcacagagttttcaacactgtgaaaagagaagctgactgccagggagagatccctttttcctagtccttgtgaacatgtgctggacagccaggagtggcactgtggcaagaaacacccgttctctggcattagtaagagggatatagccaagggtatctgtataccagtgttaggcccatacatccataaaacattgatgtgagagctttagggcacagctgaccctaagcctaacgtgatcattaatgtcatgaaaattggagaattggtcaggcgcggtggctcacacctgtaatcccagcacgttgggaggccgaggtggatagatcacttgaggtcaggagttcaagaccaacctgggcaacatggtgaaaccccgtctcaaaagaaaaaaaagaaaagaaaattggagaatttataacgtctgatgtgacctgttctttaggtgttgaaattagaacggcctcactcacctgggacattcttcagctcatgccctgtacctggcttacagttgctcagtgaaatgctttcttgattgtagcatggtgggatttttataaatccaaatgacttagaggtaggtgtcacatttttagcagctaaaatcatactaatcgtaaagctcagattcctgtaagtagggcgctgagcacaggctgcatcctggatatatgaatagatgaaccagatcgtgtacatgtgggacacgttctttgtcctttgggactttcttttgcttggatgttggtagtaaccatgtaagttcgggcagctttctagaaactttccttgttgtgcaacattatgcaataaatgcactgctttgtgatatctgagacgttttggttttcttcagcttgtttgagttaaatttagactcctggcatagttttaggtttgaatgcattctctgagataggataaggaccaaaacatccactcagcagccagatgggattttatccttgtgctgccatttttgagactcatgcctctgtttcactctctgtaagatggcattaatagtgagggattgttgtgctgtgaggtttaaatgagctaatccctgtgaggagtttacagcagggcctgggccatagtgaaacactgtgtatgtggaagccacttcacttttgtcatagctttgttgtcattagtgtataccctgtctccttgccgtttatgggtccttctttcaagcagtcggattttctgtctgacatagtataagtttagaggaaacaatagcagctgtaagataatagtaattttccttctgaaatcattttggtgaatttagtcagaatatctgatccataaactctcattataaaacattgccttatgattggagttttttctgagaacagttccaatgaacatgattttttggtggtgaggtactatttctgtgcagtaatgaagttgtgaggacacacagataccacatccatgttgtttgggaattgtttgggaaaggtacgtgggatagcctggcatggggaagaatgatgttagggtattctccttgaggagctcagaataaccaaaggtaaagcatttggtggtataagatatattcatcttaaaaataagttgaaaataataagatattgggagatgttagccaccgaagtaaataactacagtgaaatagctctttattaattttgaaacctaaagttgaaagagttccgtattatttgtcagtatctttatcctcttcaaaaatgtttccagctttgggataaattgtgaataattgtttcactttgttttttaatattggctatgtagtgattttgcattgaactgtgatataagaatgatcatcagccccttgagattactgtgtgtacctgtgtcaccagtggcatataggggcttaaaagcaagcaagtttaatatatacattcattgagaacacactgtagactgttaggattttcggtgctggagccatagtgatgaatatgacaaggccctcacccttgaggtgcctatagtcgtgtggaacctaggtcctcgcagggactctagggcaggtatgttcttgaaagatttttttttttttttttctttttgaagagacagggtcttgccttattgcctacactggagtgcagtggtgcggtcatagcccactgcaagctcaaagtcctgggctcaagaaatcgtcctgtctcagcctcccgagtagctaggactacaggtgtgcaccaccatgtctggctaatttttatttgtattttatttttatagagacagagtcttactctattgcccaggctgatcttgaactcctatctcaagtgatcctcctgcctcagcctcccaaagtgctgggattacaggcatgagccactgtgccctatgtaaaagattcttatcaacagttaaaataagaagctgctcaagacatttacctatcctgaatgtttcaggccctcaaggtgccaggtagctgcaatatagttctagtgtagaaaagaaaaccctgatgaggtctatatattccaggactctgtctgaggccctttgacactccgggggcaccctgccgtgaccctgactctttcctgcatgtactgaggatggaggtagcctatgggtggcacagagatttgctgtctggctagcagtacttcagggtactgggtggcttgaggacctcctgttagaagcttggattcacttttcccaaggcaaccaggattggattctattagttctgggtcttgagagcctgcaagggcttccttctgcgaaggtgagtctgggagagacgccatggagtcagtgtgagttctgcagcctcccaagttccgctggcgtgagaggcttgcctggtgccagggctctgggcattgggaacattgcctggtctaccgggcaagaaacgtgaaccaccgcagtgaactggcagcgcgttggcatttttccctccatgtttttataaaaccgctgagtagacaccagattataaatcctgtgtaaatagtcttgaagagtttctgggttcagccccagagaagactggtttgggttttgaggaatacttcaagaaaatgtttgttggttctgttttccaacgtaaagtgctgcacaaggactgtgctgtgagatccaggagtgtcttttcagccctcagtgagtgcctgcaggggacacagctgctttggaggaatgtggttccggagggtttcccactctccatcctagttgctaaagtcacgttccacgtattgtgttctgatgatagaatgaaagcccactccccgcaccctggggtctaggtggggaaaggagaggtgtatatgggatagccacggggtttggcatgagctcagtagagacagcaaactgacccagacagactcccgctttagggaagctgggatgaactaagtgaaggtgggtcatgggagcaatgctgaaccactttggtggttacagtgaaggctgctacacacccagctttgggaggtggggcccagggtgtccagctttgtagaaaggcatggtgtgggggtggctggcggagggggtggtgggtggttttcctcttgaatctctgagaaccttgactggtgtactgctctctgctttcctaaggggtccgtagctgtgctggtggtttgcttggtatctgtattacatccactctgtgcttcagcctgtttgtccagttactgtgtctagtgaagctagcattcacatattttagattaaattccacactccacccccaaattaaaaccctgctatttaaggtaaaaataattttaaaatgttttattttggtctctttggataaattaatcttgaggaaagcaatacttactgaatgttgatgtgtgtatatgtctttctctttgtaccatacttaacaggcaagtaactctcttgtaaaatcagattctaaatgattttcttttcttttcttttttttttttttttgagacggagtctctgtagcccaggctggagtgcggtggcgcgatctctgctcactgcaggctccgcctcccggcttcacgccattcttctgcctcaacctcccaagtagctgggactacaggcgcccgccaccacgcccggcttatttttcgtatttttagtagagacggggtttcaccgtgttagccaggatggtcttgatctcctgacctcgtgatccgcccgcctcggcctcccaaagggctgggattacaggcgtgagccaccacgcccagcctctaaatgattttcttaagtgtaattcaggagttggcaaactacagcccatgctgccacatctggcctgccacacctgttgttgcacataaagtttcattgagtcacagtcatactcatttgctttcatattgtctgtagacaacctagaatgttagaaaattctttctctggctggacgcggtggctcacgcctgtaatcccagcactttgagaggctgaggcggccggatcacctgaggtcaggagttcgaaaccagcctgaccaacatgggagaaaccccatctctactaaaaatacaaaaattaaccagatgtggtggcacatgcctataataccagctactcgagaggctgaggcaggagaatcacttgaacccaggagttggaggttgcggtgagccatggctcatgcatgtaatccttgcactttgggaggctgagacgggcggatcacaaggtcaggagatcgagaccatcctggctaacacggtgaaaccccgtctccactaaaaatacaaaaaaaaaaaaaaaattagccaggcgtggttgcgggcgcctgtagtcccagctgctcgggaggctgaggcaggagaatggcttgaacccaggaggcagagcttgcagtgagccgagatcacgccactgcactccagcctgggtgacagagcgaaactccatctcaaaaaaaaaaaaaaagttatttctctatgtaaacaaagaaaactctccttccttataacttgtatgtgttgggtctatttgtattctgtgaaccataagaaataagtcaactatcagctgggcgtggtggctgacgcctgtaatcccagcactttgggaggccgaggcgggcggatcacgaggtcaggagatccagaccatcctggctaacacggtgaaaccccgtgtccactaaaaatacagaaaattctctgggcgtgttggcgggcgcctgtagtcccagctactccggaggctgaggcaggagaatggcatgagcccgggaggcggagcttgcagtgagagatcgcgccactgcagtccagcctgggtgacagagccagactctgtctcaaaaaaaataagtcaactatctcaaggtaattacccttttgaatacttgaggacatcttttctgtgccctctgaatatttccttccccagataaaatatttctagttcttttacttgttctttgtttcagagttttaagtctccatttgataaagtatagtttaatagccttcgaaaccacatcgttgagatttaaaaagccctccttgagagacatgaccagtagaaatcataccaggaccgtttagcaccctaactctgggagccatggctcttgggatgcggctgaagattgtgttatcgtcctgaagctctcttggacagctgagtcaatgactggaggtaggaaagttccttgaactctttcttgtgcccttccagctgtgagctgtgtcaccattgtattatttttacattgttgttgttcttgaaaaagcttttttttttttttcaaggcagagtcttactctgtcgcccaggctagagtacaatggtgcgatctcagttcactgcaatctccgcctcctggtttcaagcatttgtcctgtctcagcctccccagtagctgggattacagacgcctgccaccatgcccggctaatttttttaatttttagtagagatggggttttgccatattggccaggctggtctcaaactgctgacctcaggtgatcctcccacctcagcctcccaaagtgctgggattacaggcgtgaaccaccgtgcccggccaaaaaagcttttgaaaacttcgtcgtataatattatggccatccttccaaacgtgacctttttatgttgtattttatctaactaatttgcccttgcccccaacttttatcttggaatttcttacgtattaatatactgtcagggtccctgcttggggcattgtccttgggcttgtcattagataactccaagttggcttgactccagaggagctgccttcacacgtgctgtgaaatgtactgttgttgaccagagaccatcgttatcattaagtccacaaacctgcttcctgtctcttaggctgttccagtcttctatcgaaaaacagtggtttaagtggcttctccgatagtgctggtgaattggaagcttctcgtcatcccccttggctggggcgaggcttacttcctggggccttggcagttttgatctaactgacttatgttacctttctgtattaatcaagcctttttattttccatacttctgatgctttgacatcttggggccttgctgaccctgaagagaccagcccccctagggttagccagttcctaggtagtgaatgagtacaatgctcatatgcaaaataaccaatccaaaggccacgcccctcactcatatgcaaaataaccaatccaaaggccaggccccttaccacctttattgggatttcatactccaggccaatattgccctaccttaatcaccctagggccagataccaggcaagagacagcccctacaccccagagcctgtcagaattactccagccagctagtcctaaacctgcttaccttgtgtgatttattccttcccaaggaaaccacaataaaggctctcctccatgttttcctaccattccctctgcctcaggaccaaccttggttcttctccgtgtggccccttggcatggtgcactacctcttcttggggactgtgagtaacagactttttcagtggcaattgtcttttaactgttggcctcaccgtacctgaatagcagtaaaccctacatcttaaaatactttgagattgtcacatacagtacccagaataggtgaggatgaaggcaatttactggatgcagagcggccccagtccattccttatgtccgaatgctaagacttgagaaaggtggagaggagcctgactatcaagagttgccttcttggatgaagtgggctgaagacacacgaaccccttccattaatacatctacatattttccaccattgtaattgtattaataattggagaaaataacaatgactgtcaacaacaatagcttaatccagtagagatgaggtccggaataggttctggcctacctcagttcatgttttttactttcaatgctgaagcacaagcaaatgcaaaagcttctcttgaatgttttgtaaattgtgggataattgaggtatgtgacatggttaataacccagtgtctgctcattgagcactgggttattaaccatacatagcaaatggagcacatcatcgtgggttgcttgcgtcactagatcctgttgcaaaaccaagattcaactttaaaatacattttaatttaagttactctttctggcatgaatgatacatcactttggagcaacacttaccaggcagtgaaagctttttttaatgccctgtgtagcactgctttcggtgcccttatatgatttggatggatggatggatggatggatatagccacagggtcttgctctgttgcccaggctggagtgcagtggcaccatcatagctcactgcaacctcaaactcctgggcttaagcgatcctcaacctcctgagtagctgggactactacaggtatgtgccactatgcccagctaatttttaaattttttgtagagatgggggtctcaccgtgttgccggggttagtctcagacttctggcctcaagtgatcctcccaccttggccttccaaagtgctgggattacacgtgtgagccactgtgcccagcctgtttatatggttttaaaaacaaaaatgtatatgctctcaagatggctttcagagagcttattagtgtcttggccatttggaattccatttcacttaaattagaagagtgaaagagaaatgaatggaagaccaaaaatggggagaagaaattgtatctgatataagcgtggctctacctgggagaatggccattccgaattactggaaacaggaagaagacttgctatgatgcttccttatatctgtgggggaaaatcaaacttacattctgaaaggaaacttaatacttcatgtttttaaacacaaaaggatattttttcagagtagcagttataaagttgttagtttaatcttttagttcagctttttttcttaccagaaaaataattagtagtacaaaaatttatgcgtttgttttagctctattctgatactgttaagaagatacatgacataaaaacaggaatattttcagtcagtgattacaatttaaaatcatattcgaaatttaataaaaagtttaaaagaaatcaccagcataagatgttgtcatttggctcttggggcaaaccagctctcttctggtgaaagaactttctggatgaggtcgaaaggcaacagaaaacctggggaacaatggctgtctttttaatgggagttgctcctattcctggtggtaacaacctcttcctgttgctcctttccgaatggaattgcctcagtgaagttgttgaagaagtgaggagggcgaaatatgcccatccttctacagtggggagaggcctggcgcatgaaagcaggcctttgtgtatgccgggctgggcccatgcaaacagggcacaatcaggctattgtttgtttgggaaaagctatggcatcctattgcaattatttatggaagaaaatatttgatgtttttggaagaggttaggtgtggggggtgatgagggagggaggaaagagactgggcttacctcttgtcccattcactccaaatctctcagtgcgtaggatagggtccatctggtccaaaggagagttttgtgtgactctgtgtgttggagtgttttcgaaatgcagagaaattcagagcttctctagctttggctagagaaggaacaatggaagtgagtcttattctacctaagtttgatgtggggcagcctgttctgtagttgccttccaagcccttcttctttctgatgctttcttggtaccattgcccacatgctgcctccaccctggatgaggtctagacctgttacattgattctcaactaattaaaagtcaatatggtaaaatatttgcagcattccttctccttccctgtgttcatttctgaagctcaacagtcttccatactcaagctgtggggaggtccctttctcctttgacaccagccattttgtgatctgccctttcaggccaccccagccaccctactttcccagtcttgcctctgcctacttcacctcttctctcgaacctcagaagcttctggagtcttcacagtggccctaatcatgggtctcatccttgttttcctgtctctttgaggttccagcagccagctttgcctcatcaggcctttctctgaaattcccatcaataactacaagatctgcccagtaccttgtgcatatcaggtctcaggaaattgtgagtttcttgtttcattaagcatttttctttccaggaatcatcattcatcgcattgccatatgtgtccagatcccccttttcagggagccagtaattcgaaagcacttgcctgtgttgaatatggtggaaaaaacaaatgtcaaccctagccggccatcactccccatcggcccaccccattctcttgtgccagtaggacttgcctgtgttttctttgggcagttcaaagttgggctcttgagaagttgcctgtaaattcaattgaagtgaccagatctcatccttacccactctgtagctgcagataataaacactggggacttcccttgtgcctgtgttttaatgtaaccttaagacttgatgctccctggagtgtaagaatatgaatagctactcgctgtggatattgcagttaattactccttcctgtcccatgtggtccccagaggaatatgagattgccacaaacatggcagctttctttggggaggtgggagagggagatgaatcttggggcaaggcacattctcataaccatgtggctccagaaagctgcctgactcagagaatggctataaatgcccggttgtatggatctgagatcctcaaagccaggttcattcacttatttattaatttaacaaacattaggcagctgtggtgctctgtctgctccagcagtgatcaagacagaaaagatttcttcaatgctgcgtgtggtggctcacacctgtaatcccagcactttgggaggccaagacaggcggatcacctgaggtcaggagttcaagaacagcctggccaacatggtgaaaccccgtctctactaaaaatacaaaattagctgggtgtggtggcccatgcttgtaatcccagctactcgggagtctgaagcaggagaatggcttgaacccgggaggcagaggttgcagtgagtggagatcatgccactgcactccagactgggcagcagagcgagaatctgtctcaaaaataataataataataataataataataataataatagtaagaatactggggtggggatggtaggatgcacagtaaagagaataataagctagtgatgagcatctaagaagaaaacacaaaacagtactgtcatcacaatgcaggagtgctgggttgggggccaggtgtggttgaggggtgctgtattacgctgggtagtcattgaggcctctgtgaaaaggtggcatttagactaagggagattggaaggtccagccatgggaagttcaggagaaaggataagaagaaaaagctgtcacatgggcacagactgatgaccagcaaggctggaacttggaagatgagggaaactgagagtgattgtcagctcaggctgctttgacaaattactgtagcctgggtggcttaaacaatagacattgcagcattccctctccctctctgtgttcatttctgaagttgaatagtcttccatactcaagctctggggagatccctttctcctttcacaccagacatttcgtgatttgccctttctgaccaccccagccctactttcccagtcttgcctctgcctacttcacctcttctctccagcgtcatggttggagaagcatattctcatggttctggatgctgaaagtccaaggtcaggtgtcaacaaggtctggttctagtgagggctctcttcctggtttgcaaacagctaccttctcactgtatcctcatatagtggtgggagagagcaagctgtggtgtctcttcactgattaaggacattaatccaattgtatcagggtctcacccttatgacctcatttgatcttaattgtctccttaacagccctaccttcaacagagtcacatgaggggttagggttcctacatatgaattggcagggtggaggtgggaggtggccggggatgagacacaattgatttcatagcgtcgagttataagatgggtcacagtattagatgggaccagagcagagagggtctgtaggccatggcaagagtgagaatttactcaatacacagtggaagttggggatgagtgagaagcacaagagtggcacactgatttctacaacagtcagtctagctgctgggtggagaaggggagaaggaggaatagtggaaaaagcagggagaccgcttaggaagctgctgggaccgtgcatatgagagatgttggtggcttgaaccagtgctgggtttctcagcattggcagtattgacgttttgggtgaaataattagttggggagtggcagggcggggggtaggggtgcagtcctgaaccagtgccaggtttctcagcattggcactgttggcattttgggtgagataattagttgtggggggctgtcctgtgtattgcaaaatgttcagcagcttcactagtctctacctgctagatgccagaagcccacccaccccgccccctagtcatgacaatcaaaaatgtatctagacattgacagatgttaacctgggattagggggtggggagaccaaaattgtaccctgttgagaaccactggaccagagtcatagcaatttgcagtggatagatttaggaatatttgaagacttgtaaaatatagcctgaagggaatggagactgggagagtgaaagatacctctgagacattttggcttggacagaacagggggtggaggcttccattcctgagctgcaaaggagtggggagggaggagcagtgtagtttgggaagtgtgtggtggagaaggcagatggggcaggagctctgtcttgcatctctcaggtcagaaatgcctcagacatccagggggggcaagctaagatggagttgaacacagcagtgtagggctcaggggacaggccaggaatggagagaaacatttggcactcatctacttgtagcttccctgtcgagaaaaatgaaatcatccaggggttttcaaattcagtggtctctggaccccttcacactgttaaaaatggaaaaccctgccactgtctacatgtttatgttgccccagtaatctatgcattgaaacctaatcaccatgtgatgatattaggagctggggcctttaggaagggattaaatcgtgagggtgggggacctttatgaatgagattgtgcctttataaaagagagctgctttgcctcttctgctagaaggtgccctccgtgaaccagaaagtggagccctcacaagacactgaatctgccagtgccttgatcttggacttcccagactctagaactgtaaggaataagtttctgttgtttaaaagctacctagtttaaggtgttttgttataggtgcccagacaggctaggacaaacgccaataagctttcgtttatgtgggttgtatccattgatacttgctgtatgaagaattaaaattaataactttaaaaagatttattgattcagaaacagtaacaaaacttaatatgcgttaacgtacttttatgttggataaaaactatatcccaccccagtatatgaatagagtggcattgttttatgtgtttaatctctggcttaacagaaggcaattggatgatcatacctgcttctatgtttattctgctgccaatatcacacagcttctggaaacttccacggcacacattcatgagacaataagagttaaaaaggtaaacagtgtcttagtagtgtatgaaaatagtttaatctcatagaccccctgaaaaagctgcagaatccttacgcgttcacaaaccacactttgagaactaaagatcaaggagtacagttttctcatttttatgctgttcagagtgtggttgaagttcagccatcactagtccttcacggatagttcataccccaagttgatggccttgtggaattgctgatgctattttcatatatatatatatataattctagcctttttctctggtcttataagagtcacatacgtaggtaatttcatatcctacaaatatgttctaaacagcagaatattccaggaaaccttaagtgataactgagttgaaagagtcatattttttaagcaatacaatttaaataatttttaaaggaaacatttctaaaggacgttttacattgcttgcattaaaaagaatataatgaacataatccaactttttctcaatactcagggtcatcactgtgaaagtaacttcattctatgataagataatgatgctcccaggtgggcaaggcagtttttcatctaaggtaattgagacaccttttaaaagcaaaagataaattcacagaccctcagtgtcattataaattacttggtataaagatacttaaatacctacagccttataaggcctaggtgtcaattttttacgcttgcagatcttttacaactgtaagttaaatgattttacacattaagtgcatataaaacaaaaagattcaaacccaaatattaatttaatgacatgggtaatattttgctaaaagtaaaccactgctcagaatgtgaataaactgacctcgaaggcctgagtacgtttgaattacggaacacctctctttgacatcacaattgaattttttctttaagtatcgcaaggccccagttcacggaagtaccacaacataaattggtcttcacttggtatgtgaacacatatttatatgttaaatgtgtcttttctttttggtgtacaacagctagagtaatgcagtttgcttgcaatgtgttttttatgtaaatgctgatgccgaatccacttggcagcactgagttacaagaaggttaagtagatgaactagaagatggataaacgaagatagataaaatgaagaaaaacaaaaatcaaggagaactcaggcgtccaagagtgtgtaaacaacttctggtgtgagacgcgctacattgcgctaaatggcctgtgcgcttctggtttttcccttcctctgttgattttttatagttgtcttttattttaaacacgcctcccccccccctttttaaactgattttaccatcactctctctagccctgcctccctagaattagctgcttcttacctcccttggatctggaacttaaatattaacgtgtatataagttaatagtaagtagaccgtgaatttagaagagtaaaacagaatcatgagtacgtagtcactgtggccccttttctgctggatttcaagttcgtaagcatttttggaagagagtcgaaggggaaggggtggcttgccagtcagttgagtgatgcgtgagggaggcgttaaatgtgcatgatgcactaaaatgcatgtttcgagatccagtatgactgctcttccatagatgatgaaaccaaggcagagaaataagatgtaactctcttaccttgattagtgatgagaatgggacagctttattcatgaaacccggaaaccactagcccattcttgggatgattgatatctgcaaggatcttcaggaatagagtacctggggctcaggagccaagactagaagtgttgaaaggtgagcaggaattagctgctggcctcagacgtggagagacacacgggtgtatgtgtgcacacacacacacaggcacatgtatattcatgatggcttcttaattcccactccaggccaactcatttccctttcccttccacaggtacttataccataaaaggtatatgaagtgctaaaatacttgtaggtatgttgtcaatatgagctactctgtaaatgataaataataattgactggtgagtctaggcaaggcaagtcaatgagattacaagaaaagagatgttaggccttcagaaagatggaaatttctctttgtccctgcagggactgttgcagagcattagagccaccctcaaacagttacccagtgagtctcctcaaagcaagtggcactgagatacaaccttcctacaggttttcaagtcatctcgtgtggtgcacagtcctcgccctacctcgaaggcccgggcgaagttttcctgagtgtgtatactcatctctttgtgttgtctctggcagggagcaagtgagtacaggattggagtaataggcatttttaggcttgagatggctttgtgtgtttggttaatgtcactacatttcctaggggataataaaagtctagcatgataaaagatctcgtcttacaaggtcccgatgtaaagtttggagcctaacttagaatttaaaataaaatacattttgacccattgtattgagagctggtataatttaatatagtgagcccctcggcttctggttggttgggttataaagcttcttattcattcgctcatccattaatgcatttctcctatgaggaagctttttcctttgagctgaacacacaaaattaatcgtgctcgaactctccaaattttgtgagttccctggtaactgactgtatggaagacagaaataaaaatcagaataaacttttattttctgaatcagaaagcagttgctccagcttttggtggtcacattgctaagatgtaaaaaacagaagttaggtgaaataaattaagaataattattttggagaaagagagggtagtgtttgactaaattagaaacattctctgagtcttagaagcgtgaatgatttaaatgaggttccagcatagtattgcatgtggtttctattttagagttttcccacttgaaaacaaactttgaggatttttattgaagtccatcagttttaacttactcaaagcttagcagccaccttttgcttttcttcccgttccccccacctcatgctgtgaagaaagtcatacaccattgtggtgttgattgaaacctttatttctccaggtctcctctcataaactgggctaagaaacacaaaggacatttgacacttcatgactacataagatgtgctgttcctctctctttctgtttgaaagtgacttggcagggtgaagttgagaaccccttggaaaggaggaagccgaaatgcaaacaaagttgaatcatgaagtgatgtcactctgaaccaattggagcagtggtgtcatgtgcctggcagctacttcaaatgcccacaaaacaggagtaatggtttaagctgtttccctcttcccctcccaccaccaatcagcagcagactgctagaggacagatgcaaaacagttattagaccaggcttagttagacatggaggatgcatcttaacaagttagtacctttttgcaaagcatgaagactaattcaaagtctattttctggttttgctctaccagtacggccaaaaccatttctttttaagtgagaagtggggatatggtcaggtttgattccagttgaagttgtgagctgcacagggctggtctgagcccagtggcatctttccaggtgtcagagccatgattttaagctcctgttaaattcacagtgcttagtaaccataacttcttggtttcatgatcataggggtttttgcatagctgccacccccattttctgtttgtgatccagtagttaaaactcccagaaaatatttctcaccctggtttaaataaacaaaacagccaccacaaaaacaaacaaaaacttggctaaccactattttcaggcatattctgagagagaaagagggggaaaaaaagactagacatcctaaaattaagcaacattatttttggaattgtgttgtttcttatactcagtcatttgtgaatgatgtggttcaaacaaaactgaaacaaaaatagtttttctcattaaaaatatgtttgtcgcatagccagcactcggaactagggagggtaacatggaagtattgtcattctcggggctgactggttgacagcagcctatacaggagtggagaatattgacagggctgcccgttctccccaggtcgaagagagcaaatgcacatccctgtgtgcacggccacctggttcctctcctcacttgctggtgagtattgaacggctcacataattaggcagaactcaggaactttcctccctatctctttcactcttctgaaatgccctttatgttttcctctgctctttcagtcccagtgccttttctctggtgcagcctcatggttcggtctcaccttcagcttttccttccctccaatacatcctgtaaattattgtcagacttcttcttatctaaataactcgtttaggtaaggtactcatatgttcaaaataccatggtggctccctgttctctgtgatgtgaagtcctaaccattagactcagctttcccccaggacaccttggcttatcttcttgctgctttccagaggcatgggccattaggctggttttctgaaggttctgccaaaaggctgggcccttgtctcccaccccactgctgttactcatgtgttctcccacttgctcggcattctttcccatgctttttccttgatcatcacttactagctaacatctattttttcctaaacactctgttgcagttgtagtctgcagtcactctcctaagacttgatcatctattacgctgtttcgttctttattttttaacttttcttcttcttttttttttttgaaacggattctcgctctgtcacccatgctggagtgtactggcacaatctcggctcactgcaacctctgccttccgggttcaagcgattctcctgcctcagcctccctagtagctgggattacaggcacgcgccatcacacctggctaatttttgtatttttagtagaatcggagtttcaccatgttggccaggaggtcaggtcgaactcctgacctcaagtgatccacctgccttgacctcccaaagtgctgggattacaggcatgagccaccatgcccggttgttttgttctttaattttacaaacttggcatagcttagaagaccatatacagtggcaccatatacagtggcaccatattagtggcaccatatacagttttccctgagaaaactggtacctcccaacagataccaaaatctgggaccaccccaacagataccaaaatccacagatgctcaagtcccttttataaaatggtgtgatatttgtgtatagcccatgctcatctttccgtatactttaaaccagggatccccaacccctgggccacagaccagtcccggtccatggcctgttaggaaccaggctgcacagcaggaggtgagtggcaggccaactagcattaactgcatgagctccgcctcctgtcagatcagcagaggtcctagattctcataggagtgagaaccctattgtgaactgaacatgcagggaatctcagtaatgcctgatgatctgaggtggaacagtttcatcccaaaaccatccctctcccccacccatctgtggaaaaattgtcttctacggaaccgatccctggtgccaaaaaggttggggaccactacgttagaccatctgtagattacttataacacctaatacaatgtaaatagttgttatcatgtattattagggaataatgacaaggagaaaagtccatacatgtttaatacacaagcatcctattttttttcctgaatatttttgatctgcagttggttgaatccatgggtgtggagccctcagatatggagggcatgctatactgatcacccctatgggtgtgaatgttgggcagatcctccagtgtcaccagccatgtggccttggtgacctttccatacttttcaatcagaatgatgatctccacctctcaggaaagttgtggggatgaaatggtatagtctgtgtgtgtagagttgttaggctggggcctgccatgttaaatgcccatgaagcaggtaattatggtagtagtggttgatatcttgaaatcagggggattcccaaatttctaccccaaatctggatgactgcatattgcgggagttcagtaaatatttgttgcactaatacttatgtgcatacgctgaaataatctaaatatttaaaaaccaaactaacggtaggactttcctcagggatttaacgtttgctgtagaagactgaatgatagaatatataagctgtatttttcttgtgattctacacattgtccatgttgcaacttaaatatttttggaatgcaatgtaaaagtgatttactgtcctataattgttttcctgaaagcaaaatgatatttaagtgaactgcaatgaaaaatgcaacgactgtaatttatcgttgaagggcattttcaaagtgtatagaatgactaaagcttaagtgtattaaatattctagaggaagacatatttaggctataaatctagacttcctttggaatttgtttcctttttctcagccaggtgtatgaagattttaagttcttaggcctcagtgggaagaagatttaaggttccaagagtacatttgtatctcttttaaattttctattgtttatcagtgacatatgtaaatgttttagggagctgtttactgtaacattacctactttagctctgtgcagttgtctggcaaccaatgtgataaagacagagggaagtgctgtattttgttgctgacaagtatatcttaaaagtgcaggtgcacctgaataggcaataaagtattaagagctgctcctggagcagtttgctctctgtgacgtgtgaaaagtctacggggtttataattggtctggccatacggctgcctaggattagactcttttcatatcccactaaacactctccttagaagcaagcacaaggagatagtttattttaaaatgtaattgctatgttactaagatttgaatttgagtaccgagaataaaccatatttctgtttagaggctggttggcttaaaattgtgtctaatccttcccctgccccccaactccgaatcagagaatgaataacaaataaacatgacaatgaagtctcatgctgttgttttcatatttgtatttaggagtttcagagcaaatgacttggaaaacaggcaaatccactgacataggcatttttagccaccttggaatccgaggagggattctgcactatgccctgtaacctcgttcacatgccgtttgaatgtataccatgaagaccccttagctcagggagctttgctctatttaagtaatgtttatattcttaatgaaccaaagaggaagtggtcatgggaaaagagccaggactagatttcattctaatgcttataaggagagttctaggaaaccctcagacttggtaaaccaaggcatttggagatactatgaattggtttaaaaggccatttaccacttcttttgtaattggccttttaaaccaactctcacttagctgattaaatgtggtcatttaaactgctagttaacaatcggaagtgcagtggcgcaatctcagctcactgcaacctctgccttccgggttcaagcgattctcctgcctcagcctcctgagtagctgggattacatgcgcacgccaccacacccggctaatttttgtatttttagtagagatggggtttcaccatgttggttaggctggtctcaaactcctgacgtcatgatccacctgcctcggcctcccaaagtgctgggattacaggcatgagccaccgcgcccggcctaagatttcttattgtggtattctgcagtggagaatgggagttggaaagaaatgttttctcccacacctgtcccgctcctgtctactgaaagctgattaatcagtcagatagtgagttcctattggtagtacgcctccaaaatttggaagaggggaggtggcgtgatgtgaaaaagcaaggctttagggagagattcccgctgggggcattcaccctctggtccagcgtgcctgttacagtgatcactccatagtggttttgcatgaacaagactgcccagtttgcttaggaagaaaacaaaggacataaggtagttctcatgtcttcccagcaccctaaatactcgggctaaacttccacagtcagaccgtcagcttcaggaagggctgctgttgggaactttttttttagtttgcagttagttcagctccagccaaaaacctacaaaaagccactgcaagccctctgcctgctcgtataagacaccttggttgggcccctgtgactgtccatccataggatggttggccattgactgcacagagaggtagggcaagataaaacgactcatttgtggatctgactccttgtacttctgtttggattcaaacagaggaagatagagtagtggccttgggaaaccgtggagagagaaaaggcatagtcagaatgttttcagaggagcgcagacttttcaaaacccctctcatcacgttcccactgaccttcagttccagtgctgtggccacagggtgtctgcaccccaacttctttgccaagaaattaatgatctgtgaagacacacagacatgaggcggacttactatttaaaggaatcctgaaacgaatatttttctgatacatatttatcctaatatatttgctgagcatggtttttttttttttttttttcctattttggagtttttgggttttttaagcctagggaatgcctaatatgtactgtggagtgcatttgttcatttatatcccagtgcattgtaaaatcgagcaattcagtgccttagaatcctttctgtgaacttgatgctacgtgaactacttgagaacaactactttcaagccctccgaagcactcagttacaactgtcggtctaattgcacattattctaattcattaaaaaagtccccaagggcttcttaggatactgctctatgttattagaagtccttccaaatagaaaaactttattaatttaaaaataaccgccaattcagacttcgattcaaacaaggcattttaccaagtccggctgaaagagcttcttaccacatctggcatgtagaatggcagaagactatttttgctagattccttgttgctgcagccgtttctgatgtccttttccccttcacacctttcgtgttacacatgtctgagatgacatgatgctaagtaaccaaagtactgctgcgatggaattgctctgatgtttttttccagagtgaaagctgctattactttaaaaaaaaaaaaacttgaggtttggtttctttccccctctatccgggtgttatacaaatatgtaattaagatgtttgggggttcagatgacaaacaaggagtctacttctaagaatgcatttgcaagccaaaagagtggtgaaccacttcagagtgcgggtctgtgggggatgatgtctgctttgcttcgttttgtggaataatttttaacatttctatttagcattcatgatactctaaatagaagcaggagaacactgtggctctcggatccaggagaggcaggccacgagggctcctgctgtttggggacagtctgtaactctaaatctttttatatgcagcaattatgaccttaaaaatgggtgactctaatactggcattcattgcctaaaaataattttaatgtgcaaatgccagagaccaggtcatctcagaaatggactagaattgaccactgctatgttttggtgaaacctgataaccttgcttttctccgtgtaccttgtttttcattgtaaaactatttaattatgaaaatgagagtgtgaaaggcaaagtatgattgaatttagggggcagttccatatagttgtaacaaactgattatcaaatgtccaccattagtatgttaaaatacggttttctaatactgagacaacagggatggagcagcctatccactgaagtcttgttgtttgtccctgctgtgtcccaacctggaatctctttcttcttccttcagcagacccttcgagatcagcttaagcttcactgccttagagaaactttcctgtctacctggactgtcttctagatttctagagcagtgttcctgcccttttcctttctaaatggggtgggagttctcagagaactcatctcctttatggctttatccatcacagccacacagataggttctgtctggaccatccttttccctgagctttcttctcctttgccatgtgttttcatttctgccagacactggcactggggaagcctcccatcgtctcagactcagggtgtgtgaaaaacaaacctgctttctggactctacagtttgtgcactagcctaagccgaaaatcttgaaatctgtcatcagtgactattgtagtccataggaatacccaagactgggtaatttataaagaaaagagggttagcttttttttttccggctcatggttcttcaggctgttcaagcatggttccaacatctgatcatcatctttttttttttttttttagatggagtctcattctgtcacccaggctggagtacagtggcgccatcttggctcactgcaacctcccacttctgggttcaagcaattctcctgcgtcagcctcccaagtagctaggattacaggtgtgcgccaccacacccagctaatttttgtatttttagtaaagatggggttttgccatgttggccaggctgatcttgaactcctgacctcaggtgatccccccaccctggcttcccaaagtgctgggattacaggtgtgaaccaccacgcccggccaggatctgatcattttctaggaggcctcagggagcttttattcatggcagaaggtgaagggggagcagttgtatcatggcaagaagagaaagagagacgccagatctcctggtagataactaacagagtgagaactcactctttactgtggggagggcaccaagcccttcataagggatccaccccatgacccaaacacctcccaccaggccccacctccaacaatgggaatcacatttcaacatgagatttggagggaacaaacattcaaactatatctacgaccaaattttcctaattcctttctacttaaatgctttcttttccatttatttcacccacatctgaccctaggatttcaacgtgttctaaaatgaatttcttgcacccattttcactttctctccaccagaatccatctcaccacccacctgccagtggcatactccttgcatagaccctgctctagcatgaatatagcccactgttatctgttgtagaacctcacgcccagcttcccaccctgtgtgacatcttcaccctcttgccctggcttgtgccatccacattccgatcttgatgactctggttctcttctctttgacggtggagggttgatcccttccttccccatgatcataaaaggtcatgccaacactcctaaaacaaaagatagattaataagagaaaaacctaacaaatttattatatgtgtgcatgggagtcatacaaaatatgaaaactcaagaaaatggccagatggttgatccttaaatgctttatttattggtgagaaggtattgggggtgtaggagtaaatgattttcagggaaaatgaatatttccctgagacagcaatttacttgtaaatgatgctctttagaatttgaacacgctccagaggcagaaattgtcttgtgaaaaagtctgtctgggtatggttgcattcctcagtcttgagctggtggatggcagggtgcaattgcaggccgtagtgttcctctttggggatctggtttctaggtgggtaagggaacttcagagaacagccttgtcctgtgctttgcgagagacaaaggatgaggaaggggggtcagggaccttgaggctgcttcagcatgtcaagagtgccatgtttgggacgcctcaacactggaaatagccttcattcctctgcttcttgggtctggatccttttctttagactccaagaaattcttccttttgccccaaactcacattgtttttgtcttctgtccctctacttctatgtaattctattattatgcacagattctgtgtgcccaaggagactgtaaactccaggagggcaggaattatgtcttaaaacactagcggttaaacagttaagaggtgtcttaaaacattcctgtagccccagctacactcttgggtgcaggaatcacaagtgccttattccccacagggtccccagcatattccaggagctcattatgtttttaaatgaatgacctactgaaggcaagagaccaggaaggaaagtttgtaaaagtttacattattagattacccctgagatgtgtaaccttctcacgagttagatttcttgaaccactgcccgggtattgtattcctactctaggagcttgaaggattaatgataatccttttacagatatattcacaagtttctgtgaatgtgaattaagtatgtagatcttgattgcctttcttgagtgcatggtttttttctagaaaaacaaatttaagttaggtgggacacctaataaagctctaggctcctttcttttcctcttttaagacacagttaattaccttatgctaagttggaatataggaattatcttccaaaactgtgtttgcttgctgtgtctacataaaaattgatacaaggtatgccatggtttatacaatttctggcacatttacctggtctctgttacaggtttgtgaaaccaatttttttattgtaaatagtacgttaccagcttaattgctttagaacctagacagtctatgtctgtgatagtaattacattctttcatgactttgtttggtaacctgaatgttgaactagctctacagatttaggtcatgtctgatgctagccattcctaggaaaaagtggtgaggactacattatgggcctttccccctagacttaaaactgtgaagaagtcattttgggttgaggtatcccctggtaccctctcctgaacttcaatagaataacatgatgtggtgaatgaaccatattagaaaaaccagccaatcagccaagattcttgtattgactcttctgatctccctctacctctcctttccccatctgccaaacaaagggtttggaacagttaaattctaaagtggtgtcattgatggctctcagtattctgtggactttcctggttgattcagtacttgtgattgacctggaccccctggtttggtccagccttagagcgggtttgcaggtagacaccttcctaatgtttgttccacgtaagcccccggagcacagtatttccatcagctattttgtggaagtgagcgattctcttttggttgtaaaccttcactatttcatgtgggtgacttgacaatggctccatttttgaatggcccattgatagttgtagtctaaaaatttccagagattacacaagggtttatttaaagggaatgggaatagggagaaggtataacctttccaaaacaatctttaaggcaattataagctgttaggaaatgtcatgtaataataacacagatacccaagcttatatcacataaatcattcattttgcatgtttttgacagggagatttattttccaggttaaaaacaaaaaagaaaaatcttaaaagcttaagcttttattgtttgctttttttattaaaaagtaatttggagccagtaacttaacctgtttttcataaacatgctatctagaggcagccaaaaaaatattcatgcttgcatagtcagggtcctcaaatgaacttatgtgttggatcatgataactctggtaattactcgaattacccttgttgagtaatagtatggaccctgaatacaagggtttgatttatgtggccagctctgtgctgctgggtttatgaggacttgccagatgtcatctcctaattaaaatccttctttacccttaatatcctctcctctgtccccaagaaattaatccattctattgctggagcatgtaacagctgatgttgaagttacaagtttacagcttgaactttgcctagactgtaccttttttgggaaagagtttgcaaagcttttaagcctgactcttgtctttagatcaccagcatcaccatggtgcctggcatcagtggagcctcagcaagtgtttatggtggaaacctcagaagctgtcactttctctggctgtaacagttgtcatctttgtttacagggaaaatgctcttgagaaaatggaggtcattaaacactccagcttcagcaatatcatcagagctttccgtcacgtgagttatctcacaaaagggtcagattctggtaaaaactcttgccttcacacttacttctgttttattttgccttatttgacatttcaccagaattgatccataggttcaataaggctccattctgttgggacaaatcaagctagaaagacactgaactctgggggttaccagaaatatctgaaagcaaagcagtgactgtgaggtgggaatctctctgagaatcctttgcagaaccatgtaacagctctgcatcactagacgagccaagcgaagtggtcctggatggttcagtaggctcaagcattgagggtccagagcatcctttgcccctggacatggaagggttttcattgggagatggcatttagggcatccttataaacgagcaggagtaaacctagcaataaaaaccaaacctctgccttcagaggtatatgctattacttctgcttaaaccgttgtcagagctaacagttttggttagggatttttgtgggtccagggcacgcccagacacccagatgcttctctatgtttgtaagatggcgagtgttgagatgtcttataggcttatattgagtgaaaaggaataggatcctttgtcagtagtaacttaggctttttaggtggccagggcaagagaacaccccccctacacacacacacacacacacacacacacacccctacacccacacacacccacccctacacccacacacacccacccctacacccacacaccttcccacacaaacctacacccacacaccttcccacacagacctacacccacacaccaggatttgaaggctctgctaagaggctacaacaactgtagcatacaactagcacacttgttgctattatgtgtaggggactagatggaaagagtgcagataggactacctaccattcacccctaccagcgaagtggaagcactcatcttctttcccttcttaccctttcaaagcaagttgttgagggatgaagaggagagtgactttaatcgtggctttaagtagagattttctttaggagtaattgtttctctcgacagagtggataggcttccatagttgtcttaataccttttgtccaccccaaggattgacccaggcaaggaggatgaaccctcctcaatttgggaaagttaaattttaggcacagcaggtcaaagagtagggaagagctgcagttgttggaaccaagtgacattgatttagtctggaaaggagtcacagaggaatcaaaagccagaccctcctggcagctttagatgtggttggggtctgggaataatgctggtcccaaaatcacctctggaactaactcctgtaaaatgaagcctctgcatccttcagtaacttacttaaaattttgttagggctgcattttcttcaaagccaagttctgaataagaagtatttgttttgggctctagccagattactgaagtattgttgagggagatttgctgtggaaggtgttgggggtacagggattgtgaagataatgtaaaatatttaacattttaaaaattttcagtaagttctctttccccaatgtcagcatgacttcttcattcatgttcttccatcactctccattcagttagaatctcaattgtgtaatatcagtggtagcgacaattatgaaattcgtccagtgaggaaaatccgcagagctagagcccaaaccagcaactttgtagtgaggatgaccccactggccggggagaaactgaactgatttttttttttctctctctctcagctttttattttgaaataattttagacttacaaaaaagttgaaaaagcatccaggcatggtggcttatacctataatcccagtgctctgggaaaccaagacaaatctcttaaagccaggagtttgagaccaagctgtgagactatctctacaaaaaaaaagaaattaagtagccagcagtggtggcacgtggctgtagtctcagctacttgggaggctgaggtgggaggatcgcatgagccaggagttccaggctgcagtgaactatgatcatgccactgcacaacagtcttggagacagattaagaccctgtctctttaaaaaaaaaaaaaaaaaaagtttgtaaaatatcacccagttttccctaacgttagcattttacataatctatacaccaattctcacagccaagaaattaacaatgacacaatactgttaaccatggactatttgaatttcaccagttttcccactaatatcctttttcagtcccaacatccttcattgtgtttacttactatatctagtcttctccagtctgtaaaaatgtgtctatctttgcttgtttttcatgaccttgatatttttgaatagtatggacaggttgttgcatagaatgctccaaattggttctaatgtttctcatcattaaactcatttttatacattttggggaagactactacaagattgacattgcatctcagtgcgtcacatctgtgtgatgtcagcatcttaccactgatgatctcttagccttgaacacttgattgaggtggtgcctgccaggtttctccagtgtaaattttctgcttttcgcattgttactgatatcttagggctgatactcacagtatgcagatgtctcgtttctcttttttcatatttcttttcttttttctttttttgagacagtcttgctctgttgcccaggcaggggagtgcagcctcagacttctgggtttgagcaatcctcccatctcagtttcccaagtagctagtgtgcaccatcactaattagtgccccaccagttttgtttgtttgtttttttgtttgggcagaatctcgctcagtcgccagactggagtgcagtggcgcaatctcggctcactgcaacctccaactccctggttcaagcagttctcctgcctcagcctcctcccaagtagctgggattacaggcaggcaccaccacacccagctaatttttgtatttttagtagagacggggtttcacatgttggccaggttggtcttgatctcctgaccgcccacctcggcctcccagagtgctgggattacaggcatgagctaccatgcctggccttcaccaatttttaaattttttgtagaaactcactatgttgcccagtctggtctcgaactcctggcctcccacctcagcctcccaaccacaactggccaaggtcctgtttctcatcacattgtcactcactgatcttgtcatgctttggtggagcttatctacaataattattactgccatgctttaatggcaattttctatcttattgtcatttattcattggaatttttacataggaaagacctgctccttctcaaactctaaacagtttcattcaccatacttttctccaggtaactttctgggtggctgaaagtgactttcaaagaatggagatatcttttcaatgttgagagagtggcagtctgctggttcccaagatgccttcttcacctagcattgagactctgcagaatgccttgaccacagttgtgatttggatctgttggcttgcaaagcccatttgagaatttacaaaatcattttcacggcctgagagtcttttaggtactgatttttttcatcccttctttactaacagactttatttagtagagtattattggacaggtttggggttcacctttatgagaaaaaacttagattttctaatttcagcttttttattttcttccatcagtgggacaaagttgacatcattgcctaaaagtaatttctgtgattatctgtgtatttcagttaaccatgttctttggactcactgtggtcttcagcagggatggtggccaaactatgtttagaaagataaaaattaaaatgacatctgcatccttcatgtaaacccataaaaaatagcacgtgaccctgaagatcctctgcctctcattccaggcattacaattgaaaatgctatctgggatgttaaaaactaaaactattctaggacttagtggaatattgatagttagggaatgctgtttgctttcttgaattttgaacctgttattgagaaggtagatgcgcctgtttaccccaggaaggctcctctttgaagacagtgcccctggagcacatgaccttttcatgcccttgcctgtcaagacttttccagtactctaaggtcaaagggcgttgggccaggctgatctaatcagggtattaaccttgccccactcatcttgatttattcctagatcccagttcccagagcatccctttagagcctcagaaatggaacaaaagacagctgaaataagcccgtggccaaaaggcactctgagcatgagggaagtaagcaggcttccctgtcactgctgaggctctgtcatccagccccagctgtcctcttgtgatcactcagcagacccgggaaaaattcaagaatttgttttttagtgtcagtgggagacgtggggatcctgcttttgctgggagagcttcagttgtctgagtccccactcaaccccaggctcctgccaaggccaccaagggcaggagcactggaaggctgactatggagtgaagaggccactgggtttcacaaacagcactgtcagccaaagctgtagcttgttagccatccaaaagaatcttgcacctgctgccagtgagcttacacctagatgacagctggagctgacactcattcagcccttactctatgccaggtactattctaaacacttgccatatactcagttgtcccacagatacaactatttatccccactttagagacaaaaaattgaggcacagaaaggttaagtaatttggccaaggaagtgcagctagtaaatggcagacctggggtttgaaccgaaatcagtgtgactctagagtacctactcttagaccctactctctactgcctctcattagaagtctcccccacctccctaccaccaccatcaccacccaccctcccagccacatatatgctcacactgggtggttcagatggctagaagtggcagctcaaccttgtgtgcctcggacacgaaaatattaggttcagacaccactcagacttcacattttcattagttttgggtagaggaatgagaataaatattcagcgagacagccttttctaactgcaagattgcattcctcttctttctagatgcagtggcaagaacagtaccctggatggtggagctggtagtggtagatgagatagagcagtcccttgattctgctttgtccccattaatgacagatctgagggcatccagaaggaatctccacaagcccagcctccacagtggctgcttcctctacatggtagagtggtgctcacctccactcctccatagatgccaagtcatctgtggtatagatgtggatgtctttgttcaaatggtccttgagtctttgctcagatgatccttggttcttcatttcacctgggaaagaaaataatttgcctgttgtcattttatccataatattaagaaaacttaatggcacaatctaagctttttaccatgttatttatcatgggattacttttttcaggtgtcttctgaacacgcagttgtcccaccaaactttgacactgcccttgtgattaatttttgcctacattaatcactctcccttgttttaattgcacattacattcttttctgtccttcccggacatctttgctagcacagtgagtgcagggaggactgtcacggactctctcccctcttgaatgggggcattccagcagagtgtgttacatgagctcagagcacatgatgtgagagcctcgtgatgaaagatactgcaaaaacagtgcgcactgttatcaaacctgactgccttcacatcttgctttctgtggtgcaaaataaggtttttatagtgtcctgtttcttctgttatcatctaaaccaatggggaacggtgagtaagtagtaatcttcagaaaagaagaaaagacagggaggagaaagtgtactggaggcctgctttaccattaagttgttaagatggagtctcactctgtcaccccggctggagcgcagtagtgcagtcgtggctcactgcaacctccaactcctgggttcatgcagtcctcctgcctcagcctcccaagtggctggggactacaggtgtatgccaccacaactggctaattatttatagagatggggtctcattttgttgtccaggcggggtttttgttttttgttttgttttttttttttttttgaggtggagtcttgctctgtcaccgaggttggagtgcagtggtgcaatctcagctcactgcagcctctccctcccaggttccagcaattctcctgcctcaacctcccgagtagactagctgggattacagctgcgtgccaccacgcctggctaacttttgtatttttagtagagacggggtttcaccatgttggccaggctggtctcaaactcctgacctcaggtgatccgcccgcctcggcctcccaaagtgctgggattacaggcgtgagacactgcgcctggccgtccaggctggtcttgacttcctttcgcttgtagcctcccgaagtgctggaattacaggcgtgagccaccgcatctggtctctaagttttttttgaaagtgtgtgtgtatgtgttgaaaaacaatcttactgccatcatattgaagttacctagtgcatttcttcttcagggtacgaagaaaaaagaaaagtatgtcctgtggttgatagaaatcagtaaaatggagccctgtacgaggaagtgctgatgagactccaactaactccatggagatgagctacaaaaaaaaatactgattgggttcaaatccttggcctgccatttactggctgtgcttccttggtcaaattacttaacctctctatgcctcaatgttctcatctctaaagtatggaaaataattgcatctgtgtgaaaactgagttactatacgtaaagtttttagaatagtacctgacatacagtaagtgctgaataagtatcagctagagagagagagagttagtttccagcagcctgtttctgtttggggtcacatgtggtctctgtccacctggctttttaggcctctcttacctgttccctgtttatccttgcctgccccagggaggagtttgagttggtacatcctgactgggtactctgcctgtggttagcaaatactctgcatgttgagtgctttcaaaatacagaaacaaacaacttgtggaggcattggaaaagtgtgtttgagaaacaagcagcctcaccatgaatgggagtttgtttccctttctcgtctttctggtcatctgctgcacgggcaggaggagctgtgggttgcttttcttccttggaacatggagcaccactctcccctgtgctgatacacttacaaagaagttcacctactccttggaaagttctggaaaaggggcttctacactgttggcctctcgaggagaacggtttttgtttctgtcttcctggaaaagaggtgactgctggcatcatctttctagataaactccttgctatgatgccattagaagcagtgttcttttgtgttttgcttttgtttttccctgtagacaggaataacattttgactagaaacttccctgatgtaataacgaagatggcctccttagaaagttccagaacagaccccttcacctctgtccccagaagcagaagtaggtgatgcactttcttggcaagccacataactaccatttctctacaatcgaagctcaaaaatctgtgcttgtatacgttcattttttgtttttacttctttacttcctttgataagacagaaacttctgtattaaaactgatttaactctgaggggctaagtgaacaacaatctgttgtcctatagaggtcaaggcagtgctcacaacaggatcattgtgctgctgtagttcagtttaggggacggggaatgtttataaaaacaaagttttgaaatgaggacagggaaaggctttgtttacctggggctctagacttaaggtactcattttgcctgcagaataatgaaatgcagagttgtaattagaaaaggttgatgtaattgatgtgttaacaatttttgaggtttttctctttccactttaggacagtcatgcaattatttttctgaaccaaaatcagaaccatcagtcgaaggctaaaacaggcctggggaaacactgtcttttggcaaagaaagacaaagatccttgttctctaggccagtgtgcatatgtgtgtaatgctttaaagaacaattttgacaagaactcttaggatgcaacttgtagagtgatttttaaggagatgcagtaggatttgtgcaagtattctgctatgagcctaagattttcaacatggaaatctagccatgcagtgactcgttcactttggcagtgtctatcttagtctgggggtgagcgtttgtagaaaatatttagagactcaagtacactcatttgaatttttgctgttagcaaataaatggcaatatgtgtaacgtggtgaatgggatgtaaagctgtctttatattaccacggttagaatttaattttgaaagttgcaagtcaaactgcttcctcttgcgtcattaagttgtgcctcttgtttgctcaccggcatgtgtgtccttgtgtcattttggttgctgtgaaattgctcttaccattctttcatccttcaacctgctgtgctacaatcctaacatgctgtttttgttgaaaatgcattcactctttttggcatcttttttccccagaaagttagaatattgggaattcattggtattagtgaaattcccacctaatgcagcagtttttttctcttacctgcataatagacgcagaacaaattaactctaaacggattagagctgtcaactgacagatactgtgcgagatactgaggaagcctcagagatgataccaataaacaggacagggccttctggtcgtgtttctacttctcttattggtttgtcttagcaattttgaattgcactgaaaacgaaatttcataggtacacgatacagtagttagttttaaaagtttttaaaatattaaaaaattgaaagtatttaaaatatttttaaaatattttaaaatctgctgtgtgagatagataggagacctagcttttcttccttcttaccttgatccatagagaaagcaaccctgaaagaagaaaaactcacccatttgagctttcttttgtttccactgagcaatacggaagaaattcaccgctggttataggtcttcagtgctttcttcagagtgggattgttttttgtttcaccataagtagtagtctattaaattaacagttgctagagaagaagctgcatctatatatgcagttctcttcttgtcaagcagtatattttcacgatagcaatgaaaaaattccatcctcaccagccgctgaaacatagtaatactgcagaaattcctgtgaactatgcgtttgctgcttccttttgtttgtttgttttcagagcagatgggcttgtttgctttttgcttaaacattaatcaaaaatcaatttatggctatgtaagtggcattagataattctcattctgactacagtaaataatatctatttgttcatgttagataagtctgggcggcagtggaatgtaaaatagaattacatgagatatgacatatggctatgtgttttataaattaatgcttttatgcatgtgggaggagaagtaatttagcttactgacaaaaagaaaagcaaaggaaattccagagaaagaacaggataccaagtctaaataaatttggaagacaaagagaatatcatagtttagttcaatcttttaaacaaattgtcacaatttatacgttgggataagagaaccatgagaaaaggtatattctaagtcctgaacatctttctataccctgaagatgtttttatagctcttctgctgactccctgccaaaaaaactatttacggtttggggtagggggcgtgtcatgccatacagctaaatacacttttttcctaatctaggaggcatgtctacttacaaataaattgcttaaactagttaggcttgtgtaaatgtaactgacatttccttgagatcagaaaaagttttgctgattaactatatttgtgtgtgtgtgtgtgtgtgtgtatttagagagaaggagggattttataattattacaatttgatttgaaatgtctagagaaagtgagagattatggaaattaccataaatgctccctttttcatagatttagatctgttaattgcaagaaatctttttttaagtgaatcaatgggaactttttatttcttccctaagattcatttagccttgaaaaggccaaaagttgaatgaagcttctaaatgccaatctttccctccttctgttaaagagtatgcttcaactataattacatttgcattgtttaaaatattagtaattctacagccagacctctgagatagctgagaaaccaaaaagtgaagttcaaagacatcatcaggcaccctctccacacacaacataccaggcccaccaaggagtttacatgagtgtttttgccttgttagccgtggaacgacctgggcagtacccaaaacttagcaaactcttcttgtaccttgtattcagtagacggtcagtagcaccgagagtagggagaagagtaaatatgtttctaatactttattcaatgtatgttgttaacagtgtagacactctgactttccttgtgaattgcgcctcagtatttagttttcatttaccctggatcagatagggcatgataacctttgaggggctttgtgcatatgtaatttggaatctgagtcagtcgggctgtgtctctcccaacttcccttctcatattcttctctctcctcctcctcccctccctcctcctcgcctccctcctcctccccctccctcttcctcccctccctcctcctcctcccctccttccttctcctgccccctcctcctccctcctcctccttccttctcctcctcccttcttcctccttcctcctccccctccttcctcctcctccccctcctctctcctcttctctcgtttctcttctctctcttctttctctcttctctctctaccattgctgtcagttgagatgggcctgtgcggcactttgtttgcagttgattggcaatcttctgttctactactgcatctgaatcatcacttgcttccaccagttctctgaatgtcttacctagtgatcctggtggggaaattacagtgattagtgttccaattcttgtttgcccataagtgtttcaaagtagtatttttaaaaactcttctaagacattctctcttctcatagtagatgcagtgaatcttaaaggtgccctaactaaaatttttgtgctataaaattggcagctttacaaaataaaaggttcgagatatgagcctgatcaaggctctgcatttgcaacaatatccttggtttgcctggccctgttatattttgctgttgtgatatgactcctgccagtgctatttccatttaacctttgtttttctaaaagacagtaataatttttcatttctagggagtctctgacatcagctaaaggaaagacacttttctttgactgtatatacatttctccccatttcattaatatcaaagttgctctttcaaatggcttataaaattttaaaattacaccagttgcataagcctgcataaaaagcagactcctacataagctgacaatgcatttgtaccgtggtgttgagcagttttaacatcctccgtgcctctgtgcttctgctagctactgctctgataaagttatcaaggtatcattggatgcattgaccaggatgaagacacaacagtatggccttattaaatttggaaataatgaacagacgagtagagaatttaggagcaatataggcaagcttaataggtctttactttggggcctgtaactccaactacatatggaagaatttaagtacaggaaaagttaagctcttttcccagtagttctgctgacaagttgggtgacttcgggatggttacctcttcatgataccacacggtgatggtaacagaggcactgtccagtctctggttcatgcacactggtcttctcaggggtccctgtataggtgacacagtggagaacagggcagtactgccagactcagggacccagttcatcgagaggggcagtgtttctcttatgctgccttaaaggcattggatgccttttggaaagccagtggacaactcctgcatccacccaagattaatgttaacagcttaaagaatcattgcaatcaagggaaattttgcaacactttgttgggatatttttaaataaatgtgtgaacaccttgttttaggcttgctgaaaatgacccaggaattccttgacccgggaatatagtgtatggctgccaattattatattccttcatcagacaaaggcggaacagttcactctttttcttttttttggacacaaattctcactccctcacccaggtcagagtgcagtagcatgatctcggctcactgcaacctctacctcctgggttcaagtgattctcatccctcagtttcccaagtagctgggatttcaggcacgtaccaccatgcctggctattatttgcatttttagtaaagacagggttttaccatgttggctaggctggtctcgaactcctgacctcaagtgatccttctgccttggactcccaaagtgctgggattaaggtatgagccaccttgcccggctaccggacagtccactctttacaggggggcgtcttggtataagtatggaaagctccgtagatgccgtgtcagtccataccctcaccaccttcttgaccctgtgccgataaactaagagatgtgggcagtgtaccatctggaaaggaaaaggctttggagccaggtagtcctgcctgcatttgaatctgctttctaccacttacttacatcaggttttccttgtctataaaatggaagtccttgtacccaccacctagaatggaagtgaggattaatccagaccaacgatgaagagtccagcatgcaggaaatgctcgtttataaccatggaagtttcgaggacttttgaaattcgatgacattaacctttgaggtgcattttagttggcttgtgtgatgaggcctttctacttctagttccagaatcgtctggatctacattatgtgggaatgtttattcccccctttactttcccaaaatttgctaaacattttcattgctatttgagttttttaggagacatactgagatgaagttagggatgtgaaaggtttactgaggataacaccaatgaaaggaagagaggaggaagatgatgggtgtggggagcggtttgaccaggactctgataggacagacactctgccagccctccgggagctcatttgcagagccccctgttagatggatataaccgggccctgggaccattgctgggctcagttactggccaggagctgcctaggaagagtgtgacctaggccaaaagttgaagtggaccctagaagagctagcagctggagggcatctgctagtgacactctggagctggacagcaagtcctttctgaaagaggatctgagctgagtatccctgtggtccagtatttcaagttggaacctctaggtttgaaaaatacatgttttgggtgagagtttgattattcttaaagggacatatctttcaaacatatggctgtggaagaggaaacttgtttttgacttgtaaaataccagcagagccttgcagtgatcacaacttatgtgaaatacagaccatcacccacagtttacgtgttcacactaaagtgccagtctctctatgggttttagagctgatttagatacatgcattgctaatacagtcagcccagccaagatagtgccatcctccgcaagcatccactaaggcatggagtcagcttccgtcattgttagatcagtacttgtttctttcccttgcttatttttcctaacctctctgaacctgctgtgttggaagcttaaggaacatcatcctctgttgggcagaattcttccatggccaccccagcattatgccccacaccatttgacttactcatttgtgaatgccaactcagaatgtattgctttgattcttgattaggatctcaacctctatttattgttaagactatcaccctttgattcccccccatcccattgtgtccttctaaaggcacagaatagaacatcttctgccagaaataacatacaaatttatcatcatacaactgtacaatatgcaaataacttgctagatgatattactgaagattctacatccaattaaaataaaaagagaaaacaccttaagataaccatactattaaaagatacagaagacaactggaataaatggaaagacataccacatttattagacaggaataatcatcattagcaagatggcaagatgtcagttctccgtaagtttttcaatttaatataaatccaaatacaacagatttttttcttttagttagattctgaggttatcattaaaacaaaaacaaacaaacaaaaaactgaacaagagcaaggagtccttaccaggtattaaaaacttccatagtgcctaaataattaaaatagtgagataccaatagatgaagagacagaccaatggaacagaatagaaagtccaaatgtagatgcaagtacctgtggaaatttagttattcgataaaggtagcttcacaaatcattgggactaagataaactcttgatttactggattggggcatgtaaattatggcccaatcatgccatgtttcttttctctggaaaagaaagtaaattaggttcatacattataccatgtaccaggctagactccaagtgaatccaaggtaaaagtgtaaacaaaactatgaaagtcctggaagaacacatagcgagttcctttttataaccttggagcagagaaagcctttctagtttcaactcaaaatccagaagccagaaaagaaaacattcataaaaattgaatttaaattacaaaaaaactttctgcatggccaaaaaccataagcaaagacagatgccaaactgagaaaaatatctgaaacttctatcacaaagagctaatctcccttgtttaaaaaaacaaagtaaaacagagctcctagaaattgttaaggaagaggctaacagttcaataggatttgggatgaagtattgaacagatagctcacagaagaagaaacacaaatagctaagcatagaaaaaaagtttgatttcactcatacgagaaatgcaaattaaaactacaccaagataccattttttcacttctcatattggaaaaaatccaaaatatttgataacacactctttggaaaacaaccccacatggctgggaggacggcagaatagcacatctatagaggagaatttggcaatatctctcaggttataaacacgtattctttgacccaccaatcttagagggggcatttaccccatagacttgcacacatgtgaaatgacagttgtgcagttgttcattgtagtgtttcaaatggcaaaagatgaaaatgtcccccaaattccatcactgagggaataagtaagttagggtgatagctcccaagcttattttctcttcagaatcacctcatgaagaaaatgaaggtctgtgtgatagtagctggcaggtgggcatggtggtgagggtggtgtttgagcggagacctgaatgaaggttgagaaggagccagccactcacagacacagaggaggccttcaggctgagagagcagagaaggaccctgtggcagagacaagctggaaacagcactgcttccatggtctggagactggaatatgtgggttctgcagacacctggggggggcaccacctggtaaatctgcctttcagctcttggttcttccagcaaaccatgccagctgtggctctgtagccatgtcctcggaagatggcagaggttgcaacgaggcctctctgaggtgctctgggagcacagaggagtcaggtggaacttgtggcatgttgccaagggaagaagtgatttttagacagaataggaatttgccaagaagagaagtcagaaaagcataactggcagaggaagcagcatacgttacaagtaactgcatgtgtacagggaatcactgagtgatggacaagggcttggcacttggtgggggggggtaccatgttaacatgttagcaagaaactaggtaggggtacttgacttgggggcagcagaagcaggtgtgagtgttggacaagacgagaactgagtgctgcaaatgtttggcaagacttgattgagtgcatattgtggacctgtgtctccactggagacacaaattagaatataacaccttgccctggtatgctcagggtctactgaggtggagaaacctgcaagtagagtcggagtacagtgttgaaaacaccatctgcaaccttaacacagtgctaccaaaaccgatttcggagcactcctgcaggaagtgggctggccagggcaagggaagccgtggagaacagtggcctctcccgggcaggcagggtaaggcctagaaagaataagctgagtgaaggtttgtgtgtggcccatccagggacctgcgacaggaacacagcggctgaggaacggatgcttggagaggagggggtgctttacatgccaggcgggcagggccggggtggggccagatgctggaggagagggctggccaaggggtggcagagaggccccccaggtggcaagtttgcaccctgttgcttcctgcaaggagcttttgtttacgttttcagcttggacagtctggctgtctggccaagagtgacaacgtgacttaccatcagagcgaagcaccaaagagcacataaatgaagtggagatccctcctgtgtccagcctccccctccccgtggccttctcctaccttcccagtcctccatcagtaccccggggccttgccagaatctcagaaagaatctctggactctggctcaggacctctgaggtgattatgcatctagaggcatccccaggtgctgcccaatttggggaagcagcacttcccgctggaagctgggaagtttcccctggctgggggtcctgtgaggatggagaggccagaatgaggaatgggttgtgagtcaagaccaaccagaaggggacttagcaatgtcagatgatagcctgggtgaactacatcctgtgtggaaaaggcaaggtgtaactgcttatttcttgtcaagtgagcctaatatcatcatgtttctttttatgcctgctcccaaactcagcccctcccagtgagatcacagctccaggaacttgcaaggaaagggactaacggggcatctgattcacccgtgtgcccttaatggcgtattgtgtgaataaagcaacaatttttagtacagggatttaaaacaacttctgcaaagacagaactaaaaattaatcttaaaaggtggagggttggggtggagggcaggaaagaggaggaactaaattgccattctctttggagactttctaaaacctaagacgaagaagaggagccgaattatggaaacaaaacctttgcggttttccacagaacaaaaatgatgtgaagctgcaagtcagcagttctggcgcaggggctccgggggacgcccgctccgccggctgtggtgtgcgcccttcctgctctcccctccgaggggctgaggctccttttgtctggcgcgcgcgccccaccccgccccgggcgagggaagagggagcgggcaccccgcgcccgcgccgccgccgtggaccaaggttgtttactactttccactccgaataacacgccaatcaccagggcccaccctccccgccggccaatcgctgcgttgggaaattccacctttccgcggggcccgggcagcgactggctggagtgtctgtcagtcaagtgggcatcccgcaaggatgcagcaggagtattagggaggcgatcaccagagcagaggaggagtaaccttccccataaacaagatgtgttccccccactaagaaagcgggtggagggtggaggagccaaaacacatcccagccccggggccccaccggagcgaagcgggccgagcgcagagtgcagagtcggggaatccctccctccgcctcccgccgtcgctgcagttgtaaacacgtttccctccatgtctgttttcccttctctctcaccgtggccattacgggctgctgtttacaaaaatcctgcaggcctttgacaccccgtcctcccttcccccggcatccctgcccttattctggctttcttctcttccatctcctggtgagcacagcatactgttctcaggcttgttttccttttattgctctccatgtgggacaggtcatgctttatcaacatgtaccattttctacaaatgccgcccttcctctttaaattgcttggatgggcagatcgattttgattagcaacactgcagcagaaacaaggtgcatctctggaaggactgggtggttttctcgttattgttgctggtttgggtcacatcggatgctattttaaattctgtgttttattccacgatgggtcttgaatcctttccctattcctaggtttgaaatatgtttcctccctttaaaaaaaagaaggggggcagtattgtgttgaaccaaatgtttttctaccttctcctgtgatctgaatcaggtttcccatttccagcagtacaatgtggttgtattcagtgtgataggggcgtagtggacatgaattatttgcgacagggctgcctggaagatgcggagcggagtttgcgtggcccggagcagctccagtgtctgaggcttctctgtgtcacaggctccaagcaggaagcgcaggcaaaatggcaaaatacagcatgtggcattcagttcaaaaatgcccttttttagaagtcggtattctaaatgacatccagtcttgcttagttttttaagagaaaggaaaaataatctatgaagatggtttggaatattttgtgaaaagccttttcagcataaaaaagatgatcttgagggtctggtttgcggagtggaggataagcctccctcctgcgattctgaattgctttttggtttgtaggaatttcaggaacatgttgcaaagccgtggccgcttgaaagggtcggtgccctgcgccccgtctcagcccctgcggcccctgaactttttcagtgatggggcacttggggagaagtgcggggagtggaggaggaggggaaggtgcattgcaaatagaaatgtaaggcgtggcctgggtggccaggatgtgccagagcagcctccagacctacttaaatcccaggaaaagtcctgcctcaagttaggcacaacatctgacttggatttctctctgtttttttctcttccagttgtctgtctgtgcgccctctcccacaaggaatagttttccacactgatggaattaatgcatatcgtggtattattggtggaatatgtttaacctttgtttcgtgatttgagaggaatggttcttgtgtatcgtgtggtgacagcaggttaaggagagtgtcagagctggtgcagagttttgccccggggccatgaggttctgggcatcatgactctcttatgaagttacaaaactgggcaagtgattgaaggcagaaagacactgtaataaagtgtgctccagtgatgtgtgctccggcttctctcccttactcatctgggccaggtgctttcgccacagtgagcctgggtgtcccctgcctgagatgagcacagtgatgtctatgcgaggttgtaggactcagtgaagtgccttagggattttgcctggcactctcctgggctcatgaggtgcctagggctgagacttccccttctctgtctggtaaatcatctctcccattctttcttctgcggcccttcatatgagctttgtaatttactcagggtggcagggtgaattcatcttttgctgggtttctgcatcacctgctcctttctggccaggtcagcctgttcattttttccatgccaacagcctctaagtgccagtaagtcacgtctgaacaaccaaagcatgtttccctgcgggagaatgccagggcaggcgggtctgggagccaagaggatttctcctgttcagataagtcgggggaatagaagagccctgtgacttgagacaagctttgagtgacacccagtgaatctcccatcactactttaatccctgccccagtgttctggttccccctttcctgcatgaggcagtacgagtaccctggcctggctttgggttctacacggtctgactttagcctgccttggtctttgttcccctctcactccctccacccctgccccccccaacacatgtggagtaccttaccctgccttcctagttctggaatggctgcccctgtgccaggccaccccattttctagaaccaccttcatacagcccctgcgcatcccactgtactatttccttgtttgtttttcctgtcaatcttgccttccgcgctaatgggacactgatgctgtatggtgatgtgttctcccacagtcatcttctcctcctgtggttggggtggggagctttctctgtgtccccccatgagagtgaggacagtctcatttaatggcaccatggtctgtggagccaggcaggcctgtgtgtctgactccacttcagcgctctcagccagcgtgggcacctcggacccagacagacgccccgagcctgtctttctggagaaggaagtagtaataccttttccttgagggagttatgaggattaactgtgcctggccctgaattcgtgccttgcaggtacttaggaagtgagttattacaagcagtgctttttatcatccatagatggagatgttatctatgctataggactgcagaaagaattacagagaattatgtagaatcactagggacttgattaatatttgtttacctttcccccacatggattgatgtcctttattatacttttgtacccccgcttggcaagcccttgacaaatattgatccaacaaaaaattagctctttaatgtatacgtttagaacctgttgctttgtcagtagtggtttttatgaaaatgaatgcttataggtcagacttctggaaaccctaatctgagggaattgggccaaataggaaagtgagccccttaaaggcagttgtctgaccagtacttggagcacaacaggttcttgctaaagcactgtgtttttaaaacagtggagttattaggttgaaattctgaatagcaagaaaaagaataatggaagtgctgccagccccgtgatgctggtgcagctggtcagtttgcagaaggaggccagttactagagcagagtggccgtagaggctgcaacacggtggccaaagcatgaagctgctgtatagtggcaaggtcacagtgatttccccgcagcctcggtttagagggagacggggtgtgctgagctgtgcctgcttctgtagaaggggccttctccaagtctgagtagccttaagccattaggactgctgagtctttctccacaaaaatatgtgggaggcctgcagggcaggtgctcaactaagctctggggctgcaaagatccagagccatgcccctccttggaggcaggtccttgtagacgaggacaatcgtagccttcctgattaaagcaggaattgtccaatcaggctatatgacgggcatcgtccatagtcttcaccaggggagcttttctgactatacatctctagccctgtggcttgagccagtcacttaatttcccctgagctttggtttcctcctcctggtagcagagagactatcagagtgaggggcagatgcaatagcatatgtaaaacacttagcgttgggcctggtgtttaactgcaataaatgttagctcatattttactgtgacatagatgctgtatgccttttgctgagtattaaagatactgagctgtagcatgcatacttgcatgaatcagtctgctaagttattttaagtttgcatttgaaaataaagggtggattgctatccaaatataaagaattggaaccaggctctaaaaggatgtttgctgttctttagcaaaataccattcttcttaagtttcattcaatcattccacaaaaatttaagcatctgttttgtcccaggcaggcactgtgcttgtaatggatgtgcaatagcaaacagaacacttgctttcagctcacacagagctgactcctgggcagagaatttcgacagtaaagaaatacaagtgtgatgaaggagaaaccctttggtactacctgctacatgttttaatatttaaatgttgacttagggaggtctttccatctaaaaataatgatttgccctttctcctgtaaatgacccctttctcttaagttttgggtgagagattttttttttttaaggaagaaagatattctacaatcgaatgtacaactgagataatgcttaggagagaatgtatactgggtttgtgccttggaagttgcttaggggaaacagttgtgtgcagttggaaagctgatgctttaaagaagcttctataaagtgaccccacaattaaactgttttgtgtacatctttatttatttatttatttattttttaattgagacagagtctcaccctttcgcccaagctggagtgcagtggtgcgatctcggctcattgcaacctccacctcccaggttcgagcaattcttctgcctcagcttcctgagtatctgagattacaggcatgtgccaccacacccggctaatttttgtattttcagtagagacggggttttgccatgttggccgggctggtcttgaactcctgacctcaagtgatccacccacctcggctttccaaagtgctgggattacaggcgtgagccaccacgcccagcctacgtctttaaaaataaatgtaaatacccaaggctcacagttccgttcttccatctagtctagcaccgtccagtggaagtttccaccatgatggactgttctgtggatgccctgtccagtacaggagccgctagccacatgtggctatggagcacttgaaatgtggctagtgctacggaggaactggattttggatttttttaaagttttaatttaaatttgaatagctacatgtggctaatggctactggacatcacagatctaacacaggattaactgacaaaattctttcctcttaaaaatatgtgtttattttgataaggataactgagacctgtacattccatttttcctgtcatatttagggctcataaagggggtggtatgcacgttttaaaaaatgcaacacaaccagttaaaccagctgtctaattgtacacatttcctggagctgttggtgttgattattagcaaatactaagtacttgtaatgacctaagaactataagacaagcaagtcgtcttctgtaactgagtatcagcggattcaagcgttaaggaaaatgattaagagaaaacaaccaaaaaagtcttaatggttctgtcaatcaagtggctatcaattcatggctattcaaaagcttttgtggctatgaaaataaactagattgaaaaaattctaaaacaaaattgaaacactcatttgagtttaaaattttagttgagttgatttttatttcttgttttggttcatttgtagtttccccccgcttcgttgtttcctcagatatggagaataaagcctggctggtcagtttcagtttttatttaaattcattttgtcttcattccttttaatctagcacagtcctgtgatgtattgggatcacagtgctctggggaaacattgaaatataaaaacattttcctgaaaacatttccagttatatttaattttcctccttgaatagaaaaatatttccaacttaatcctccctctcccctcttgaaatgaattgcatgctttggaaataacatcaatccacccaagtacacaaggacaatctcagccatttaatcgagatataaaggcttagagaactctgggcttcggaggcacagactccacctttcaggatgctaataaacgtggacgaggtctcgcctgggcttcctcctccattgttcagcgcagcaaaccagcacagcactccgtggccagggtttgcggggagaaatctctcactctgttttagtagcatcatcatccttatcagcaccctgcttttatttttgaacagccaaacttcctctttccaaacttcgtgtgacatctgggaccagctatgtttgaaggagtctgaacatgccacatagtggctcacgcttttaagggaggaaggccagtaagcctcctcaatggcagaattctactttcagtctaccctttggttctgttgtggttgttccttagaactttattctgctcattaggaagcccagcctccggggagggtttagcttctcatctaagcaagaagtaaaatgtcataatggaggaaaaaaaaaaaaaagtccaaactttttttggacttttagaaacacatccagtttgagctccactgagctatcattgcagttacaaagcccatgtatattgagatcggtgtaaaaattcagcatgtccacctgcataattatgaccagtgtattgaaagcacatttcatttagttttgcaacagccgatgaggtagattctaccaacattgttttacggaagaacaaatggaagcctggaaaaataaattgtctacctcacacacttcgcaggtggtaaacacaggatttgaactaagacatacttgattttaaagtgtttgcttttcctttgcactactgcatctgcgatgtttgcactcagacactctagaatatttggtgttgcatgtttttgccccaagaaagaacccattaaaatgaaactttccagttcgtaagctttgccctcaagaagggaaagaacttcttgcaaggtttctgaaacaaaaagaaaatgaaaagtaactttactgtatctgggttttctgattaaattacggtttttgcaagcttgtgcatttctcagtgtccagatagccaggatttttccttttaataaatatcactttaaaaaacaaacacacacattcttaaatgcatgattaactgtatagattgatttagttataagatgtcctagcctaaatataagaaggtgtatgtgttagaattaatttcttcaataaagagaaagaaattcaggaattgtggttctgttggtcttctgtactgtatatttttgtgcagccaaagcagcatgccttgcttcttggtttcatgaccacatgggtagtttcttgaagttttttcttttgagatggagtcttgctctgtcacccaggctggagtgcagtgacgcgatctcggctcactgcaaccttcacctcccgggttcaagcaattctcctgcctcagcctcccgagtagctggaattacaggcatgtgccaccatacctggctaatttttgtatttttagtagagacggggtttcgccatgttggccaggctggagtttcttgaagtattgactgatccttgactctgaactgtatgatcaaagacttttgaaatggcacaccgtttcttaacatttaggccaatttcagttgctcatatccaaaaataagtcatgattttcggagtcagtgcgcagcacttagtacaacaatccaaacccttgtacagaccatcctagtagaaatgtggatcttgagtatctcagcttcttagtagattttgaactccgtgaaagcaggagccaggcctctcacagcaagtctctccaatatgctcagtaaatatttgtcagatcgagcaatgaccagatgatgaaatacattaaagccttagggagaactgagactactgcaccagtttttgtgcactatcatgctggaaatctttccaacatgtattctgtacttctttgcttcttactccagtgaatataatttagtcatttctggccaacttgaggacatcagcgagcataaattgttgtattatgcataatacagtgataccctcaaggctgagtgggaggcagtttgccctctgctgaaggtttcttgtgcttattgtgttcttatggtttggttttaccatttttatgtctccatttctgtttaatagacttatttcagtaagaagagaaagccgtctccatcagcccctctgtaggtgattatttgccacttcctttttgctgtgagtgctttgaaaacagatttctaagcttgttagagttatgtgttaagagtaaataggcagtaagtgaaaccaagcttcttcctggtgcttgactaccccagaaatgtttatttgctgaatagttgagttctggaaaggtgaggtataaatgtgtgataaatttattcctttgcatgatttttttttctttttcttccctccctccctccctccatctatgtctctgtctttctctgaacatctctccgtctcagtctgtctctctcatgatagttgctggaataatttaaatgaatgtaactcatttacccacatcgaagcccaactcagtagtgaaaaaacaaatcttccaaatgaatgcactttccccttgatgtgctatatacaagaccttggcacacctagttcaatgacatagtattttagaagggcctccttacaccttcctctcagataaatatacatgcagggacattctgaagaagtttgttatcggtcttctcccctcctactattagctccgccctcctagtccttctctttcaccatgctgacccgcgtagggaggacccttacaccctctgcatgcagcgctggtgctccttagtgttcataaccccaacctccatggcctctctcgcagttctcaggttaggccctgcttctaggggacattagctttccaccctctactacatacttcctagttgttgcagcctttgcaagcaaaacttgttttcatttgggagacagcatggtctgacagagcctagatcctggggtgaagacattctgggtttgtatcccgtctttaccacctctgagcctctgatgctggacaagtcagcaagtctttgcaccttagtctcctttctgtaaaaaggagcttatggggatgtaatcagagaagccttagcatggctcttggtacaaggcacggaccaaatccatggtacgctcactcctttcctttcagtaatactgcctaaatagggcacatgtacctaaaaggattttgtacattccttgacagcagaattctcatcttctgttgcatatcccataatgctgggaacacaaaataaaaatggtagcttttcacattcacttttggcctcaattttttgttattccccaatgaggatcatttcatttggggctggtctccggaaaaaagtagatcaagcttttcagatgagatttgggtgaaaccctgacaaactcttttttattgccttccctaccacatagtggtggatcaggaaactgtagggcttatgatgctgggaaatttctgctaatgcaataaagatttttgctgttgaaagaatttgatctgttttatgtataacatgcagagagcagaagcatatattatctgtagcagatgatagagcagggtatatgggcaagttagaaaaacacagttctcactacatttgaagaaaaaggacaaggagttgtcacaaggatccaggagagtcgcacataattttctgtcgtgcattttgttgactgttcctctttgcatccttcaaccatcttaacttcccacttgcacctcgctggaagacaaatctaagctaaattaaatgctaggcaatatgtcagaatggaaagggccctcaacttgggatgcccggttctctaccagcctgaataaactccagcaacagtatttctctaggaatcatctgtaaaaagtagaggtttgtcatatctctaaactagggattcaccttatttattaagctatcagtgactttatcttgaggtgcacggcttttagtaactctggttcaagtgcaaggaatgcaaagttaagtgtatcattggaggtgggatttttgagtttgtcagtcatttattgatttgcatgtatccttatagttcaaaggtctttttctcaacttagttgatgatcatgctgtaagttgttttcttttgctttatcaacttttaaaaacgtttattaacttttaaatttgaaataatttcagacttgcataaaggttacaaagagtaccaggagttctggaacaccctccacccagcttccacagatgttaacatcttacataaccgtaatacggttatcaaaacagtgttcactccatactccagtgctgttaatctccagactgaattcggatttcactattttcccactgatgtccctttttttggttccagatccaagagacgatcctacctggcatttattgtgttcagtttttctaattctgggacgttttcctgggttttctttagtcattcacgaagttcgcacttttggagaacatggggccagttattttgtagaatatctttctgttagagtttgtggatgtttcctcctgattaaatttggggggtacatttttaacttggagatcacagaggtgctgctgtttgtgtctttgcgcatcctgtcaggagatgcgtgatgtttcctttcctggtgctgttagctttgatcccttagttaaggtggtctctgtggcttcctccattatcattactatttttctctttgtaattaggaagaatcttttggaggtagatacttgagactatctaaacaagcattctgttcctcattattctttcacccactaattttaacatccattactgtgatgtttgccaaatggtgattttctatttctgttttctacacttagtaattggattctactctcaggattttatgtattttttaacagtgagggacataaactttttaactagcagtggcaagtccacttttatttgggaggacaattactagtcacatgaagaagaaaaaatatgcagaagcttaagaaatcccacatatgaatgttatttgaaatgttcttgccctttctccctacaaaggaggtgaagaagatgacaggagatgttaattgccaaaatagtctcatagttttggtcctggctgcaaatctctcgtttttgatactcaagagaatgctattggggaactgactctgaagcacagcccagatgcttgagatgggttgggaaggtttacatcaacaccatgaatttaatttatcatgtgacattttatttctgagtttttaaagctgtaattaaaagaagtgttcaaagtgttgctttcctcttttagaataaacgtggctgggtgtggtgcctcatgcctgttatcccagcactttgggaggccataggcaagaggattgcttgagccaggagtttgggaccagcttgggcaacatagggaaaccacatcactacaaaaaaaaaaattagcctgtcatggtagcatgcacctgtggtcccacttacttgggaggctgaggtgggaggatcacctgagttcaggaggtcaaagctgcagtgaggtgtgatcatgcccctgctctccagcctggacaacagagcaagacactgtctcaaataaataggcaaacattaccaacatggcaaacaagttggaggaggccccctatttaattaaatttcagcagtcccaaatctaattggtatgaagaaatcattattcagaattttccatcactgaaatactaaaatcacttgttgtttgagacatcttggcctgtcacccaggctggagtgcagtgttgctctcatagctcactggagcaggagcctcaacctcccaggtttaagttaatgctcccacctcagcctcctgagtaactgccactacaggcgtgtgccaccatgcccagctaattttttaatttttcgtagagatggggtctgtgttgcccaggtccctcttgaactcctggcctcaagctatcttctccagtcggcctcccaaagggctgtgattacaggcgggagccacagcgctcagcctaaaaataactctttagccaaaagaaagttttaaaaaattgtctgttgtattctttgattttactctatgtggtcttttctattatttttaaaataaaaaagatttatactcctcaagtgtaacattttatcaaatctcatgcttctgtttgatgaaaccgaatggctaaattttttaaatatcatgcaatccatcccagtttgtaattttattatggccctcacacaagagcgtgcaagctatactaagcttcctgtggccctcgtttttcctcactgatatttgtaactcattccaaattaaattttaggagtctgaaatgtagctgttatatttgggagatgtgaagaaaagaatcgtaggcatctcagtaggctaggtatcagatcacacatgcttgctggaccaaagaggactccttacagtaggatacatgattctgagttagtttgtgtactaagtatatactatatagcttttgaaggggagacgggcacagaattcacaatatcatgcactaagggttattttgtgtttgcagtttccagatgaatgttttaaagttggctgcagaatacagcgagataggtaaaatctatttgagtattacttacagaccccaaaggatatcccaaaggatatgttggactaattcctaaaatatcctgtaagtcattgcaggtacaggcgtggatctgggtttggaaacgccgcctggatcgctggctgggctcctgcagccgccaaggaggggctggctggaggtggggctcggcgtgcatagcggccacgtgactgcgccccggccacgcccaccgtccctcacgtggtcccaggccacgctgggcttcggcatgtgctaaagtggatagaaaagggagtggggcccgggcgtggctttgtggtttgggaagatatgaactccttggggtttttttctcttttaattctttaattttgatatttggaaatgcgtaaaaggtttttcatttgtccttgaccacgtggtccaaacctcaatttccctagcagaacgcggtttcgatcactggtggatccgtctcacagcaccagtcatgctgcctcgctgggaagtggagggctcaggattcccgtggttcacgatccattttatgttggaaggaaatcattttgaactatctcagtacacaccctagtgtatctttaaacctaattgagtgttgatggaaaatctgcggtccgagaaccgtaagaaaagggggctcccacctcccgctctggggtcgccacttgcctcgcaggcaggaggaggctcccagagtagatacaacttgcccgtcacccggatgggttggtagtgcacatatgcacggggcgcagtttaaaatgaaagtaaaagatgcaaatgtgtttgcaaaagaaaaattaacataggatacgtgcgggcgttctcagttgaactcggtcttactgttccacgcgagcaccccatgactcagagcccaaatctcagcggaacagcccaggacgctcctgccgtccacaggaagacgcctctgtctctgtcccccgccgccaccacacagatgcacgtactctcttcacttccgtgtacccagtaaatgcagatcctgatttaaatctgcagcatgctgctttcttcccattgcatgtgggaagcttcaggttctcttcggtttattttctcatcacctttattaaaatgcagtaaagcaaggagtatattaatgcgggcctctgcaaatagagggaatttattgaaaagcagaatggcttgaaagattgaacttcatcttaaaaatcagaaacagactcttgttattaatagctttagaaacgaaaatctaacttctgataaattatttcagaggagtggttcaaacgtgtagtagatagctctgcctggtcatcaattatagtgacgtccttgcatcagctccagaaactcagaatattcatgagctttccagtctgactcagaccttcaggagccatgaaattttcctgttgggatgagaggaagcgctggcggtcgtttcggcagcttaatgaaaccagaaatagataagcacgagtgaggggtgatgtccgcttgtttgctcccatcatgttgtttttaatgtgtgaaagtgaaagttttaaaagtcatactaaatgtgtgatcctttttagaattcactgggtacgggtacgtggaggaagtgtttttgtttttgtgaatttgtttaaacaaatgactgaggctttgttttccactctgtctggccaagcaccattgctacacttttttaaattcatgacatcctgagcagtgaagctgttcttcagcccgcctctccatttgtgactggaagacaaggaggcagacaccaatggcgcctctcacaatggaggtttatttttttttaatctaacggagggattgtagatggtgtaaaacttccttgtgccaggagagaaagggggagagagagagagagagagagagagagagaaataacccattctaaacaactttaggaatagatgatccgtaggcatcaactttgcgcagcaacaaaagccactttctgaacctcgttctgtgaagttttaaaacaaattgggtttgtttaattaaaatatttcttaaaggcaaaaagcactgagctaatttttaagaattttaagttatatattaatatgagtagtgatttataattttctgttgaaatacataaattcgagaagccccacccctaccacttgccagtcttgagtccccacggctcctttgcctaggtctaaagtcactgcttgcacactcctgccttgcatatgccttgccatcgtgtgggcctcttggctggaagtgttcttgtcctcccgttaggtatcttttatgacgtgaatccttacctctaattattatctgtgtgtacatctcatcacctgcatctgactgtgtgccttgtgtatgtctcttagccctcacaattgcctgacatgccttacaaacgggtagaccaagtgttaaatgaacaaatatttaataagaacttaaaagctttttgactttatatatttttaaagccattgtgattaaacactatgtttgatgtggtgctaattctgtgctttatcaactgtgtgaattgtagtatttttaaagtaggaataattgagaaatattttgaagttaggttaagcatagcagtaaagtttccactttttaaaatagccaaatccaggccaggcgcagtggctcgtgtctccaatgtcagcactttgggaggccagggcgggcagatcgcttgaggtcgggagttcgagactagcctggccaacgtgacgaaaccccgtctctgctaaaaatacaaaaattagatggttgtggtggtgcatgcctgtaatcccagctactcagagaagtgtttgaacccgggagttgggggttgcagtgagttgagatttcaccactgcactccagctggggcaaaagaatgagtgaaactctgtctccaaaaaaaaatcagagcgtggtggtgcacacctgtagtcccagatacttgggaggctgagatggaggtcaaggcttcagtgagccatgatggcaccactgcactccagcctggacaacagagtaagaccttgtctccaaaaaaaaaaaaaaaaaaaaaaaagccaaatctgttgggtttttttttttggggggggggtcctttagaatggccctgacagatctttaaggcatggaaatgagccttatgcaagctcctggcaatcagtatgtgagttctgtctccttggcaagatacagcctcttagaccctcagtctggggaaataatgctgatttctcctacgagttacgagaattacgctagaaaactctgtggcgcatacaggtgccctgtagcctgttggttagaagcactgaccctgaagtcaggtcgcccaggttggaattccagctctgccttcttcaagctgtgtgactctgggaagtcacacacactctctctttgtgcctcaggctctggttctgaagatgggaacggcaggccctccctctttggcttgttgcacagatgaaatctgacagcgtatgccaagcgcttagcacgggtagcagtgagtgccccgtaaatgttaggtaccttcctactactactaaacattcattcttcccttccctgctagtacctgcagctctgactcatctcacacccttgagagaggattatcttcattaaaaagtttttggtctgcccagaagcaagtgttacctgtgagagagctgggcttgtgcataggttagattatttctttgggttattcctggggaaacctgcaaagaaatgcagccagaggcctctggttcattttactgctcatctcctaaaagtggtttctcagatttttatcctttttttctctttttcgaggaaggggcaaggaaatattttttcatattattcttgtcatcgtctatttatttaataacagttgactgttgaaacataggaaagtacttatccgccaggaaactcccttctattattggacttacttgctttccatttatatgttgtctaattccaaagagatttcgagacagctttcaattaaaaaaaacaaacaacaacaacaacaaaaaaaaacaccacataccgcatgggtattacacaggacctgtatggtcaaattggcaacgaccacaccacatgagaaggaagattattcttcctggaacctggctcccttgagattcttttttttttttttttttagacggcgtttcgcccttgttgcccaggctggagtgcaatggcacgatctccggctcaccgcaacctccacctctcgggttcaagcgattctcctgcctcagcctcccgagtagctgggattacaggcatgtgccaccacactcggctaattttgtgtttttagtagagatggggtttctccatgttggtcagggtggtctcgaactcccatcctcaggtgatccacgcgcctcaccctcccaaagtgctgggattacaggcatgaaccaccgcactcccttgaggttcttgtaagccaaggcagaagaagagacatcttaaagtctgtatgtgcacacctgcctccccccattttatatacaattcaagggctttgcttttggaaagtttgcctatgtagtcgtccagggctaaattaacacctgtctctatctgtgtgtaaggctctctgggaggagctgtgaggcaaataaaaataaggaatggtgtcccgcaaggagcttacaatgtgtgcattacaagtatatactgagcatggccctgggaacacagtgaaaaaacaggattcctgccctagtacagtgtacactagtggaagagagagaggcagtaaacctaaaagtaagtcttttaaaaactgtggtaaaatgcacataacataaaatttaccatccaaccgtttttatgtgtacagttcagtgacagtaagaacattcacattgttttgcagccgtgaccatcatttatattcagaactcttttcatctcgcacaactgaagttgtacctattaaacagtaactcctcattctctcttccacctaggccctggccaaaaacaaaaataagtctttgattgtaaacacgatcagtgctttgaaggagatgggaaggatgttatcataaaatgatggggctgcaggaatggcacctactcagagagggcggtcaggagagacctcttgggaatgatgacatccagcaggcaggtcattaaggcatctctaggcaggtccagagtgcaaggaggcataagccaggcaggtggaacagcgtgtgtgaaggcccagagtcaggaaatggtctgcttccttccaaggaaaagaaaacagccagtgtggttggagcaggggctaggagagaaaagatgtgcatgtgtgtgtgtgtttgtgtatccccatcatgatttagtactgtcagcgcttctgtgttctgaacctggagtacaggcagacacagccgcatcccagaagctcaagagtgcccataccaggaaattacagaaatctttgccaaatggatgaatgaatgcaacttccttgatacagggtcagagaggggaaatctgagaaaagcaggtgggcaatgtactcctgacatactcccttccgttgcaatggccttgagtgatggagcaagagtgaaggaatgttcccatggcactggcaccaggatgactttttgtgaagcagagcagttggtcttagatagtggaggtgcgggaggcatgagaactgggcagtctgacggctgcaccagccagttggctgtcctttccacctccatgcccaggagctggcccagggcgcgcatgcacaaagccagtgctcttttcaatcagaaaacagcctgcgtatgttcttgcttgcaactcagatatccagcccactgatccaggaagagattcctttgacctgggaagtcataatggcagatatttagacccagctctcaagcaagcctccaagttgttccggtgaacccgtaactttgagtaacctctgattgaaccagagagtaggaactaggtgcagaaccttgttgaatagaattgtttagcatcgtccatttgttagagcatttcaggatgcctgtcctaaaatttggtatcataatggtatttacctctcactcacctccatctcagcccagtaattaataacaagggacttgcttcttcacctgtttctttattggttgtaggaagtcttttccttaccacagaggaaggagcttctggatccctttgctacgtccagagagttttcatctaatctgggtgtattagtccattttcacactgctgataaagacatactcaagactgggcaatttacaaaagaaagaagtttattggactcacagtttcatgtgactggagaggcctcaaaatcatggcggaaagtgaaaggtacatctcacatggcagcagccaagagaagaagagcttgtgcagggaaacttccattttaaaaaccatcagatcttgtgagacatattaactaataacagcaagggaaaaacccaccccatgattcagttagctcccggcgggtccctcccacaacatgtgggaattataggagctacaagatgagatttgggtggggacacagagccaaaccatatcactgtgtaaaagttgaataaagttatttaggagcacattgtattgggagtttgtttgtttgttgaagagccaagtaaagtcattggaagcatgggaaacttttttccctgtctaaaaggaactccttcctagtggaagttgaaagctttcttggcagcctcagcccccaccctacctccaccaccccagtgggtacctgcatcctgaagacccttcacaatagcatctgaactatactgggccttcaaatgatgtcttgggtaaacccatgtccaacctgcactaaatgaagattattttcgagcgaatggattgaagaacagtgctgaaaaactagaatttgtaatattttcatttgagcagaggtgaaatttgaaatattttagaatcttgtcttatgattttttttctttctttgccacatagccctcccctggaaattaaatctgtggattactagtatatgaactgatcagagacatggcttggggtctccccatttacccacttcccagcacgttataatccactggacacctccaaggatgagagaccagcgggtcataatgcgagactggacatctctcctaccccatgtacacttcagctgagcaggcagaattagcagagtcaggactagaagttcagtctagggatcaaataataatagtagctaatgtttaaagagtacctaagatccgccaggagacatactcagtatagttccgtggtttgccacatttcatcttataccagtagcacaggtgaaatttgtcttatgtgtatactgaggaaaacaagtccctctgatacacagcagccaataaatgacaaagctgggatagaaacttacttcattctaacccgagagtccctgttcttgcatgggcacagcctgccatccccatgctctgcctcctaagcagaggatgaacttaagcatcttaaaattttaaacattgactttccctaaaaccaattaaaaaaaaaaacaaaacagacagacagacatgacttgtgcccttaaaaatgcagccaggctggcatataaatgggcgtaggctgtttctaaattttttgctttaaattttgccagcatagcttctggactggtagttttgtttgctttttaatatatttttgacactgtgtacagaggaatgctacctcgcgtcatcatgtcctcctccctgaaggcaagccaaggatgtcaaggggccacttcaggggatgtgcaccctgaaggtaaagctgctccagtgggaggggttggggtaaatgacaatgttagcagctggtaaatttttttacatgggatatctcacaagacttattgatgcatgttatacgtaataacctgaggcacatcaacattttccactttttcctattctttctgtattttcactgatactttttttcaaaaaaatctccaataagtttaggatcagcttcaagatttctctttaggtaaatagatttgtatttttgatggccatcctagtccagtgtaaagatatggacaagaaaccccacataaaggaagcaagatcgctggctgctttctctaggtagcttgagttgtatactaatttgtagattatttctcttcatcgaaaaaacaaaacattctgcagagggcagtcatgtgtccgctgtgcctctgctcctgtgtgcaccataaaacttgaaagtgagccagaatttgaaaatatcggattgggatgtgatttctttaagcctctggctaatttaatataaagtgtttacacttcatttttctggcagtggattttctatgtaggtggtggaagatttcctgtaagttttgcaagttccagggcaaagagagttgcaatatgcaatatctttctgtggtcacaccaacagaaagggcgatttcttaacctgctgcagttaccatgtgtgtaggtggatgctggctattacagatggtatcctttcaaccctcaaaattgttgcaagttcacaggtatgttaatgaaaatgaataagtggcatttttaggaattccaaatactgagtcttggaagtagataatcttttccctaaatgtatgctccggtcagaactgctgcctaccacacctcgtgggtgaaacagatatttcgagcatgactgagcttattaagagccctgcggcgcttcctctgccgggggtttagaaatttcaaaggatgggggttgagggagggaggagttatgggcatgtgatgtggacagggcgggcaggaggatggaagtaacaggtccaaaatgtatctttggtggcccggcagagctcttgcatggggtgagaatggtaatttaggaagagcaagtcttcccatctgtgaagcagaagaaaaaagtggacttaaggagaagttcgggtgctgtttatttagataggagtaaggagagtgcagttggggaaaagcacttcagaggctttacttagactagcagaagtctgtttggcagggtgggaagcaagtgcagttgggagaaaaacgttttcaataggcagtttcagaattggaaattggaggagggcagtccatttcaacatttccaacagtattaaagaaaatttgcgggttgtttgtcaaaaggggtcatatgctttaaagattgagagatcttttcggtgaagtaggggagctggggacatcgtgatgtgacaagagccgtgggctcagaggctggggacctgggtgtttaacccaactcttgtgagtggtgtggctttcatagctttggttctctggtcttcactttatctgccaagtgaagacatttgactggatgtcgtgatcttgagttgctttcagctccagaattcgaagaccccttccattgggcattcatctaatttcaaagatgctccctggctccagctctgcagtgaagcagaacaaactgatacagcctagcttgggggtggggagtcggccctccttttcccctcccttcccaggtcctctgggtgattgggggaaactgagaagccgttctcttctccagagcactccatttaacaagcattgcagagcctggctcgtgctgcagtgaacaaatgctgacttcagcctttaccctgggtttcaggtcacactgattgtttgcaaaacatgttctttttttgtcacttgccagtacttgttctctgtgagtaaaacacaaacacatcctcagggatgttgcacaccagtttgcagcctgcagcttctgccctctggcctgcccaggtcctcggctccgggacgaggatgctccgggatttcgggagacagcagttgttttgacatgaatctcaaagttcctacaaagcttatttctttgaagaaggccaaaaaaaaaatgaaacattttcagatctttgttttcagattattcaagtccagaatgttggataagatttttgaagaagagatttatgcttgagattccttttagtttctttctttcttttcttttcttttcttttttttttttttttaggtgacttggccagtttgggtttttacggtgttcagggaaagggttaagaagttaatttgggaagtacagtcatgtgttgtacaagttgctgtctactgatcccttcattgagcaagtaaacttcacacattctcgtgtctgcaaagcatgtggatgcatgggcagttatgtgtatgaactttttttttttttgagaatggctttagtgttcagaccaaggatggaatgaaagatcacgtgtgctttccactgtagagctgccctgcttgttttgattttatagttattctaagtgttaagttccttcatctttcaaagcaaattcctttgatccctgaaaatcagctaatgtttgggaggcaattaaaagatgaggctgtggggttggggtgaaggcttccccagcaggaagagaggagaagcccactggatctgggagcacggtgctaggactctctaagcgtgacctccttcagtttggcccagagtggtcagatagtttgccggggcataggatggatgacaggcctcatacgcatcacgtctgaagggaaagcccttgaattttccacgctactttttagtaacagtaggctttgtcataattggcttcatgttccagctttcctaaaactgtaagtgatgttgggtgggccagcagcaaaataattcactttacaatttgcatgatagtctggaatgaaccgaatacctaaaaccaggaaataatagtagatatttaatggtttggggatcaaataagaatttactcccagatgtttcctaattaattggaaaaagcagaaggttgctggaaggccatctccattgggcatttacaggtgaaattcactcttcaactaggattttactcatgggatgcctgtgttcttcatttgaacccaattttacctatcatctacaaaaaaagaaaactattaagagttaaaaaaaaaaaaagagagagagagtcttgaactttgaaatccttcatccacgttttataaagtgtggggtcagattttttccctagttgaaattgaggaaatgagagttgccaatatgattggatttgtactgccaagatggggttttagcacttctaatgcattctggcaaggctggtatacttgtatcaagtgcacagccccactaccaccacctctaccacccacaaaaataaaaactagcaaaataaaatatgagccaacagaattctgtgggaatggcaagtgttttgtttttgtttttagtagtaatctttgcgagaacattccaaagatgatagttttacatttgtatgtttttttccgaggcacttttgaatcatcagatagattaaatataagttccatgtatttttgaaggtgggagtgttctttggtacagttcccccaaaaaactggttctcatgaggcttatgtggtaattctgttaacgagaatgtatgattatctgggatactctgttctgctctccatcctggataagagtttactttgaaagtctagttgatcttttgtgatttctgcacaatgtaaaaggtactttaacttcaggagatagggccagcaatcagatttgatgatggaaaagagtagtgtagcatttaagcataatgtatactctataataaatgtttacaagtccaaaagtgtgccatcagaaagtaaccagatcaaaggagaggtgaccagagaagctggaaagataagaaataaacaagtttcaaggttactgatctgtagctgttgctgtccatgcttcttggcagctttaattatgacagggagagggacccagagggagagagagagactgacttacacataaaggcattttatcacaaagccatctaaaacaaaagtgttaaaggcacaatgctgtgtttaaaaagcatgtacttctttaagagctcaaatttaaatatataatacaaacttaagatccaaggaagaaaatggacccaggacacgaagagaagttaacgccacaggtaatgcagatggccaagagatgtgtgaaaaagataatccagcctcaccaacagccacagaattgaaatgagatacctgtttctgcttctggcattgggaaagaaagaaaaatggcactagcagccttttttttttttttttttttttttccccaaaaaatttgctactcttgaggttctgtcaaagaatgtgctgtggcctctagaagcatttttaaaaagagactttcacaagtgattgtgcaaaattgtgaggtcactgaataggtgtgtatcctcctaaggaggtagcgttggaggagctgttcttgttcaatttactcagcacctgtgaagaggcttcactgtgatttgcctgtacaggtgtgcaggtaaaaatctaagttccacaggtagtgcaaaaaaatctacctccctaggtacctcgtacatttatcacagtttcctggtaaacagttctgctgttgttgacaaaattttatcagaaacattgcatactcttctctaaatagtagtttccctacaagtggctgtcttcagtttagtcgtttaagttatgttgacataaatgattatgtgtgtggcaggggcttttgcgtaggttgttgaaacattgcaccttttggactaacagtttttaccaaaataggcagaagtgacatttgcagccacagctgtgtggcattgagcgtctaaggtatgtgtaataggcagtgtatcggtagcattgataccttggtcaacaccagtaagccatgtaattgcccagaagtgggctctaacactagttttaggagatgcagccaaaacgacaaagctggaggcctctccctctgagcttggcctccacttggtcaaaacagtccccagtttgtccctacgggacacaggcctgccttgttaggaaatcagcaacatttaggagcccacaatacctcacataactctgtgtacagtaacagagaatggaaatagggctgtaagcatgaacaaccagtcaagttacaaatatagaatactctctcaattccactttagttagtcatggagggacagtgtgagttttataaacttataaggaatatacaaacagttccaaatttaaaataacttgaagtaacttttaagtgtgtgaaaagaatatttttttccaccctgtccatttaagcatctgtgacaggcagtattaagtgatgggtgtctttacgtacacatgcctgttgctcacagtactggggaagagttgcaaaatagtcacccattctgcagtgatttctctcttcttatttgtgaaagactcaaaaaaaaaaaaaaaaaaaaaaaaaaaaccaccaccaaaaaaaaggccaggcacggtggctcagacctataatcccagcaccttgggaggccaagtcaggtggatcacaaggtcaggagagcgagaccatcctggctaacacggtgaaaccaaccccgtctctactaaaaatacaaaaaattagctgggcgtggtggtgggcgcctataatcccagctactcgggaagctgaggcaggagaattgcttgaacccgggaggtggaggttgcagtgagccgaaattgtgccattgcactctagcctgggcgccagagcaagactctgactcaaagaaaaaaaaaataggggggatgtgggttgtgagagcgacactgtgtgtccatgcgtgaagaaacccggctcatgatgacctcgccccagaacgccgaagcagggccggtccagcctggatttcacagtgttcttcattgcctttgtccttgattttttgtcgttaccattataacttatctctctttcccaaatgtataagtaggctttgaatatgagtttaaaagaaagaattcggggatgatttcagagtacactagaatattttttaaaagaatattttataaaaatacagtgatagtaaaagaagtagaaggccaaattccgcccccagccccttcttaatattggactttattcctttgcttttttcccttgctgccatctaaggaggctttctgtgctatagcatccagttcctctgccaggcatttctgtaaagatgaggcaccttccactgttttattctccatcattagagcacgtgtcctgctgactcggagcagaggggaggcacacgggggtgaacattccctgacagattggatgtctcttaactcttttttcctggtatcaaagaatggcacaatttagttgatttgatagcgttaccaaatcgtttttcctttagaatgaatctagaatgcagatagattctgaggtccagatgggcctctctccaccaacctgtgaccagtgtacctgtgattttatcactgcacattcatagaaaggttacagggctaatcttcccgtgatatgaatcatgaaagtcaaaatttatgaatgaaaataaaaaggaatgaagtactgatatatgccacaccagagataaatattgaaaacattacctatgctaagtaaaagaagccagtcacaaaagacactacctattgtctgattccattcatgtaaaatatccagaataggcaaatctatagcgacgaaaagtgtaatagtgattgcctgggaaaggggcgtgggaagcatggctaacgggtattgggtttttctttggggtgatgaaaatattgttaagattaattgtggtggtgtttgtacaactctctaaatatactaaaagctaccaaattgtacactctaaatgggtgagttatagggtatgtgaattagatctcaataaagctattgtaaaaaatgtgtgaaggaaggggaagcatcctataacctataccatcccaacagcccagctagaggacgattcctgagcctccttctcagcctttgtgttaattctttgcattgatgacttctctctctttacccttactaattagctctcaaaacctctatttaataatgatgctatttataactttcctccttctggtttcttgcttgccctttttgtggtgtttgcttgtttttcttttttctcaatactctgcccagcgttgcgtgttggttccggagacttaagtgatccagtgggcactgtcaggcaattatttcttttgctcattaattaagtgttcacagatacattcagcagccaaaccttgtggcatgccttctgtcccagacagtgagaatctacttggaacttggatatttctgtgagccttgattatatacaccaccaaggggatggcatagaactaagttttttcttcttctccacaacagactttgttctttaatttcacaagcttgacatagcctataagacatcatagtggtaccatagacagttttcccttgatgcccatgggggatttgttctgggacctcccacagataccaaaatccacaggtttatcagcaagggtcactgctcaattgcaacaactgaagcagaagctcctctcatcagaggcagttactgcagcatgttctgtagggcaaatataaccatatgtaagtgactgtgctatcaggagacagaacaacaagacccagaaagactcagtgacccacagagccagttccacccaaacaagtcttactaatgagattagataatgagagtgtattttcttcatcaattcatgtagctcagcaaggctggaaactgcttgcacacttctgcagagaaaaaaaaaagttccatttgctggaactcaataaataaagaaggccttagtgggtacgtgttatctccttagcatcacctggatgcctgacccttttccagagtgtcatgttgcctgggttttgtccttcagtctaagtgatacacctcttagtgtggcggagaaaagggtgctgtatttcttcctgatggatacatgcttaaatggaaaagtagcatgagatgaactcccatagccccttccttttattatttttaaaatattcattcatttatttatttatttttgagatggagtctcactctgtcacccaggctggagcgcagtggcgcgatctcagctcactgcaacctccgcctcccgggttcaagcaattctcctgcctcggcctcccgagtagctaggactacaggtgtgcccaccaccacacctagctaatttttgtatttttagtagagatcggctttcaccatgttgaccaggctggtcttgaactcttgacctcaggtgatccacccgtctcggccttccaaagtgctgggattacaggcgtgagccactgtgcctggccggcccttccttttagacaatagaaacatgctgcaaccacataccaccataaacacggtgggggaagaggctgcaatcaacagtcaggaggatctgggttccaagcccaggtttgcagtgtaacagctgtgtgctcttggtgtgaacatttggtcatgtacaaatgaggataatgatactgcccccttgtgatcattagggggattaaattaaatgcagaaatatatgtgagatgcttaatgtgttgtaaggcgcatggaatatatttagtgaatattaactgtatattaatacaaagtcctgtattcagaatctccagtataaattacatttatatagtagagatatgaatagtttttgtgaacaagaagacctggaacttcaggtgactagaagctcagagtgagccagctatgtttgatgatagttattcttaagatcacacagagaaacggcaagcaagctgctttgggcaaaaaagagcatttctacactgttcagactgcctctgtactgttagaataggtctagggcgtgttgcgtgagtggtgactgagtaagatgttcagagggaagccgtgaccgtcatcttggaatattgtttgaaagtctgacctgtacaaagcagcactcacttcccctgcgtgtcagacacctgcatgagggctggggagggtccagtacaggaaagcgcatttttaatatgtgtatggaggaagttcgtcaagatgggtgccatctggcagtggagtagcacttcctggaaagtaatgagctcccttggactttgtttgaagagtcacccaggtttttgtaaagaagtgtttcagatcagtatgcaatggatgactgtaaatttctcttcagatctaagaatctgtgattggatgaaagggagaaaggactgcataagtgcttgttgcttgtaaactgggccaggtggatgtcatggccctaggagcttcttgcctgcctttgcatgccataaagcagtcctgcaacccagtgtcacctcagagggatgggaatgtagaagaagagagtgaatagggacagtgatgaggggtgaaaatatgtaactccttgccccttctgtataccctagtacattaggaagttcacccttgtctaggcttcctgttaggaagacagcagactcaaaatggagtctcaacccctttcaaagactgcaagatctccttgtacacactggacttgggagaaaatgagagctttcaggcctgctatcttaacaggttcagaaaggtgtggtccagccccctgactaaccagccctgctgtgcacactgagaattctgctcaggtgtacctttctgtgtgctcctgggtgcacccccaaagtgctggttctcttgaaaacctttttatttaggttcagacagacaaactgtggtatcttccattctgaccataaagtgtttcttctgggtctaactactatagtgggatattttctctagaacaagaggttgtttctttttggcattgagaaatgttgccgatgtgattttcttttgtgaacgtttaagacacagcgcttgccacttgaactttcttttgccgtgcgtagctgattccacataatggctgcagctccaggcagaaacctgtttggaagttgttttaaactcttcctggaatctctaggcagtggctcagtggggtttttttccaaccattccttaggatgaccagaagcttgacagaatcctcttgtcttcattttgagaaaatatgtctttactgtgtgtatgtgcagcatttggttttacctcgtgggtctaagcattttcaactaagcttccttttccaacctagcagacttgtttaaagaacttcaaactaatagccaagctgtaatacggtggctctctcagcctgagaagcctgtgctcaccgtcactctcttcttccctggggtgatagggatggggagtagtgtgtgtgagaggacagaagcgaggattgattgaagattattttacgaggcgagagcatggtggcacacctgtcagctgagtggactcagcgcctgccccggctaggctgtcctcctcctgtgccagccgtgggttccctgagtccctctgcagtcattcatgggtgctgaaaataaagataccctttctgtcgaaagtgttcgccgggctgcctctgcctccctggaaaagcagcagggcacacaggcttcctaggcagcccctgagggaggggctctttttattgtcactctggttagtttgaagaccagacagaaggcagcaaaaaccaaccctttgttgaaaactctttgcctttaggcccttggtaccatgttcatgaggctccagataattccacaaatacattattattgttacctagacttggggacagagaagggtgaaacatgggtctgggaattcacagatgaatatactgtaatcccctcgagcacatttcttttaaaggaatgggggtattctaaaggagtgaacactccactggggggctgctaggcccctgtgaacggtggcagccttggccacggtgtgtgctgtgatctctcctgggtcccccgggcatcctcagacctcccccacacccaacccacagtcccttctccatccatctgctgaccacaccccaggatgtttccagctcagatcacgcctgattgcatccacacaaactgcacgccaggcatttccgtttggatgtgtacacaaaaacaacacgtcccagactgagctgatctttctgtacccctcaaaagaaaagttctgtacccggccaggcctggtggctcacacctgtaatcccagcactttgggaggccaaggcaggaggatcacgaggtcaggagattgagaccatcctgggtaacacggtgaaaccctgtctctgctaaaaatacaaaaaattagctgggcatggtggcgggcgcctgtagtcccagctacaggagaatggcaagaatccggaaggcaaagctggagcttgcagtgagctgagattgagccactgcactccagcctggtgacagagtgacactccgtctcaaaaaaaaaaaaaaaaaaaaagaaattctgtacccttccagatggtcctggacatatcttgaatctaccctgcttttcctcatctgcactgctgtcctcttgatctgggctactgaggctagaatgcacatctgatcatgtgcctcctgcttaaaatagtatttttcctcttaagagtagtccaaactcctattgctggattaaaaggctgttccaggctctccctacctcagggcacaccatctttcctcccagtctcccctcccctctgtctccagtgcttccatccttcagtcatgctgaggttgtctttgttacctttgcttctcttggcccgcactctctgttggctctgccagcatccctatgcacctgctagctcctactcacttgtccagctttggcctggaagtcccttcccctggcaggcagccctaagctaccctttgcttgctactggctcatattctcactgcttgtcctcaggctgtgagccctgggagggctgggctgagtccccgaacctgccacgtctatagggtgtaacctacctgaggcctgactgctaaaatcaaaagaagcctttctcatttgcttagctgagctaagtcctttctggagaagaatgcccacgtcctgggtggacttctgttcggcctggggcaggacgctgcatgtcagttcacctagagcccctcgcttgccctcacccctctccctttccttctcctccccgtgttgtctcatggtcagttcctctcctggcaaggcaagagaatcataaaatctctttggaccatgtgtctctctgatgcactttggaggttgaagctcactttcgtgaagttaggagcggttaatcctcctgcacgaggatgcatgcctgctagggaaagcctccctgcgtttatatggaacagtggtgtgtaccttagggcaacccagaaacagctgagatggccctaaactcttccgtattttgattcagaagctttaccttatttgaacatctgcagaataagttctttcctttagaaatgattggggataaaattgtttgcattatgaaatattgtatggccaggtggcccctctttcatgttttgttccttgtgaagaggttgagtctcctattttttttttttttttggagatagagttttgttcttgtccctcaggctggagtaaaatggtgcaatcttggctcactgcaacctccgcctcctgggttcaaacgattctcctgcctcagcctcccaagtagctgggatcacaggcacgtgccaccacacctggctaatttttgtatttttagtaagagatggggtttcgccatgttgggcaggctggtcttgaactcctgacctcagttgatctgcccgcctcggcctcccaaagtgctgggatcacaggcgtgagccaccacgcccagcctatggtatgcttttaaaaatggtttctctgcactaatgattatttaaaaaaaaaactctggcaagaacaaaaacaaatggttttttaaaaactctagaaataatttgatacattcgaggactctggagagggagagagttaaaggctgatgtgtgtgactctttttcctctccccccaaggaaaaaaaatgaagagaaggagcttttaagtgcagtgcctcgtttttatgtgattgcaaacctgaaccaatccttttagtggtggatgtgggacatgttagcttttccaacagtttagatgggcctttgtttttattgttggtcactgtaagaattccaaggaatagaaggatctcatgggcaaaatcagtttgcttttttctctgtatatttgttagtttatagcagcttctattttcctcctatttttaaaagctgaaatgcctttaatcgcactcagtgtgtttattcatggaagccagagaagagggtcccttcctttcccccatagcgccgtaattggaaatttggtagtactaggtgaaattctcagttttggcgctcgcatggaacagccatccatctgctggcgagacacactgcccggggcttttcaagaaatcccttaatggtcctgaacactaataatatttatatacattgagatgagacaaaatttacagcgggctctggggctggctccaggactctctaatcccacacttgctcacgttctcttgcttgcctcctagaatcctttcaggttgtgcttcagtgaggggagcatggtgtccgtctctgcagcaatgcttatttatgcagttcgtcctctaacaaacagagcaactttccttttgaccttcccctcttctccccatcacattccattgctgcccccgcatagagcatgtgcttatgcatagtttgcatcatttaacacgaaggaaccccttgatttgtgatccctttaagaagttgctctgtatataaagaaaatgatttttcctggttggttttactgaagttccttcagaaatagctcccaccaccgaaacacacctgacttccccagcctgtgtatcggttgtggcacggactgactgactggatggtataatttcactcactcctttgggaagtttcgggggactactgctcagatgtgtgggaaatgcggaatatatctacaggtactttgtcagtttttttttttcttttctttctcatcctggaaaatcccggcattgatatttaggtataactatttgcaagcaagtgcagagggacatttttctgttcttttcaacgttcttattactactgcattaatagctacttgatcttaatgtctattacacatcattttatataatgttttctttaaattgtcagggaaagggattctgcaagtagatgttggtccccccagttagtgtctgatgatgatggtaagattctcagagtttccttcctctaatgacaaagcatggtgatggtgatgtctgaagagcagcctcggtgctccaagatgggtgtatgcttaatactgctggcacacgcctgacgagcgggaatgtgagcgttgtttctgtaaccagttttactgaacctcacagatccattatacgacgtgaattttgtgggaataacataggctgggagtctgctctcttccagcctggtccctctcttctttcagccctaccctctctgatcatcatgtcccttgcactgcggccaggtaacctttctgatacgaaggtctgggcatgttgttcccttgcctaaaactttccatggtttcgtattatccacagttgggctaaaccctctgggacaggccttcagtgcctccccgggcagtggtccctggccttcttcagtaacacccaagcccttgcacccacagtgacctcgttgcttttacaagcatttacatgtgatgttctttattcctcccttgctcatctttccactttcaactccacaaaaccgtcctcggcacccagaagcccaggaaacaccaggcagctccactcactcccgtacttgctgtgtcgtccgttccctggggacaggattgtcgctgatcctgcgtgcatctgtctggcacacaggtgcagcacacattaaatagctgctaaatgaataaatgaagaatagatggaattatattctgttgtgaccagtttaaaaacatgaaattggaatacccaattgcagtgtttctttagatcttggaccttgaggtgacctctgtaatggatatatttgaaattattaactgtcttcaagtgggggtttgatgagagagagagagagagtgtgtgtgtgtgtgtgtgtgtgtgtgtgtgtttacagaaaatatgctaggtttgtacattcaaatttgtgttatcctcttcaagaaagtcaccttggtagacagcatatatatcccaacattttaggaactcataaaatgcatacttttttggtgtgatcagagatgggtaactccttattacttgtgggttagattagtttttggaaatagcctggagtcattgagagccaatccttatcaacaaaatggcataaatggacaggaatgggtttcttcttcactttagagatagctctgaagacatgtctcagttgggattagttcagttgcatatatgaatagcagtcattgaaacaagataaaagtgtatgtctctcacatctaaagaagtctggagtaagcagtccagggttagcctagcggccccactctcataagggactaagttccttttatctcgcttcaccattcttgatgtttcgccttgtggtccaaggttggtacttgagctccaagcattactactgcattccagccagcaaggaggaggatggccatgccctctttgttctcaggagtcttccaggaagttccagtcacaacgtttgtttatatctcactggccagaacttaagtcatatggccacctctagctacaaggaaggctgggagatgtagtctgtaactggatggccatattatcaactaaaaattactgaaaatgacaagaagaataaataatggaaggcaacctgttgtttctgtcaaaggatgacttcaaaagagaaagttgcaaaagtatttcaagcttgacagtatcatgacagttttcttcagaggtgacgctattcatttgcatgtccaagttctgatatctgttttcaagttcacctatttgcagcgaaataggaactcttggaggcaactagtgggtgtgtaaaccggtacaaactttctagaggacagtttaacccaacaagatgaattctggaaattgatcctaatgaaatgttaagggtgctcatgaagattgctttgccgattgcaataataaaaagtaaagaaaatatcttataattggggacaggtgtaacttatgatacattccacaatggagtgtaatactgctgttaaatgtttgtggaattcacaatcttttatgccaaaagaaagctttcagaatggcttgtcttttttgtagatacttgtatttatatgtccatgcacatacataagaaaggaccagggaaggtctgcttgaagatattaataaaggggtcacttgtgggtaggtggacttacttgttctctatattctctttacttgtttgtgatctctggtttttttaatcatgtatttttattacaagaaaaaacaaattctagaatctccactcaatattgcatgtcagagtcaaaaagatacacatttaaataattttgtattgttttccaatttgaggataaagtaggaaatgtataatgcaaaccagatttcatattttgttgatttagacttaatttacaagtaaggctgacagcccacagagtgtgatcacgacagcattgttatggaaataaatgccagctcatgcatttgggatgtacaccatggatctgtggttattagatactgatttcactttagcacacgaagaggcttagcggaggtggcttctaatatcctatggttctgtgggctcggagatgctactcacccacttgtcagaggcattgaaaccagagcaactgcatcttgaataggagctaggtaaaatgaggccgaattcccagacagttaagacattctgagtcacaggatgaggttaaaggtcagcacaaaatacaggtcataaagaccttgctgatctagcagatgcagttaaagaagccggcgcaaacccaccaaaaccaagatggtaacgagagtgacctgtgatcgtcctcactgctgcactcccaccagcgccatgagtgtttacatgtcatagcaacatcaggaagttaccctatatggtctaaaatggagaggtatgaataatccaccccttgtttagcgtgtcataaaaatgggcaaccagcagccttccaggctgctctgtgtatggagtagccattcttctgttcctttactttcctaatcagcttgctttcagtttacagactcaccctgaattattcttgcgtaagatctaagaaccctctcttggggtctggatcaggactcctttcctgtaacacacctatgttcttggacttaagaatgaccctcagacatggtgacttctttgtcatctaacagctttggcttatttgaggtaaaacctttgatatctaaggcagcagaaatttccctgaagtcattttgaatggtatcatctttactatagtgtagtttaatcattttcaaagtaagcatttctgcacactaaggctttaaaagagttttcagtaaggaacatatttgaaatggaaagtgagcagagcacaatgccttttaaattactgataaaccatagagttcctgtagggcttccactggctgacccacgcctgaggcaaccctcaaatgtgggtattatccccctcattttacagatgggaagagagaggatcaagatcacagaagctaatggtttgtcccagaccaaacaaggagttcctaggagagactgaactttaaagatatcgactctctgcaggtctaagtggatgaaaggacagtggtgggggtgaggatttcgtagtgtgtttttgcattgtctcctcaatgagtgatctggtgctggtggtagcagtgaatgacccagaaggatgctggccaggcccagagaaggcggtgcctcccctgcccggtctcatctccgtctctcctctctctccacagtgtgcccaagcacgtgtgggaagcgggcgtgcaccgagaacaatgagtgctgccaccccgagtgcctgggcagctgcagcgcgcctgacaacgacacggcctgtgtagcttgccgccactactactatgccggtgtctgtgtgcctgcctgcccgcccaacacctacaggtttgagggctggcgctgtgtggaccgtgacttctgcgccaacatcctcagcgccgagagcagcgactccgaggggtttgtgatccacgacggcgagtgcatgcaggagtgcccctcgggcttcatccgcaacggcagccagaggtcagtcgcggccacacgtgtggtcactacccgccccacctcacccgccaccctagcacacaaaggtagactctgtcggttgtttcatccgggtgcagccctcaggaagttcactgaggtgggtcattttgagagggctggcttaccttaaatgtttggtgagattctaggaacaattggcatggcttaccgcccccctcaccagtttgttttatattttaagtgcatactgcctggccatttgaaattaagtacttgcttgctggtttcgatacccagagttcatagtctctctgggtacttgccaagctgccatctaagagacagggaactgtagttttggattttcctagtctgggtgctgctagccaggtgaggctttggaagtgcaaaagaaaagacatgctaagcccccaccaccatccttgagaccagcaagcggacctaaacatcttagtgcaagagctagcagcagctcagagtaggcagtagcttaaaataagggacatttttccatcagcacttccttcctctcatccccctctaccttgaccctccctcagtgctcatcatgtccttcattttccttcctgaactttgagacttcacttgggaagcaaagaagttccttatggccaggcatgtggctcacacctgtaatcccaatactttgggaggctgaggtgcttggatcacttgaggtcagagtttgagaccagcctggccaacgtgatgaaaccctgtctctactaaaaatacaaaaattagcacctgtagtcctagctactccgaggcaggagaattgcttgaacctgggaggcagaggttgcagtgagccaagatcacactacttcattccatcctgggagacagagtctcactctgtctccaaaaaaaaaaaaaaaaaagagaagttcgttataacaaatgccatatgcccttttgtacatgtcaactggacttctataaatttgtcattggtttatgcttttgaaaataagatgttagcattgtttaaaaatgtgataactataactttgaaagcaaaagaagattggagatttggggttgctgttccctttcctggagcagagtaaagaacttttaggggctcacgcctgtaatcccaacactttgggaggccaaggtgggcagatcccttgaggccatgggttcaagaccagcctgggcaacatgcaaaccccatctgtacaaaagattaaaaaaaaattagtttggcgtggtggcacacacctgtagtctcagctccttgggagttgcaagtgggaggatcacctgagcccttgaggtcaaggccgaaataagccaaaatcgcctcactgcactccagcacaggcaacagagaccctgtctcaaaaaaaagaacttttaggaaagttctgttttagtggactaaatgcctccttcatgattagcaccagggggcctgtctttctgagtctgtcaaaatctattctacaaatataaaaatatcgttagaaaagtaggtgttaattttaaatataatttttgctgcagcttatgaagtacattgaggaagtgtttataaaggggattctttttctagtgtattatttggagacgcagcttctactgtaggcttaccttcaaatcaaagataatacattcttttatagtattagatgtagagcaactttctccctcttataatctgtataaccattagcatactaacaacaagaagaaaattactctgaatactttaaaatgataaataggccaaggacttcaatgagctgtagaggatacatattacatccaaaatcagtctaccacattgtactcacattttgttggcagccttcgagtgtaaaagggcttttactggtgcacacctcgggcccaggggcagtgcctggaaccaagttgaggctcagacactattcagacgtcaccttcctccttggggtggggttaggggagtggtagcttgtccatgaactcagtgtgctatcgtctttgttttgtgaatacattttcttaatgacatttggaggccttcagtcgttctgcagccaccagagttgtggcaaagtgggaatgctgtccatttgacagtgttgtttcttccgctctagtgcactcttcagagaattgagccattatttcccctattcattcttacagtccgttaaaaactatacatctacctttttgtttaaaaataaaacaccataaagaataataaattcccttctctcagcctttgaggcttatttaacaattactttgaaatatttaattttttcatcttgtttataccttctctataccatagtggatttgaggaagcttaatctataaacatgttatcaaaacacttccttagaaaaacattttttaagtgcttgatgactcctagactttttaccaaagatgattggttccattttttttttcttttcttttctctttgatagactctggctgtgtcacccaggctggagtgcagtggcacaatcatagctcactgcagcctcaaactcctgggctcaagtgatcctcctgcctcagcctcccaaagtgctgggattacagatgtgagccactgtacccagcttcagatttttctatttgagtgaaagatggagagaaactaaacatacacttatggtacaacccagcagttgtaaccctggatatttatcacagagaaatgaaatttatgtcaacacaaaaatatgtacaccatcgtccatagcagctttatttgtaataaccccaaattggaaattactcagatgtcctatgatagatagttagttaaactgtgggacatccacaccatggaatattattactcagcaataaaaaggaacaaaccattgaagtacactacttggatggatctcaaggacattatgctctgtgaaaaagccaacctcaaaagatcacatactgtataattccatttatgcaacatcctcaaaatgacagattatagccaggcacggcggctcacgcctgtgatcccagcaatttgggaggctgaggtgggtggatcacctgaggtcaagagtttgagaccagcctggccaacatggtgaaaccgtgtctctactaaaattacaaagtttggccagtcacagtggctcatacctatctcagcaccttgggaggctgaggcaggcagattgcttgaggtcaggaggccaacatggtgaaaccccatctctactaaaaatacaaaaattagccgggcctggtgatgggtgcctgtatttccagctactcaggaggctgaggcaggagaatcacttgaacccaggaggtggaggttgcagtgagctgagatcatgccgctgcactgtagcctgggcgacagagtgagaccctgtctcaaaaaaaaaaaaaaagacagattgtagacatggaaaacagattagtggttgccaggtgttagggacattggggactaggttgggcagggcagtgagtatgaacaggtggcattagggagagcttggtggtgacggaacagttctgtatcttgattgtagttgtgattacacaaatctacacaagtgatcagtgacacagcaccacacacacacacacacacacacacacacacacacacacacacacagagttaatttcccaggtttgatacttatatcatgtaagatgtagtaaacattggaggaagttggatgaaggctatgtgggatctctctgtaactttctcgtaaatctttgcagctttttgtgactctataattattttaaaataaaatttttttttttaaatggaaagtttatagggtatgtagataaattagaaacaacagaaggccaagtaaaaaagtgctgaaggaagcctctacccaggctggaaatgagaatgttgaatgcaatggtagaggaaggactctccccatctgtgggtgggtccagttcctgtaggacccttggggaagccatgacccccattctcccaaacacacaataggaaaataccagagaagttttgtttacctgttagcttttaaacaaaacagaaccctgcatctttgtcttagatacaaaataaccttcatgggtagggggaagggacattaataaaaagagctataatttacattgtttttcttgaatgtttttacttcacgaaatttgagagatgatttaagaacaataatgtacatataatggctccccagcttaccatcctattacacacacatcgcataagttcgtattatttgtcttgtttggaaatcagtccaactttctgacccttgttctatatataactatagatcccaaaggttcagctgctgggctagcattttgtctgctatttcctaaataatggtaggtaagcaggaaaagtgccagtcttacttgtccctgactcttggtggttcgtggcatgttcaggatagtatttgaaacaagagctcattacaaagtaatggaaaccccttgcttttattgtgtatgcagcaaaagcaacatttggatcaatttacaagtttctgcaaaacaccgtcaagaaataatttcggttgtgctttagcaagaaaataatggatctgtgctataccacatgccttttggtatccctcactgggctttgccaaaacactgactgcaggagctagactactgttaggcagagacactgcactccctttgctgtccctgccttctctcctagcgactcctccaggtacacaggccagggtcacagtatcagaaagcagctctgttttcctccagaaccccccaagcttcctttctgcagcactgtctctcccacatggaaccagctggctcaccagtcaacagcctatgacacacaaatgccttgaggatgcagcatgtattttgtctggaagcaagcaacacgctcttcctttgtaggctgtttctccttttgcttgcaatgtgagtggcttatcttgggtgggcttgggggtgagataccatgtgaccacatgaacacttcaaaacagttgctttttctaatgcatgctgtaataacaatgaaaagcatatccttatggtttttttaatgcaagaagacagactcaattatgtgtgtttttgattttttttttcttcttcaacagcatgtactgcatcccttgtgaaggtccttgcccgaaggtctgtgaggaagaaaagaaaacaaagaccattgattctgttacttctgctcagatgctccaaggatgcaccatcttcaagggcaatttgctcattaacatccgacgggggagtaagtattccatccccctggaaaaacggctagatctcatggttttcttttgttgatgcttttcatgctcccgtccctgagtcaccactaaaatatgggcttagataaacaacatggtgtgtaagcctcacgcatgacgtctcttctttgagtttccctgaaagataaagaacagattgaaaggcaatctgtcttttagccattggcacgtcatttattcctgtaaagagggtcatcgctcatctttttgttagtcacatcttgcataggagaggcaagccctgacacatacaaaccccagaagagaccattggatcagacgtgtgactcagcagactccagctgtagccaaatccacacatctttcaagtctaaagagttttggttacttgaatttactgagaagactgagcaaagggaagtttagtgatatcacgttaaaattttatgaagtccaaaagaatgctagatttccaaatttacttgtgagagacaaaaggatacaagtgtgtgtcattgtgtacataaagtttcggtctcacccctgtacaatgacctttatttgcaatagatggcattcctggtaagttgcttctgagttggatttgtgcaaaggatttcccactgacttagcctatgatctcttcacttctttggttttttgtgtgtttgttttttggttttgttttgagacagggtctcactgtatcacccaggctggagtgcaatggcataatcatagctcactgtaacctggaactcctagtctcaaacaatccttctgctcagcctcccacgttgctgggaccacaggcacacactaccatgtctggataattttaaaaatcttttcacttctgatttttcattgccaagggcttctagtaatggtgccttaaattctctgccactgggaccacttggtcaaggtactgatagttttataagctagaataaatatcgtaaaatggctttgaagttgaaaggaattttggggggggaatccttttatgaagaatttttttttttttttacagtttgagaggaaaaataatgtattttgagaatgtgttttccttaatatttgttaaatgagtagactgtattcttaaggtttagaaaggacagaaacaagtttgtgcttagttcttctgaattcgttgatatcccttgttgctgttcacaatacacccactcccagccctccgtgatggagataactctgttccccacaactagggcttgcccactctcatggtacttctgatgtttaattcttttggctgtgtctgcatttcctcatttacttttaatttgcttatccctagaacataccttttgagtgcctaaacttttttatcttcctgtcctgaagacaaaaatttaatctgtgaattaaacccatggagaagtatcatttatgaagggattggtacatattgatgcatgatgatgaaatgtgtcttctggtttatgtccattgcaggaaatagattggatttaggatgatgggacatctcattagaggggaaatttcctgatcttgactaaggcatgcttcctgccccacgtttaaaattcaggatctcttccttaaaacatcaactgcacgcaacctctcatctttccaacttgaacttccctttaatttttcttggaaagctattaaattaaattagatgtagggctttatcctttagtacccttattattttatttgtatcaactcaaagcaaaatagagcattttattaaatatgtcttcataaattacgcacagtaaaatcccattaattggaccacacccagttcattatagtgtttattataattttagcattagttgaactgaaaattggtttttgtttactatgagaaaaaggtagactaaacaagatgaaacctgttgtttgcatattatgtttgtacatctttattagcaactatttttccaactattttcaactatttttccaactattttctagttataaaagcaatacataaatactatagaaaatttagcaatgcagaaatgaatttttaaaaatccctcatagatagccattgttaacattttggtgtattttcttcaagtcttagtaaaatggaacctttaaatatagatccctgtatcttaggaattagaaaggcagcaaaggcagttcctaatgagatggagaaaatgttgatttagtcatgcccttgtactgtgggggccatactgtctgttgacagagcatattaaaagacgttccctacattcgtcagccttagctaattggcagtctggtatttatgattttatattttgttaatcagcttgggagctgcagtaccccccagcctcctagaaacttggcttcccctgcctgggaggcctcgttccaggagtcgttgttgagagtcaagccagggaagtgtgtttttgtcagggagcagccagtcctgtgctgggagcatctcagggggcacctgccgttgaattgttctcacttgtgtttgtaagaatccaagtatgtcacccttacaccaagtgagcacacagtgacacaatcccctttcaatgtagataacattgcttcagagctggagaacttcatggggctcatcgaggtggtgacgggctacgtgaagatccgccattctcatgccttggtctccttgtccttcctaaaaaaccttcgcctcatcctaggagaggagcagctagaagggtaagtgccccaaatttcatgagctgacgttctattacaaaataagcagcgtgcttatgaaactgtgttgctgaggtaagagccctccctgccttgttaaagagaagaaaggaggaagccgcagtattgcctgtgctgctcgagtaggtcttgggtggagtcatggttctccattcttaggaggttgctgtttggaaaacagagatgttatcacccttactggattttgcctcatcagtcaagggttgcgtgtctgactgtgaccagtgagacggcagacgggggtgcgcttagggcttttctgccaagaatgacagcagttggtctggagtgctcacctccctgtgaaatcattgttcgcgcgaccctcatctgcctcaggatgctgtactctactacgcacaactgctccatcttttaagatattggaagtgagagcacgggaggagcatgggcggttcgttttgttagaaagaaacccggattcacgagatggtttttattgattagtttacaggatttgcactattgatagagtttttgccttggcacaggcctgctttgtgataggggttttaaaataaccgtgggcttttcactggaggataaaagccggtgcttattgcatgcacaattgctttccagccgtcagcctgtgtgtacctttgcatatgtacttttctctttaaactctcccttttaaatacgactcttgccaggctttaagtgaatgcttcaaaataaaaggagttatcaattaaagagtgaattccttccaaagagaatttgggaaaataatttaggaaaagaagaggcgagaaggtcatgggaaaggttgtctttgctgatttatctgccccaactggataaagttactgcataagggtttctttacagcctccctgtttttctcagactaactcttggtcagtcttaaattcttaaaattccatcatctgatagagctaacgagagcgggcagctcttcattccatccttgaaaagcacagtgtcctccccactggggaacaccaatccttaaaaaacttctttctcattgcaaatcgaaggaggctgccgctgcacccagccccagactcctcagtcacttacctggcaagctgaggccctaccagtttaaggtgatgattattgtttcttgtattaaattttaaaatgaatttttctccgctttttttttttctaagtaggtttgtgtttctggaatctcgggtgtctgtgagcatttcttcttcagcagagcagtagctgtcaaattttcttgttgcttaatgatatacttttttgtttctagactaagcaaatgatagacatagaggtgaatgctgagaggagagtttaattaatttccattaggaattattatgtggttaccttttcatggagtgttaactaagtattgtgcacttaaatgtagttagaaattaaagcctgatttttatttgcaagaatatttatgatgtctttctcattatctgaaacttgcataaaacctgaagcatcagcaaaatctttttaaggttgcgtgctcaggtgtttgggaggctttccaggtaagcccgggcccctggcctgctcttaccattttagatgcaggggagggcaagtgggccttgggttttccctgctgctgctgctccccagtagtcctgcagctccaaggatgctggctccagcctttcattcctgcgtgcagcttctaagaggctctttcttgagcttgggctcttaagaatcttttacctcccgatgggaagttttctctcaccctgtcttcctggcccatgaccacaaaggtatagcccatcctcacgatgatgagctccccaagagctctgtttgcttcaggtgttgagaccgctagcaacacctcagctgttcatttctccttagactcagggacagagttaggtctggccccttcactagctgccctcacttctgcaagaagggaagagtcagagcgagaaagagaaggacaggatacgatagtcagataaacatcagcagtgcaaagcagaactcgcacagtgatacaagggaaagaaagaaatgtgccctaggcatggagaagagccagatacctgagaagatcagacaggcttctgacaagaggtggcatttgagatgggccttgaaggctttcgggaaaaacttgaggaaagcagaggattgaagtgaagaaaggcaattcaaggtagggtggcaggagcaaaggcaacgagttggggcatcctggggcctgttgggcaactaacactggagaggtgggtggtactagagttatgtaagatgttttgcacgcaggtataaagggttataatttaggaagaccatggaacgtattcaaggcttttgaatagaggagtgttagcagagctgtctgaaatttttatttcggtgtgcttttggtttaagccaagatagctttcatcccagtgtttctcaaactttgctacacattatggaatcattgggggtgggggcaggggtggagttgagaaatcctgatgtccaagttgcacccccaccccaattcaataggagcgtttggggttaggatccaggaatcagtgcttgtctaaagatccctaggctcttcagcaggcagcaaagattggaaaccactgctttatcccttcatttcttcccatgtgcatatcacaaagcactttgacggttttttttcctaaatattttcccctcacactgctgcctaatgttttagaggttcacccatgttgttaacacgtgtcacactattttcttgaacttttttttttttttttttttgagatggaatcttgctgtgtcgcccaggctggagtgtagtggcgctgtctcggctcactgcaccctctgcctcctgggttcaagcgattctcctgcctcagcctcctgaatagctgggattactggcacgcaccaccacgcccggcttatttttgcttttagtagagacggactttcaccgtgttgttcaggctggtctcaaactcctgaccttgtgatccgcccgcctcagcctcccaatgtgctgggattacaggcttgagccaccacgcccggccttcttgaacttcttttatagccagtgataacataaatgtttccatttggttcaataggatgaaagttctgttctgtagccttttgtttttgatggagaacagaacaattcaaggtacagagatccttcaactctgacaaccttggctttccaaaatgtcactgagatccccctcaaaaagtctcctgagccatccagaacagaaaattcaagcattttacatagagtagagctcttattcctcactcagagcctgttgacttttatatcgcactcggcgtgagctgattttgtaacccagttacaaaagccatagccatggtttcctcaaggacaccatagggtgtatttctagagtaatgaccttagacattaagaaaatcaagaccgctctgctgtttacaaaggaaacaggttttgtaatccacatgtacacaatttttataaaatagctaatttttaagctcttgagtaagagaatattttcactatctggaaaatccccttgtttggacaaccttgtttcctgatggcatcagataaataaggagttaaagtttcacattatttggtgctaccaaggattgttgccttgaaaagaagaaggaaaaagtagatggagggtggtgagttaaaagaattgaaattcgcggataggcatttctatgcttttgttcctaccactcgactgtgcaacacgcagtgctttgtaataccttcttggagctcaaaggtcaggctgaaacatggccgctttttcacatttccctgggacttttggaaaatatacaccaaccctgtgacctagcaattccgggatccacccaagagaaatgaaaacatgcccacacaagacttgtgtatgaatgctggtagcagtattactcataatagcctcccgggattcccccgacccccagcccaaaagaaagacccactggaaaccattcagatgttcatcagcagatgagtggatagaaagataaatggataaatgaaatgtggcacaaaggacaactgactactcaacaataaaaagacgtgaagtatgacacgtgttacaacatgggtgaacctctaaaacattaggctaagtgaaaagaaaaaatccagacacaaaagactacatattatatgactcattcgtatgtaatttgcagaaaaggcaaaactatagagacagaaagcagaccagggatggctgcaaggaagaggtggagattgaccaccaatgggaatgagggaactcttggatgatggaagtgttctggaactgagtagtggtgatggttggacagttgtgtaaatttacggaagctcatggaatgatgggtgaattttttttttttttttttttgagatggagtctcactctgtcacccaggctgcagtgcagtggcgctgtctcggatcactgcaagctccgcctccgggttcacaccattcccctgcctcagcctcccgagtagccgggactacaggcgctcaccaccacgcccgactaatttttttgtatttttagtagagacggggtttcaccatgttagccagtatggtctcgatcatctgacctcgtgatctgcctgcctcggcctctgaaagtgctgggattacaggtgtgagccaccgtgcctggcctgatgggtgaatatttgataggcaggttatacttcagaagtaaagctatttttaagaaacacctaaacaaagaggaaacattgtctgaatatctgtatggtgcctggttccacctagatagacatatccacccttgctgaacccctaaggttgatgtaaatattggatttgggggagagtggacatgatataaaccagcctgtttgcagatggattggtgggagcatctgcagaaaggcaaaaaaggccaaatactcttatcagttgcagatggctctgttgctgatgacagcctgtgtcctgggttctgatgccccctagagacagccgtgaagaggcaattttctcctcgaaggaaggaactggaatgattggttgtataattgcagaattgttttcagtatgtcagcaagcactgaaaatggggaaactgtcccttcctacctctgtaggctggagacctcgggttcagctccatttatcagggcacaggaccttcctgttctgagactttgttccaggggactttcacacttcagagaatagcacatgtcatcctgcacttttgtggggtgattaaaagctcacggtatccttttatgtttagcccatccaattcttccaactggcctcagccagaaaagcagggaaggcacccccagtttgcagctgagagactccagcctgggagagctgaataaatcttttgcccagaggggttcctcagtaaatgctggagatgaggctcagacctgacctttggattcccagatggagtgctctgaaccgtgtacctggggctgtcttcaccactcaaatatcgatagagataacatagagatgtcctcaggaagataaccaactgttcccatcctgtgtggtctacagattgggagatagggcctacccaagtgtagaaataaacattttttacaacatagagaaggctgagaaccaggataccaatatcaataaaatctggatatcatagagcacatggaagctaaagaaaaataagtaactggtcaggtgtggtggctcacacctgtaatcccagcactttggaagaccatggcaaggcattgcttgagcccaggagtttgagaccagccagggcaacatagtgagataccagctgttaaaaaaaaaaaagaaaagaaaaattaaccaagcatggtggggcatacctatggtcccagctacttgggaggctgaggtaggagggtagcttgagcctgggaagttgaggctgcagtgctctgtcattgcaccactgcaccccaacctggattacagagtgagaccctgtctcaaggggaaaaaaaaaaaaaaacctaatttttaaaagcattctttgaatgtaaaggcagtaagctaagaaacaattaggaaatcacatttactgaataatttacttaagtaatctttttcttcaggaaacaatgataactttagcgtatgcatattttaaagatgtgcagacaggtctctgccttttaccttctcttaattctcacctaatcatggaaggaatttagcggggagccttgccccaagctgtggctcgaaaaacaagcatggtattgacaggcagctcatgaatggcttgattattattttgacaagggttttatttttatttttctttagcttccacaggctccataatgcctgggttttattgatattggtatcctggctcccagcctcttcaatgattgtaaaaaatgtttgtgtttactgtaaaaagataatcttgcttttcaaagtgattagtcaaatacacagaatttcagtgtgcctgccattcatttgtcaaattcctggtttataattcatgcttcctcccgtgggggagaagaatgttttgttcagaaggtatttttggtgtggttccgttccctgctagtgaaattagtttatgaaaagaggcctggttctgggtgtagatggaagtttggcctgattaattggtccttaccggcagcccagaggtttcttcatcaacaaggagattttgtcctgtaactaactcaggtacctggaagcagcccgacatttgggggtgcatcgctgcagtctcctttggagctggagaaacctatgagcaagaatgggcttatgacacatccatttccactccatccctccttccgttgtatgactgcatggagcccctctgacctccagcagtgtcacctgcagcctggtagtgagaaacagcaggtatggatggggtctacccccagcaacagtagcgccagctgggccatatcctggcactgctccccaggaaacacaccttgtgttgcattgaccagatctgggatcatttggacaatgtcttatgctgcttttccaggatagctgtgtgttcaggagggagcccttactgaaaggaaagaactgttgacttacaagtttttgctaccggtttggtggtcactaatgtgtccagaggcctgaagatgggcgtgtgaggagcctgacttagcttcagaggctctgtctttcgactcacttgtgtgctcactgcacccctgtgctggcaggactccaacctccacccccagcacttgtgtggacagagagcccagtgctcaggaaagggttgggcttcaggcttgtgatgcagattccgtggtggctctgtgactccttctggtcgttcttaaagtagacagggagcttagatgtcacctgtgcattccccttgttgtcctacgagtgagtaaacagggctacagatagcactaagggatctgcgcatggctgtgcagctcattcatggcatttctggtcctgggtcccagtctctgaactccttcctggtctgacgtccctttgtgaatgttcaggaaaatgtcacagggctgcttggcagcattgtaaccataatttgtgctttactgtaaatgagaatcaggctgaggattgaccagctggttagaggtcctggtttgggtgtaaatgaagaccctcaccagatgcagagagatccccaatggacatagcctccagggcagacgaagccttaggggttctgttttgtcctggctacgctggctctgcagggagggctggggttctttctcctttgtgtgtttatacattagatctgtgagtggatcttagaagtcactcaaagtactgcactgattcccaaacttagtaagaagcagagcaggaagaggagaagaaggattcacggtccatggggatcaggcccatcagcacagaggactcagaagtcaaccctggcattgtctgctgccttcctggggaagccagagagaaaggcccactgcggggatctttctctagacctaagccgtagctgtctgctttcttgcctctccagggatggacttgtcctgccacctgggtagccagatagaacggcttcctgtgctggttggatctgctactcgtgtgcacaccctctggggcagaagccacgtctggtttggtgggctttggtcctccaccacctcactggaactcagcctctcctagattgctggttctccacgtgtggtccagggaccacagcaggggtcagcaccacctgggatttgtgataaatgcagattctttgcccaccccagctgaatcagaagctctgggggtggggcccagccctttgcaaacaagctttgtgcacactgaacttggagaaccactgtgttggactccgagtcctcttgcctggatgagaggcccaagagcactgcatgttagtggctcttcctcctcccccacacctccagggactggagctggggctgctcagaatgaaagatgaatgggggagggagaaggcccagggttgaccccccacaagcttgtctccctgtctcatgctgtctcctatcccatcatgctgctgattgggcaggatttacttccatggataatgggagactttagagcaaagtgtacgctgttccgattgggtagcagagcatgtctgttctctcatggactgctttcaagcacgttgtacatacttggctgagaaaaataaccaaaggcatttcttgggaatgattctagtaacatcctctggtacaagaagcattatttgatggtaatagtggtcatagaattaattagcatcttaccgattttgatatgttatccttgaatcatgttgctgccattgttaacagcaactgtctgttctcctatagtgttaataactaaatctcttattggcaaaggaaatgtattgtggagcaggtggcaaagaggacctgtgttacgtggccagcaggctagaggggactgtggccaagggcaggtgcgctaacatcgatttctgtgcttctaggaattactccttctacgtcctcgacaaccagaacttgcagcaactgtgggactgggaccaccgcaacctgaccatcaaagcagggaaaatgtactttgctttcaatcccaaattatgtgtttccgaaatttaccgcatggaggaagtgacggggactaaagggcgccaaagcaaaggggacataaacaccaggaacaacggggagagagcctcctgtgagtgacagcatccaaaacaccgtgggcccaaccatcatgataacagcagaccctcctcccatgtgtgatggcagctttcctctgcggcccctcctggtttcacatgggggaccactagaccatcttaactagcactttgctcctacttatatgtcatcacaatcagtagtgggcagatacgtgatgtattcgtatttataaattctgtacatctctgtgagtgtgtgaaacacttataagtaggttctcaaactttaaagtgctgcttacagaatgcacagttaaatgtccttttatacacaggtgcacagttagatatttctctttcttttttcttttcttttttttctttttttttcttttttcttttttttttttttttttgagatggagtctcactctgtcacccaggctggggtgcagtggcatgatcttggctcactgtaacctccacctcggttcaagcggttctcatgcctcagcctcccgagcagctgagattacagacacctgccaccatgcccagctaatttttggatttttagtagagacgggatttcatcatgttggccaggctggcctcaaactcctgacctcaaatgatccacgtgcctcagcctcccaaagtgctgggattacaggcttgagccaccatgccctgtccgattatttttcagggaagagccagtgtgctccagccctatgagctctacccttctgctcccacagaagggaagcacaggcctgtggggtggagggggctctgccctaagcgcagcccctgtgggccacgggtttcctgtcccttacactcggctgccttgtttctcccaccccaacatgaaaaagatggagtgagcctgcagccctgagttgatattgctttttaaattgagaacaatataattacagccttgtactggttataaaactttaaggtctcatatcagagatacagcagtgcctttctcatctaaccctgtgtagaatacggctgttgagaatggcgtggctctctggctggatagggttataaaagtaaatcgtcttttcacctttggcttttaataagggaagggtattagaaaaaaagtaatttgtatgatgaagggtgatttgtgcgtgtgtgcagacagacacacatgcagggaggcaaatcagaaccgatgcgtgtttggctttggcttgtttcgctggtgtctggatttacctggcgacacttgttgctctgggggatcttagagggaagcacgctgactgacctagggctgaacagcaggctgacgaccagcgccgcctcccgccccctgctcactctatccctgcaaagcccctgccttgctccctgttcagatcatagtaaaatcggatgtatccgagtatttcagagtgcttgtctccttagagtcagccagtctgacctgtcagatcataatacgtagtagccgtttattttcttttgaaagcaaaatcatggtttcctctctaaataacacttcagcaggaactgtgacatttcccaatctcagttgcgcacattttgtcctaaagacttcttagctcttttactgtcttcagtccctctgcttcacctcttgagtgtgtagtgggattcaggcagataagagggcgaaaggacaattcgtcagagagctctgggtctccatgagggtgggcagtcatcagtctttccctggtccttatcgtagtttgaatttggtccaaggaataagagagacacttggcacagcttccctgccatacccgccagccaggctacttcccatagagcacgttaggcttggccaagtgagatcttcttgtcagtgcttaatccagcctcccgttgtttgtcagccctagctggaggcctcacaggagttcctgtgtccttccagtttgatacgaagtttagaccaagaaaagttcctttctgtggcacacctgtagtctcttacctgtctttggtggttgtacacgaacaggcagatatccacaactgcagaacaagtgtcatcgtctctcttaagaagtttcagggcagcctaaaggctcaccttcaccctaccaggccccctttcatagccaggatcttagggatggagaagaaagataagttcgcctcgttcactgaagtcgccccttgttttcaggttaggaaacccaggttcatgtccaagtccctgggcaagtagccagcgtaactgattgacctaaaacaaaggatggagcccttggggctctgcatagtgaaatgtatgatttcttagtggaaaacgagaaagccactgaggaagcccagaagggaacttagcatatacagccagctttggggaagggggaagcagtgccaagcaagacaggtgcttttcagagacacatgaatctctgtcactcacggatgtactctttgccccaggtgaaagtgacgtcctgcatttcacctccaccaccacgtcgaagaatcgcatcatcataacctggcaccggtaccggccccctgactacagggatctcatcagcttcaccgtttactacaaggaagcgtgagtttctgctttgggtgatgccattctgttgacagggctacgaatgggagaggccagtctttcgatccttgaatgggctggctgaatacagggggtcagcagagtccccagggagagccacgccaaacatccctacttcatcctcatgcaccctctcgggctgtccctgtgatgtcagtcacagccagtgacagccatgattgggaaagtgttagctcgaggcctgtcattctttagtgagtgattagagatgtttgaataaaataaacccaaaatggggaaagcttgctttttccagaattaggtcagtccagactcatgaacgatgatgggggacttcactgaaatatcgtttcagcctccttacctactaggcctactccaggaacaccctgcaggcacgtggctcttttgtatcatcttattcctgtctctctctctgtgtgcctctcccaagctgtggccctctgctctaggtcatgagccttccaaacaagcgaagaaaagtggagagagaacaaccttcatgtcttgagccttttgtgacttctcctagactctgttgggagcttttcctgtgtgatcacatgacattcacccatctaagcagccgaggcttattcctcccgactgcagccctctttgatctccctcttccttcctttgccttctatatccaggtggctaccccggtctacttagccatcccccttacccaggtcccatgttaatcccatagttctctctcccagatgtgtggcttccaaagagcagcaaccagaggcaccttatgacagcatcttgtactctttcctcctgccagagctggggtcctatgaatgagaaattgggtacttaggattactaggctttcagagtttgtacacaggggagcccctcatgatctcccatcccatgacagcagacggtgttttgttcatgtttgtttcagaagccagcggccagcagctgtccagcccttttagctgataaatataaaatacctacccaaccatgcatctgtgcgaagtactatattctctgatagtcacaccagtgctttggcaatgtcagctggtaatttcactgaggacttgatgctggtttctaaggcaatctggaaactaaatatttgaatattataagatgcttaagcatcagaattgtttatgagcaatctgaattttagaagctacttctgtttgtctgtaggaaagtcatttttctccaacagttaccttctttcaatatctgatatttgcattaactgactatgcttgtttttttcttgatgaaaaaatgctgcaatcagaagagagaaaaatagtttttgcatatgttcttaaggaatagtaactattgaatcccagtaactgttgaagtggctcttcctgaggcagaccattcaattctgtaatgcccgactggggaagcccagagtccagtcacttcatttcttcttctataaaagtctaattgattatttgtttatttagacctcccattatagaaagtgtgacatgctgggcctctggggaagatttttgagggttttgatgtcagagccccgaactttctctgaacttaattgtctttcagaccctttaagaatgtcacagagtatgatgggcaggatgcctgcggctccaacagctggaacatggtggacgtggacctcccgcccaacaaggacgtggagcccggcatcttactacatgggctgaagccctggactcagtacgccgtttacgtcaaggctgtgaccctcaccatggtggagaacgaccatatccgtggggccaagagtgagatcttgtacattcgcaccaatgcttcaggtatccatgcctagacaagcccccagcatccacacttcttcacaagctcactggccttgcttgtaccaggtgtcattgtagggttagcagtgagctatgcctgttgtctttcttgtcaataggtaatactgtgtcatattcatttccccactgctaacacattaggctcttctgtgccattttctggcctcggtactatcttccatcatctcctgctttgtgcctgtgagcccaggtcctccagggtgctgggctggtttcattggaaggcccagcctggaaacagccgtcttcagctgcccttgtttcttgtttgttttgatgttcaatcctccaggaactgaaaccatgctgatctgtgttccacttaattcatgtagctcactggttttccatcttcattctggagcttatagagttccaaagaggtcaacaaaagttgaaagcctgcagatgtagtatgttgtggatattcagagtattcactgatgatgaggttcctccttcctttatctttaggttctaaaccatctcatttctcaactccagatctggaaacagtaaaagcaaacgttaatagtttccagtatataaaaactagtttagaagtaggaaaatccacttcagttttaaagacactgattgttttagtgtattggagcttctatcacaaaaaaacagtgtagcctgggtggcttataagcaatagaaatgtatttctcacagttccagaagccacaaagtgcaagatcaaggcgctggcagatttggtgtctggtgagggcccactccctggctcatagatggctgtcttttcattgtgtccttgcatggtggcagggatgcgggagcactctccggggcctctcatagaagggcctggattccattcatgagggcttcactcccatgacccaatcacctcccaaaggccatgcctcctaattccatccccttaggggttaggattttgacatgtgagttttggtaggggacacagacattcactctatagcactgataaacattctttgataatagccattattttagtgggtaaggtgtttttaaatacccataagcgagcacaaaatcagtttaaatggcagagaggagggtgagaagaaaatgctggtggggaaaaccttttgctgtgcacgcctgctccttcctccactcctaccccatctccatgaccctgtaagtggccacagtcatgtcactgggtaaagtgcttattgaaacaaaattggcacaggcttctgatcctgcgtgtgggttggtgtagcagaggttcagtgcaacagaagaagtttttcatcttaaaatttggaagtaacccctggccagcaattcactgtagtgtttgggaaacataggaatatctgcttattgtgacagattctcaagaaacctgtttcctttccgcaaagatggaaaccaggcactgtaccaatgagtcagttcactacgttttgtcctctgtccttacacgcagcggagacagacgagaacttggtcctctgcctctgctgtttggtgacacctatcgtaagaatgtatctaggaatgagctgtttgtttttgaagtacttatttttggaaaccctaaagtggctgagcatcaagtggttgtgttttctctgaaaacgccagtattagtcataacctttttccaaagtatcatcccttaaagatgttcagaaccttgtgtgtatcgtataacctggagcaccctcaagctgtccgcccttttcaagttttaaaaatggcttaggcaaacatattgcttaagtgatatccagtgaaggtgtctcctgtgctttgaaaaaccatcaacattgatgcttttttgtgacccaataaggacaagatttcagtggttctgggatgcatttgatctttatgcacacttcagctctgggtttcagttcaggggtcagcataagtaaagcttgatcagataactatgctttgcctataatcggcattcattctgctggtgacagagtcctttgctcaaaatgaggcttccatgcgtttgcagttctaaactgcttttcagagtcatgcctcagtcattgtactgaaggatgcctgtggaaatggtggacttccgtgttctttgcattgcctctcccccatccctcttacacacagctgtgacatgggcatgcacactccttcacacacacagactctccagccccctttccacttcctctttccatttggcttcatgacatttttatcagagattcaaaatctcagatgaaatccaagtcagcctgttttaccagttgtcgaaattgccggagtgcagcactgtggagaatggcagttgtaataaatgagaaataccaggtgtttgaattagctgtagattttcacattgtctcttctaaccctgcttgtgcccccgcagcctttttccatttacaactcagtaatgtttgttttcacagagattaccggaggaaatagattataaagggaaatgttggcatttatagtagtactatttcaaaataaggttcacttttcactttgtatttcattgttcattgttattttcttatccaggtcaaactggcagtttcctgttggcttgccagagtatctgatagcctgactcttaagttcatttcattttctagaatgttctttgttcccctctccagttccttccattcccttggacgttctttcagcatcgaactcctcttctcagttaatcgtgaagtggaaccctccctctctgcccaacggcaacctgagttactacattgtgcgctggcagcggcagcctcaggacggctacctttaccggcacaattactgctccaaaggtaagggtgcagcagcggcctggacggagggtgtgaccgttcattcctgtggttgtaatgtgcctgagccctaatattacacgtatcagacaacagtgtagttctccattggaaaccagctatcttctggttttttttttttttttttgagacagagtctcactctgttgcccaggctggagtgcagtggcacgatcatggctcactgcaatttctgcctcccaggttcaagcatttctcattccccagcattccgagtagctgggattacaggcatgcaccaccatgcccagctaatttttgtatttttagtagagacggggtttcaccatgttgcccaggctggtctgaaactcctaacctcaggtgatttgcccgcctcggcctcccaaagtgctgggattatagccttgagccaccacatctggccgagaccagctatcttcttgattaaaggtactgagagctattatttttccttacaagcatgtataacggctttcattcccactcttgttttggcttttcttttccgagaagacaaaatccccatcaggaagtatgccgacggcaccatcgacattgaggaggtcacagagaaccccaagactgaggtgtgtggtggggagaaagggccttgctgcgcctgccccaaaactgaagccgagaagcaggccgagaaggaggaggctgaataccgcaaagtctttgagaatttcctgcacaactccatcttcgtgcccaggtacccagctcatgtgaaatttcagttggcaaaacccactgctcaggccggttctgttgcctttctccccaccaggtagtgtgtaagtcagcagctggggggtacaatacagtagccactgagacggagccgaaaaagatgacaggttcggtgaagtgagtccctgcggaagccagtcagccctgaagggaacagggaccagggcttgggttgctggggccaccggtgtgacaggtactgctgtctcagccacaaccccccacagagagcaggtgggcaccctgtggtagaggcagggaggggaaactcaaagagtattgacagctgctgcctggtgagaggaaaggccaggatttgggtccatctctgcccttcctaattatctttactgcctctctcagcctcacagaggaggagtgaagcaagagggaaaaaagtcagagtctgtgctggaaagggcctgacttcaaaacatagccaggtgccacaggcatcctgtacaagtaagtttgggaagcagtgtagggcgacagcctgcattggctgtttattccgtggttactctgtctttcaaagcaacacagcccctgccccagggactctgctcctctgctgtggtcttggtttctggggagtggggacaaaagcagaggaaagtaaacgttcatagcaggactgttcatagtagccaaatctggaaacccagtgtacatcaacaggtgagtggctcaataaaatgggctcgaaccttacagtagaatattattcagccataaaaagggaggaaattttgatccatgtcacaacacagatgaaccttgaagacaccatgccaagtgaaacaaggccagacacaaaaggacagatagtgtatgattttatgttgtgtgaaatatatggaatgggcaaatgtatggtgacagaaagtagatttgaatttaccaggggatggggatagagtgtggaggggaatgggaattattccataatcgataggttttctatttggagtgatgaaaatttttggaaatagataatgatgatagctgtaccattctgtgaatgcaattaatgccactgaattgtacccttaaaatgattaaaatggcaactttttatcttacatatattttgttttgttttaaaattttattttaacacaataaaaaatgttaaacaatttttttttcctttcaaaaaaggattagcccagtagtgtgtgggaaaggagatggaagcacagtggtgctccctggccccctcttcctgtaagattatagtgcagattttggaaacgacctcatgcctgaaaactaggccaaggagttggatttaaatcagcatggcacccatgagctgcccatccgcagtccccacagcacccgctgccagcaccccacccagcacgttcccttcccctcactgcccccgaccctgagaggagcctgtagcggctatttattccacagtgactctgctcttacaggctttcttaggctgtaacaacaaatggtttttaaagtgattttttttttctgccaagtgacctttttgatatttgcaaaatggttgaaatagctatctcacttcgagaaatcagtaaagtgggaaataaagactggttagaactggaggcattatttccttttgagagtgcgcctcttcattgcttggtggcttttttctcctcccctcctctctcgaagttcaaaccaccagagcagccaggcgcggtggctcacgcctgtaatcccagcactttgggaggctgaggtgggtggatcacaagatcaggcgttcgagaccagccgggcatcatggtgaaaccctgtctctactaaagatacaaaaaattagccaagcgtggtggtgcacacctgtaatcccagctacttgggaagctgaggcaggataatcgcttgaacccgggaggtggaggttgcagtgagctgagatcgcaccgttgcactccagcctggacaacagaacgagactccatctcaagaaaaaaaaaacaccagagctgtgagaagggcctgcgaggccctcatggcctctcctagcctgccccgctgggggagtcttctgcctgctggtgtgtggcagggctttgaatgtgaaccttgaggttcagtgcccaaggccattttcttatccaggatatctttgtatcactggtggttcctagaaagcagaaagtttgaggactagaaagattgcaaagaggtttggaaactggaactcaatgaggtttggtgacttctctgacatcctaattaattaagaatccgtttgggacctggtcctcattcccacacaccgactcttttccccctcttctcctccattgcgttgcttctcgtggtcctttccacctagaccagcagaggcttagctcgtggcagctcctgctgcccgccacacggaaggatggatttagagtgtcccaaagcaggctgggcgggaagtttgtttttctctatcatgggcccttggttacgttgctgtcttgttccaccaaccagcaggaggttcgggttgtgagtcaaggttttggaaagattttgctgaaaggccccttgctttcagttgtagttacgaggcaagacctgtttttttctcatcagatgtggagcacaaggtgaagtgacgtgaaggcagagctgtgattgacatgttattaatgcacagcattggtggtgttgggttcaaaacaagtttcctgtgttctactggagaagtgtgtttatctgtcccccgagtccttcctttctctctcctaagacaagtccaacttgtgattctctgttttcatggatgtatatgaagacaatattttgtccgtggtgagaggccataatttttaagaagttaatatttgtttttttgcctcctactgagttctggcagagtccaggtgaaggagtgtccagcagagagaatgactgaatcacagaggctggctttctgttttacacgtggattgtccgaaaatggatttgatttctttcagttcattctgagaacaatgtatttgtgggataaaaccagttaagtaagatttagttccttataaattgtccagaatatcctgtatgttttgaagtacagtggaagctagagtttgtaaaacttactagtttctgaagtcaatattcgcagtaaatgcctttctttgactactgtctttattttgtaaatcacatagtttggtttaactagctaaaatgttgacagatgttggaaagtaaaaggttttccaatagggctaggttgtattatgggatggagtggggaaagttggcagtaatgtttgcttttgggcgtacgatttggaaatgtagttgtttaccaaaaaaaatgatgtatgggccattgtgcttcccctgttcctgccttccagataatgttctgtgtcacctccctccccttgtcactgccttgatgtcatcagcattgagagctgtgcagtccctaaaagtgtgatgttgataaacaagtaaactactgagtatacttcatgaagtaatcccagttaaatgggggtgggctgagccgggagaggggttttgacagaattattttgcggtacatcaaacctaagcaacttctgacagacacaagtgtatgttgtgttggttttgaaggtaggcaggaaatttgttgatgatgtgttgacaaagatttccctgacagtaaatgtggtttcttgtgtttttcccttccgggaagcttggttagctagttggttggtttgcagagtgtgaggattgtggatgatcagcctcatgtccttacccttcctcccccagtattgtgaaagcaaatgtacacgccctgaccttgtggttttctgcttgttggaacgagcatatctgtgttgggcagttcatgccttcggtaggacccccgtgtgccactacacaaagaaggaccgtgttttcctcaggggaatccatgggctgagaagactggggagcctcagaggccctttcccaaagccctctgctctccccttccaggttctgacctaaggaccagccagaagcctgccgagcgtcagccgaacctgcaagtggcttctgggctgttccgttccctgcgtgagctttccctctctgctgctgctgccgcgctctcccctccatggcactgatgagcttcccacattctggactttctcatttccctgggcagatagaattcatcccatttgccccctgccttttgcctattcctaagaccggtgaccccagccgaaggcctcagccctgttttctcaccattcgtccatggctgacctgagggttgccctttctccatctgggtgctcctctcgtattctgtttgtttttgttggttcctgtaaacattagaattctgttttaaggtttctagggggagccacaaagcccatttcttcatatttgaccaaagcagcaattagagggtcgcaccctcatgcctcatctgccctttttggtgagaatgtcctttttgtgatgactttatgcactcccttttgcttttcggttgttccaagccccattcaaatccatgacaaggactctgctctctgatgggcaggaccttgatgaggccacaggtgctcactgctgagtgggaggaagcctgggtgggctccagggacctgcagagtgtagcaagcacagacgcttggggttgggggtgggctcgcagcaggagcccccaagaagagagagccctggggtccgtggaactgcttgctgctagactccaggcatctttatttccacagtcagagcaaatccaaggagccaccaccacaggctttcatatccctctgccccaggtctctggggcctctgccacacacctcacctctcccctcctgccctaataaatcttaaccacagctgataggtttgccacctttaaggcttaaccataaggtctgtgaccagatggcctgagtgttctgatgacacagccaggactgcctggccaagagtggcagagacactatttgcctctaggtaaaatcgaagaaccactctgagagccggggggtgggggtgagagtttgtgtgcccattctgacacttgcagagtagagaaagcaagataatgaggaaggacatccctgtgttattcatgagttcttacctaagggggctcaatagctccttctattccatggttaagattcttctgttactcttactcaagtcatagaaaagacaaaagaggtaaaagtacttaaaagccacatttctctcctccttgcagacctgaaaggaagcggagagatgtcatgcaagtggccaacaccaccatgtccagccgaagcaggaacaccacggccgcagacacctacaacatcaccgacccggaagagctggagacagagtaccctttctttgagagcagagtggataacaaggagagaactgtcatttctaaccttcggcctttcacattgtaccgcatcgatatccacagctgcaaccacgaggctgagaagctgggctgcagcgcctccaacttcgtctttgcaaggactatgcccgcaggtatggtatgatccagctggccccattgccaccttcctcacaacctagtggagaagatgtgttttatggacacagggtctgacacccagggccatgacccttagacccaggcctgcctgctaaataacgtgcagtcattggcaggtggcgtgtagaccagctgcccagggaacagagcccacgctctcctagtgacaccactcccagcttggtctctccatagaacgtgctgggagcagggagctgtctgcagggtccaccctccacctgctacttggtgcacatcgtgcattcctgctgtcctttgccccctcttgcgcacaaatcgggttgccccctcctgagctctcacatgtccagagatgtctccagttagttgccttgatccagagtaaacattgcccctcaagatcaactcctggagtagcctctggtcttgcttatttagtctttggctttcccttgttgttagacactgcctgtcactcgggcattcatccatctttgaaggtgggtgccttcaaagacagaacaagagctgccctgtcctttagtaggcctcaggtggtagaaagagcacggaggtgaccagagtctggggtgtggggtcctcctgggtgcagttctggcactgaagtccattgtagcgtgccttgaggcagtcgtcaggctccctgcctcagtttccttagccctcctgggagagacatagccagctaacccctcaagtgccttttccggctgtaactttccatgacctttgcttatcacaactttgtttactgcttcaagaagcaaaagcaagaaaggaaccactgcaaggtcagccagccgctggaggagttggtgccggcagggagggcttgccctgctcttagcaccagcctcctagcagcttcctcacaggccgggctcggggccatccttcgtgcctgcataaaaattgcagttgccgcgtgtagacgcgggccacggagggtccctgtcacagccggcaggccccgtgtcctgcttctgcttactcagcatctttccagggctgcttgtgtttgatggcttcacaaagctttcttttttcaagtggtaggcacagggtagaagaaagttacttaggttgccaagattttcctgctgtgcttggcagcaggctttttttgttgagggactggggagaaaggaggatcttgtggcatcttgagacgtgcaagttttgtggttggtgtattctgaaccctccgctgtgtgagcagcccgctcaggggcagtgtacgtggctgatctccactgtcctgcccgcgtggatgggggggttattctcagtgtacgtggctgatctccactgtcctgcccgtgtggatgggggggttattctcaggtcagcccagtgttggcctccctccctgggaacccaaatccaactttgtcacctgtttaaattgtacagaaggagcagatgacattcctgggccagtgacctgggagccaaggcctgaaaactccatctttttaaagtggccggaacctgagaatcccaatggattgattctaatgtatgaaataaaatacggatcacaagttgaggtaggactggggcagtggcccgtgcctgcatgtacttccatccattgacagcatatgctacctgactgcacaggttacctcctggttagcataggacttaaaacaataaaatccatgccaagttggtgaggatttgggtctttctacccactctgtactctccaaggagtactgcatagtgtgcaaagagctaggctgctttttgccctcaagaaacgatttcattgtgtaagataaccttgtggcataggccaggtcagttctaataacttttaatccttctggagttcttggttacaaaaatgtttggttaaagcttttgggtgtgcttaaagctacttgaagacgaccttttaagatttgatttctttgtctttactgacactcaggatcattgttaggtgggaggtcagatcaggcagctggagtccccagtgtggtgagtttagttggcaggccccagatttctcctgcattcatgggaaattgacatgtatgttttatttccccaggatcagcgagaatgtgtgtccagacaggaatacaggaagtatggaggggccaagctaaaccggctaaacccggggaactacacagcccggattcaggccacatctctctctgggaatgggtcgtggacagatcctgtgttcttctatgtccaggccaaaagtaaggcttgtggagggagaagaaacgtggtaaaactgaaagcagggtggtccaggatcaggacagcccgagtgttcatggctgtcttattttctgttaaaatggagttggccagcttccagaagggtcatgctaaggtgccggcacataccggcactgtgtgtgaaaggttgggcagggcagatgccgagctttgggctcctacctcatgtggcaggaagggagaggatccgagcctctcctttgaggttgtgtaaccactggagagccagaggagacagttgctttcaacctggcttacattcaaagacttttttttttttttaaacaaaagacattttataaagcattgaattgaccattccacctcctacttggtcagtaaagctagatagggctcggattcagggcttgaaatcctaaggggtgtaaggaactccagaggtcatctggttcagcctgctacagggcaggaatctccacggtagcatcgcagaccctccactgtccttttaaagtccccacatgcattggaaatgtacggtgctcaccctttggtacagagactgaggaatgtgagtttatgctcaagtcattaacaagacagaattcttaggctgttctgtgtgatgacttcagattttaaaacaaattataagatgtataagcgcaacaagggccacatacttgttgtttgaccaacaaaacttagtattttggtgaaattagttctgtgttgagtttctgttatttcttatttcaaacccagtttttaagattatttcatgttcatggaatgggatcaaatttggcataacacataaaatagcaatgcagcctcacttagtggtaacacttttgggtctagtgggctgatctttcctggtgtccacatttctgctactcacatctggagttacgttaaaacatgcactccgccgggtgcagtggctcacgcctgtgatcccaacactttgggaggccaaggtgggtggatctcttgaggtcaggagtttgagactagcctggccaacatgggtgaaaccccgtctctactaaaaatacaaaaattagttgggggtggtggtacacgcctgtaatcccagctacttgggaggttgaggcaagagaatctcttgaacctgggaggcagaggttgcagtgagccaagatatgtcactgcactccagcctgggtgacagagcagaactccatctcaagaaaaaaggaaaaaaaacaaaaaacagcgcactcaataggtccagcaatctcacttctagtatatttccaaaggcaatgaaataggtatgtcaaacagctctctgcactcccatgttcactgcagcactattcacagtggccaagacatggaatccacctgatgtccatcactatgtatatgaatggataaagaaaacctggtacatatacattatagaatactattctaccataaattagaaaagaaaaatgtcgtttgtggcaacctggatgaacctggaggacatgatgttaagttaaataagccagacacagaaagagaaataccacatgatctttctgataatgcggaatctaagaagttaagctcatggagagtagaatggaggttaccaggggctgagggtgagggagcagatttggggagatgttagtcaaaggatacaaaatttcagttagataggaggaataagttcaatagatatattgtacatgatgacagtaataatgatgtattcttaaaaattgctgagacaatagattttaagtgttctcaccacacacaaaaaaatgtgatgtaatacatatgttaattaggctcattcagctgttctacaatgtatgcatatttcaaaacaatatgttgtacatgataaatatacaatttttatttgtatattaaaattaattaattttaaaaaagatctccagtagtcacctggtcagcaccagatattctaatctgtttgtgatatctgaaaatcctaatacagacagcaaaagcaggatggggtgaatagaactgcaaatcttgagccaacattttatgtgcctggcactgttcctgggttcaggtttttaggggtaaatggatgtttaggcagataattttgtcaattaaaatagtctgaattgttccatctagtccagttaacctagtctcaccagttagtctatgccacctttgcagcacccagaagcttcataatattcctgcagccttgtccagggtagtggcttgcttgctttctatctttccccagcctccttccctcctctttttcctcccctccatctcctagaaacagatcctagtttgggggtctgtgatctgtgaaacagcaaccttggcttctggggttgagtgaactcagcttgttttggtgacatgacatgttcctgtctgcctttgctgctccatttttaaccttgtaagtgccaggatgccagtgggaaatcgggagtccttctgatagaatttttccagcagatgttatcacgtactgcagggaaattggatctgcgtgctggccttactgttgagaaatttttccttatgtcagacaagactctgtcctgctacagtttagtctcatttcctcttatttaatcctcagaggagatggaaggtttggaagctttcaggcaactgccttccttttaggaactccttgtgtgcctgaatactattaaattactcctcagacttctcttttccagatgaaataatctcaggtcttttggccttttcttgtagcccaatatcatacaccagtttcctagccatttaatcatttttgttattctctggatgtgttccattttctccatgtccctgttgaaatgtgaaactcaaaaagaacacagtacagcctgaccagtagtataagtgatataaacagtgatataagggccttgggggaagaaagaaaaatctgccagctttccgttggtaatgatcacctctgagtgtttttaggaattgcaaaatgctggagcctgcatccattttgagagctacaatatcaataaaaatacttctttcttcgattaaaatacttctaattttaaaaattaaaatagctgtagtagtctttaaagagtaaccatgatcacagttttccatggcaaaataatcattgataggggacttacgattaatgtttacttgatccccagtgattccaggcccatttccacatagacatctgtatttggacgtcccagagaggtctcagattccttgtgccaaaaccaaaatcacagttgttgccctcgaaaggcctcttctctcctttgctccttagctcagtcagtggtcttgtaatccatttgttacccaagccaggaacctcacagcatccttcactcttctttctgttcagccacccctttttcattccaacccaagcctcatggattctgcctcttaaatgtctctggaatccagccctctgtcaccaccagcaccgccacagctcagactccaggtcactcgccttggggggatggtatgagctgtcatactgtatgagcctcatcctggggccatgacttaccaagccagatcatctctgtgagtctgcctggtgtaaagacaaggatcagtgacttctttgtaggtctgaactgggtaatgcagagcatgccctggagacatggcatgtccccccaattctccaagacatgacagtgccttctcttactgccaggtccctccgtctgtcctcagcacagccatttccctggaacgcgaatctgatcagttcactgctgggcctgaaagctttcgctgactccttttaatctgcagaatgagggtgaaactgcttagcttgggctgggtcccttgtgagctggccctgacttctctccagtatcatcattttctaggaaagccatttccccacaacccccaaggaaagcatatcataaacaagttttcccttggggaggttccctcgactcccttctctcctctcccttcctctctgaattgttgccatatgtgaagtccacttttctagttgtcatgctacctgttgacactaatttcccatgtcccacagaatgttccagggtatgggtccatgtgcctggtgcccagcctagcatctgccatacaagtgctggttctgatgatcagtggcttctgtggtcttagacttgtagcaggactcaaatgtctgcagcggcattggaaaggggtgccgtccagtgtgtgcatgtgtgtgtgtgtttattttaaattgtctatggaactatctcaaagattgaggccagcaggacttgacctatacatagatgtagactgtacatagatgtaagaatttctattcattttatgaaaatgaatagaaattttcattctatttattagaaatagaatgcttgctgctgcaagcatttgagtccttttacaggtgtgagatcacaaagaccgcttaccaacagaaccaacacttgtatggcagatgctaggctgggtaccggggacatggaccaaaccctggaacattctgtggaatgtgggaaattagtgtcaaatgtatgcattttcactaacagtcattaaactgcgtacaaagattatttttcttcagtctatcattgaaactattgcaccagaatatactgtactttaaaaaatgagtatatgcctcagtctgcacatatttactcttttttcaaataattgtttgtttgccgtgttctatttctgacaccatttaccttcaggaattcttactgtatgatggggagtaaacgaatatacaggtatttttttcatacttccaactgaatgtgaagaaatgaaatgagcaaattgttcacctggtgatattttatcatttcctcctctttgctgcagcaggatatgaaaacttcatccatctgatcatcgctctgcccgtcgctgtcctgttgatcgtgggagggttggtgattatgctgtacgtcttccatagaaagaggtcagtgatgtgcaaagttatgacactttctgtggctgagtggtttgatgatttgaatgtgagtgaaggtgatatttttgaagatttcaaggaaatattttatggactggaaaacctgattttcccatcaaatgttcttccaggaaaagagaaccttttctaatgattttaacaacagccaaaataatttttcgatggtacagaccttcccctggctggcttttctggtatacagatactgctgctggtgcatacttttccaaacgcgatgcgctagccttcccaatcaaataagcctttttatttccaatgaagtaaagaaacagatgtttcttaaaaagcgctaatctcaggctactgaggaagccagaagatgtgttagcaaatgtctgctggctcacccaggcctgaattgggagtgtagacaagagctgctgtagacagtaagctctccccattctgttctgataccgtgtgagagaggataaatgaaactgttgtagcgaagatgaaagtatatacaggaatgtatggaggtggggttttgttaacgtgaatttaatctttttgacagaaataacagcaggctggggaatggagtgctgtatgcctctgtgaacccggagtacttcagcgctgctgatggtaagagtccgggccaccagcactgccagcgtgcagggcaggtagatcgggagctttcaggagggttgctaatttgggaaaggaaggaggtttgcattattttgagctacctttggccttggatctgtcttcattaatatttctttctttctttttttttttaatcaaagtttttagcagttcagtgaatatgtcaaaacttgtgggactgtatggggtgccccaaggaaacacaggctttagagatgaatgtggccagcgcagtaatcaatttatttaattgcttgagatgttatgctagaatgaaaacagctttttaattgttaacatctagtcagaggatatgctgcagctgacaaaacagtccttttaaactagtttcagcttgagtatcatctcattataattgtctttgatgaattacagctctgcttttttttttatcatggaatttttctgtcattcccttccgactagggtcatacgctcgtggctcattcacattccccttggtaataactaatgagggccattcagttaagtggctgggaaggtctgacatggaagttgggtgatcctcaatggttatttccttttttgctctttctagcatttttatatccagaccttttgagtgagtcggattagggtgaggggttggtcactgagtccagtgatactaggacccttaactggcactttgctaggggcttttacaaacaccatcccatttgtttcttaaacccctgcaatgtgcgttttcttaatgcccatctgcaggtgaggaaatgaactctgggaaaaaacttgtgcaggctcacatggttagacagttgagaagtcaggaggagaatggaatcactgtggaaagggctgtgaggtcccccgggcaggcaaggaaacagccctcaggaggggctggaccggattcatcaaatgaataataaataagtgcatgatgttgagtgagtacatttagaaaaagtgtttgctgtcttcttgcctcgggagaagtgaaagtagatgcaggagatgtgaaataaagagacatgattattctaattattgtgatcaaataagaaaacataagaaaatactttaataatgtgaaaacaccgttatactatgtagggttttactatggtttctttaataatttctaattcagtttatagtaaagtcaatcaaaagcagcctcctctgaatgggaatcaggtgcagaataatgactttatttctatctacataaaggtctcacaaagttggttttttaatagtaatatatatatacatacttctgtagtgtgtgtatataaggcagagagaacattctggacggatgcacaccacacttacaagagttgttacttgtggagaggatctttccctttaaaaaaaaaaaaagccagatgtggtcgaaggcacctgtagtcccagctactcgggagactgaggtgaaaggattacctgagcccaagagctgcagtgagctagaatcccaccactgcactacagcctatagagcgagactggctcttaaaatccagcaagaagatagatatgcattgtttgtatgaataatagcttctaaaaagaaaatcagtaaggaagggagtcatcccagatgatggaattgatagaacaaggcaagaccactttccccctctgtgagggtggactgtgactctacgagagaagctattctgctttgaaatgcggcactagaggttggtgtgtgtagcttttgactgtgaagtgtccaggaagagaaagcatcaatacaacaaattcagattctcagggctctcatggtgacttgaattcacattttgtgtccttctagaatgctttcatgatacgtcttggtacttcattacaacaaaaacaaacttattgccacccaggtcgacaggtgggaacagtgtcaccttatttgaacttaatttattcggcctttgagaagcacttatagccagtttcctcgaggggcaacaaaatgacattgcagttcaaaagtgctttaaaaacttctttttcccaaagctataatctgcatgtcaccattctccagagtacattgaaaatcccctacaggaaagtgctgataacattgtgcacagaaaccgctcctggctggtggcactggggacgcctgcttaaagtcggagccgttgggttgaatcgagagaaaaggattgagcgtattgacttcagggacctcccagggaatgaatgtgattggtttcaactccatgttttatggcaggctaaacagttaattctgattaaaagcaagcctggattctcagagataaatggctggagacagtgaactctttacactttctgaggcgcattgtgaagagccttatctcctgggttgtcttgcatacttactctcctctgacaagcacccgcctcttcttcaggggtgcaagccacctatgccagctggagggcagagttccattcgtgaaacccttgaaacatacgtactatgaaatacaaaaatgtgtaggaaagaaaacaagattattaatgaagttcatattggacacccctcagaggtctaaaatgatggtgcccctcctgggcctaatttataataaacatctctcctttgagacatcacttaaaggttgatagttgggatatggagatgttaggatacagttgtcagcctctcacatccagccacaggcccagggtcagcatctgaaagcatgaaagcaaaaacaggcaccttctccacctcctttctgagccaggaccacctccttcccacagtcagtgtgtggtagagcctggtggcaggtcccgtcaggcaaggacattagcacacagcgtcagaggaattactgacatttcatatggatcttatggaacaggttgattttattttcgtttttaccctacccatttggaggtgtagaattgagcctgtgtttggttttgttttctttctttccaacctttttcctttctttctctttgttttgccttccttcctgcatagaaatatttatttattcattcattcatttttttgagacaggttctcactctgttgcccaggctggagtgcagtggtgcagtctcagctccctgtagcctcaacctcctgggctcaggcgattctcctgcctcagccccctgagtagctgggattccaggtgtgtgccatcacacctggctaattttttaatagagacagtgttttgccatgttgcccaggctggtctcaaattcctgggctcaagcgatcctcccaacttggcctacgattacaggcatgagccaccgcacacggcccatttattttcttaaaccagatcgaatctaaacagaaacagaaactggagaagaaatcctattcaggcttggtatctactgtgcattcctcccaaatctctacccattggtcaaggtccctgagttcacagagcccaggccagagccctggaaacgcctctgcccgtccgctgcctaattgcctgtccacgctgggcaccaccgggtctctccctcagtctcagagctcagttgcttctgcacctcatcagggatccagccatcaaagccaaggctgggggacacttggactagagtaatcctaccaataatgcagttcagctttgtaaccgcaaattttctagtagccgtattttttaaaagtaaaaagaaacagatcaaatgcattttaatagttttttagttccaataatacgtttcgtgtaacccagtatatccaaaatatccattttaacatggagtcagtattaaagttacctaaatatttcacttttttttttttttttgtctaatctttgaaatcccatgtgcatgtctcaaattggactggccacatggaatgctcaggagtcccatgtagggaccagctgccatgttagatagcccaggcatagcatctgtgttgagggccctgacacctcttttggattcatccaagaagtaggaccttacgtgcaccatcatcacctctcatatgtgactctggcctttttcccgacccagcataagaactcttccctctccctactactctcctcctttttacatttgcgttttaatctgttggtgaagatgggtaaaatcctgcttgaccatttcattcagtttctcaatcccctgtggttaatttgtttttttcaaaaatgtgtttttatgtgatgaaaagaaatttttaaaaaccaactgctttctttcctatactagacttccttgctttgttctggtccttctatctgttagtatcctcaaattatcttgaaatcctcagagatctgaaatactagtactgactgtacagttttcttactcaaatctatagcatgtggaaagttgacagcaagccatgccatcgcctcctggtattctctgtgggtttaaggaagcagcatcttatattctttggcttagagttcccccaaagcacgttctgtctaagggcttgtttctgtacctgctttaattacggtttcttctccagtgtacgttcctgatgagtgggaggtggctcgggagaagatcaccatgagccgggaacttgggcaggggtcgtttgggatggtctatgaaggagttgccaagggtgtggtgaaagatgaacctgaaaccagagtggccattaaaacagtgaacgaggccgcaagcatgcgtgagaggattgagtttctcaacgaagcttctgtgatgaaggagttcaattgtcaccatgtggtaagagaaagttcctgaaaagccaaaatgcagcacagggagagggtatcacacaagcctcccagtatgttcttggctgcatgtacccgtgggtttggtgtcttgcctttgccttctggatagttaccccattacctcactgctaccttcagacccctgtgctcagaccaggccgcagcaccacagagacagttccagacaacacaggcaccagcaagggccaccctgaccctctgagtctttctctttttgattcctcccaggtgcgattgctgggtgtggtgtcccaaggccagccaacactggtcatcatggaactgatgacacggggcgatctcaaaagttatctccggtctctgaggccagaaatggaggtcagttttcatttccaccggtattgcatgttgcctggcctgctctcttttcctttataatctccctgcaaggaaatgctgtgtctttaaatcagtttactttccagcatccagtgtttcttactgcatgctcagttgtaggtcatttatgcaaaggatttccccaactagagtcagactctgatcttcgtgaggggaacttcctgttccttggatcccctctgctaagcccctctgtgcctttgttcctgcattccctccacccccagtcccctccccacatcagtgtccacctgccaagccaggccagcgccactccctccccgaagctttcctgccccactccagtagctatctcctctgctaacttctcgatgcgcttgactcacatcctcgtatgtgttctctctcgttatgttgtgttgtgctgttgttggagtgtgtcccccctccaccccgttgtgtttagcttttcatctcagtccaagtgtgtggctcagggccgcatttgtggcaggcactctgtcaataaatgtatgttacagttcaaggttaagctgcctggattcttgcccttgcatctgggaagttgctgggtgatttcccacccagctccgtgcgcaagatgtgcactcattcataaaccccctccccacacacagtccccttccccggcattgttggcggtccttgtctttgccactgggaatctggtttcctcagactctacgtccacgtttcaggattgatccagagtcagtgtcctgcttacgcttttgaatgaatgatcccacctcagctgcaggatttctgcttagtttcctaaaaatttcactttgggttatgagcttccaattctaaacctgctaaagtcctatgcaatttttcattaaaagtcaccgtggtgtctcccccctctgtagtattaacccacaggccagctttttaacatatgcgggcatgacttttgagtaattaattctacaaataaactgggagataaatgctgagacataaagccagcaagaactgagttttcatttggttgcctccgtgggtctgaagtctttgacccttactttgctgcttactgggtaagcagtgtgtctgcttttattccttagaagcagtgacttccccttctcggcccctttggaaattcttttgctgttcttcatttgggcttaatttttttttttttttaatgttctttgaatcggcaacttaatcatctcccaagtgacagtttcttaattttagttccaaacacctgttcacatatgacttcatgtatttgcagcacatggtgtttggggccaagtgtggactggggcttcaagcaggatggtttacaaaactcccaccctctgttctgccaagcattggtccccagcacccctgggtgttagtgcctcttcctggttcactcactcactttctctggccctctctgtgtctctctcactctctttctttcgagatggagttttgctctgttgcccaggctggggtgcagtggcatgatctcagctcactgcaacctccaccacctgggttcaagcgattctcctgcctcagtctcccaagtagctgggattacaggtgtgtaccaccacgcccacctaatttttgtatttttagtagagacggggtttcaccatgttggccaggctggtcttgaactcctgacctcaggtgatccacccacctcagcctcccaaagtgctgggattacaggtgtgagccgctgcacctggcccttggttcactttaatacacaaaacagcatgaaggagaaaagcttgatgaaataggtgactggagatctggcagagtatttcttgccagcatcgattgaggcacctctgaaaagtccaaaactcactcccttcctctccagtttcaggcacagaataaaaattcagaacacatggccttggtcctggctctgtggctggctgcctgtggtcctcagacagctgctgcaggttcctgggcctcagtgtcctcaatatgaaataagagggtgggacaagattactgaagtccctttcagaactaaaattcacctttagattggtcagatttaaactttttctttctagctcatgtcaggtattaaaatgtgtgcacttaccctgcagtttcattatattcaacctgctcccccgaccaagtttcacttacgtatctcactacgagtaggtgtatatgtatacttgtcttaaatagctctaaccaaattaaaggaaagaatggcagtgtaacaccatgaactgacaaaatttcagccctctgtctttctccatgcttaaagttgagtgcttttgttgattctgttgctcacggcaattataaatgaccacttcataacacatataggtcatactgtaatatttaagaattgtgagcataaactttacatttcatgtgcatatttcctcatgcatcacacgtatctaaagccctgaaaagtagtgatttggacttacccccagtgacttaatgttgcttccccagataaccacgtgataagtgttttaagtcaccaagagacagctttgacagcctgttcagaattcaaaggtttgtgtcaccaagtgtagagaaccaacccagaagtaccgaggagttgttataatgattccaaatactagctttcagtagaaactagcacctcacagggcagcagccagcatccactgggcattgactatgtgccacgcaccactgggcactttctgtgcgtggccccaggtcatcttctcgtcagtgaaaccactgtgataccccatgtggaaaagcctgggcatgctcagctggtggccggcctgcaagtgtgggacctgtcagagccctatggctttgcagtgctgtgtgagatgctttgtggtcaagaaaaccaaggtgtagagtctgttgcacttgtatatgcaaaagtaaaaggtaacattaaaattagggactagtgattgttttaggatggagagacttgggcatgtgttttatataaaacttttttctaaatggatgtattatttaagggtaattctttttaattccaaagccagcacgttgctgtcctctgcaaagaggaatgcttatccctgttacttattcctggtttcctccaagactagtttcagctggacttcagttgccaaggacttgtcttctgtaatgcccacagaaaataataatgccacattgtaaggtgaaaacagtaatcctggtatttttgtattttagaagaaggttgaagggaaagaaaaggattaaataatttataacgatgcttttatgggaaataaaatataccatgtccatttggaaacacatttgcttacttccacacagcctttgtaacgtgctctccttcctcttacctgtacttcggtgatggaaataaaaggaacatataaacaaataggaatttgagtaactgagaatccttactaccaaaaatggcttgtttcactttaaaaaaatgttgccctacccaaaatagaaaatgttggtcctaaagagtgcaaattggtgtttccctcaccagctctgatgtggtcagggagcaagtgcaaataagcttgcggggagcaagcaggtgccatgctctccatgatggtttgttccttccgagcaagtcctggtttcttagcataaacaacccacggtgcccagattgaacaaagatgatatgcaaacctcgaaagaaattggcatggaaaaaaaaaatccaaaattctcatgtgaatttttttaaatctccaacagaataatccagtcctagcacctccaagcctgagcaagatgattcagatggccggagagattgcagacggcatggcatacctcaacgccaataagttcgtccacagagaccttgctgcccggaattgcatggtagccgaagatttcacagtcaaaatcggaggtgtgtccttagctttccaggtctgggcaagaactaaactcaggtgttttgaggactttgttggcattagtctgcccctggagaggttttctagtgtgtcccttgagtgcacggactccttcttgggaatgatgtgattgtctccagttgatggtcacaaacctggcacggtcggtcccaatgctgatagctcatggacatggtggttcagatactgggcacggtccctgaggctggctctccagacgtttgaggcatttcttggtagaacacctcttagcattggttacagaaataattaagacaatgtcttcaggagattttgacttgggaataaaactcactgtccaaccttgcattcatccctccaattttcctagcttttaaggagcattgctccccttccagggacccacattggtttctaagaggcaagctgccctaatgacgaagcctctgcacggagcaggagcagtggcaggagctggcatggcagtcccttaggtgagggacgatcactgctcactgggtttcacggctggggctggccagcctccaagctctcgaccactctctcacaacacttactgtcctgctcttagctcaccagcctactggttagactcccttgttgccaccacccactgtcacaccagaaaaaagggttggattgaatttctgagcaatggttaaaacccacttcagcctttaggtttgtgtttttacttcggtcttttaatctgcctaataaaaacacacataacatcagggctgctcaggaaaccacctgcttttaccaggactctcatcttcccactatgatacaatgatagtttagaaaaataccaaatatttatcctgagaaactgcaggggagatttaacacccaaaagaagctatttcaaatggacctctgtgtctagttcttgaactgccttttctggaagtgttcaccttcctttagtaacatatttttttcctttagtagtgatgttttaatgaaatgttttagcccctttggtgaacaatgagaatcttttagagaacggtttctttttttgagacagagttttgctcttgttttccaagctggagtgcagtggcacaatcttggctcaccacaacctccacctcccaggttcaagtgattctcctgcctcagcctcctgactagttgggattacaggcgcgtgccaccacacccagctgattttttatatttttagtagaaacaggttttcatcatgttagccaggatggtcttgaactcctgacctcaggtgatccacgcacctcggcctcccaaagtgctgagattacaggcgtgagccaccacacccagctgagaatggtttctaaagtaggggtgagtgtctttctttttactctgtaggagctagaggtattgaaatggaaccatatcccagagcccacatccctccgtcatcagagttcctcattcaggatccaccagtgtgtccctaggtttggcacgttgagacgtcctcacgtttggtgctctgtgaagctgggcagccctcagagaggcaaagaagtcccaagaggccgtcctgcctcagggctctcaggaaagagccgcccgcgtccctggctgggcttccttggtgcacccagctcatttctccttccctctctgtagaactcacattgtccccgtggaaatgccagccagctcccctttcccagtgcaggggggagccaggtgggcctgaggtgggccagttctgccgctaatgggtgagagacttgggccaggtgccttacatccgggagcctcagtttcctcacctcggaaatagggtgataatgtaacagaccccatggggttatgagaaggacttggtgcaggaaagcagcagcacgtgcctggcacagggcagggcctctccagatggcagttcctgtctgtgtcttattcccaccctccgggcacatggggggaactcagtttctccccactgcgcgtcaccctgggagaggtgttttttgtgccaattgccattttaaatccaaatcagcagggatcatgtttgctgttcaaccatgtggcatatttatagtgattttttttgtaatcatggtttttctttctggaatttcaagtttttcatttgtgctgaggaaggtcgtttgtgttttttaataggattccttcttttccaccttgtgcaagtaaaggcaaatcccctatttgcatgtcactgtattaattcacagataacactttcacacttcatttttattcttctcaagggctcaagatgttttcccaatgcccagcgtctcatggatgacaaatatgacaagtaattttaccagaggcagtttgagggctcttagcatagcacaagtaaattatgttggttcaagtccaaggaactttgttctctttgtgtttgcttttgtagccttacctctttggggcatgagttagagacatacatgagcattttaaagtggagcagccctttctcctgggaaggagaacggaagagtccacttaagaaaaggttgtatgattgagtgcaaaatcaaaatctgacaaagcagcaataatttaggattataaagcgagcctgccatcaaacataattatgtggcatcttctggagacatggaaaatggaagaaattttcaaaaatgagtgggaggattatgttgaaaaacagtattgagtaatagcttcaggggcctcgtaaatagcatcttttcggcatcttactgggtacttttgtcatcatgaattgttaccctgaatattttcccccttattaagcagtgaaattatttacttttctccagtggtggggcagtgctaccaagttaagtaagcatctgtactctcctgtttatttggtcaggttttaaaaccatgtgtaaatgaccagtggtctctgcagtactatatattttcttaaattgtgggactctaatttttacaccgcttccttttttcttatttttattttcaagacaggttctcactctgtcacccaagctggagtgcagtgttgtgatcatggctcactgcagcctcaacctccagggctcaagtgattcttccaccttagcctcccaagtacctaggaacacaggcgcacaccaccactcacaactgactaatttttaaaattttttatacagacagggtcttgctgtgttgcccaggctgatcttgaattcctgggcacaggcgatcttcctgtcgtggcctcccaaagtgctgggattacaggcgttgagtcactgcgctcagcctgcctctcatttaaatgcaataagggcattaacttcctaagggaatcaaattgtaaatatattaaaagtggagattgcttggtatttgctcatcatgtgattaatcatcccttactgtctccaccttataaaattgcaaaccctaatatttggccaccttaaagtgggacgtgtctgtgtcttgccttgcgtctctccacacataatgagtgtagggtcctctgctgtgacagcagtggtgcctgctccagcgtgtgactctgcgccctctcttcccttacagattttggtatgacgcgagatatctatgagacagactattaccggaaaggagggaaagggctgctgcccgtgcgctggatgtctcctgagtccctcaaggatggagtcttcaccacttactcggacgtctggtatgagaacctttactgcattgccagcctggagcccccagcctctgcactttccaccagctcagtctctagggctttatctttctctgttcattgttacccgttgccagctttagctcagtgttgtgtgagccacacttcttcatcattgaggtgttcctgttgtcagtgggctagctaagggcagaagggcattcgtgggattttaaagaatttatgggaccaacattctttccgccttcagcagataccgattatgtttccaggaggtgggatgtgccagaagccgtcacctctttttgtttctcccctgcctgccttctttctcttttcctctttctcaataaacagatactgtctgtgtgtctgcctcacctaatctaaccctcagattgcagacagtgctttatttagacccaaagcttatgagtcctgattgtgttttcctgctggtcccatctgctgtctgtctttcagtgggcatccaccgttgtggacccagggatggttatgggaagcaaaacgtctcccttaatcataaacagtgtctaccagtggaagcccatcgaccgagggatcagaggcctctcagtagtattgtttattgcagttccttggcaacattgcagagaggcagtcaggttctgaaatacaactgaggttattggcaggctgaggccctggcacaggcaccttctagaatatcagctagtgtcttggctttcctctggggggatcccgttgctgttgtgttacagaaatggtagttgtttactccaacagtctggatgaccgcatagaggaactatttcaatagtgactgacatcattttttttttaacctcgtaaacctttcacagttcaggggccttggatcttattttgaagacaggtgcaaattggaaatagcatttgaatatgacccggcaaagcatgattgcttcttaagctcaagtatgagatctgttttgcaatcagcttgtccaagatggttatctcttcactgtcaaatcaaagtgctctgcatggtgtttagagattgggatggtgaggagagagcaagcctgggtatgtgcatgcatctgtttattctaggcttcgtgcctccaggagcttggaggtcagcttgtagtataataaaatagaaaactatacagccggggagaacagaagcagaatagaaggataaagtgttgttcatatctctcaggcaaattttacccaaattctgacgagcagttactgcacaagcaacaacaaagggacctagagtgtgttcattgccaattctgtccatttggctacataactactgtgaaccaatacaaaaagatatgtataaacatgaataggcgtttggtattcattccatgaaatgctcaggcattgacagcgcttcaggttttgtttgctttttaacacaggctttgaggatagcacaggtcaggaaggctagggcgttggagcaggtttctcagcggtccaggctctaaactaaagctgtccctctcaaaagaatggaaatgatttcagattgtattcagcagcacgaagcaatgattcctaaatagttaaaaatctagaaagaaacactaagaattgtattgggctttgtagaagagaccccagaattttaggatttgggatgtatccctgcagtcaggcccagtccccagtgcacctgcagatctttgacagctgctggttgagcttctgctaagaggtttccttccagggactccatgttcactgcctcacaaaggcaggccagcctcatgctttagacatccttgctcttaacaaatctttcgtgttctgctacgtcagcctctgtgtgacacccattggaccttctctctgtagcacaattgcataccttgctctgttcttgataagataggtctaggagtcatcgaagaggtgtgtctgttctagccagaacacctccaagtttcctgctgtcttccaggacttcattcccaggcccttgggcactgtggctgctctccctgcagctccctgtagcaccatgtccctctgaaatgacaagggtgccctctaggcatggaggaaaccagacgaaggactggggagctgcaccccacagcctagagctgtgcttcttcccgagcatctggatcacccaacacataatctttattttttattaagaagctttccaaatagtcacaaatagccaaggttatttgcttctttcatgactaattaccatctgtggggaatgtggatttctctgtaggttttaatttgctggtgagtgggccattgctaccatcccctcctggtgtggggaagtatagttactgaatgctgcctccagccagcacgggcattgcagggggactcacagccgccggtcttccccctggggaaacaacgtcaaggttcctaattagaaagggctttacacagagacatgtatctactgtttgaagattaaatctgtccatgaaatggaagacttgattttatatgaagtcatgaagagccaacaccacatagtaaaataccggctttgaaaaacacagaggtgttgcatatttctcggtgcttctgactggctgtgtggccttggttaaacctcagagcttctctggccttcggttgctccatctgtaaggcaaggtctgtctcgagaagtctgcggtacctgaatagatgttgaaatggctcctgtggcaactggtattgtgtagagatggttcagtgtccacaccttgcagttgtcacattaagctgtgaaggacgactgactctagcactcagtggtcctcagtggcaggtgatgttgacctcagacaagagttgctcaggagataggctttgcagttcacctcgacaagcgtttgtggagagctaggtctgctacctcctgtatcgttgcctgtgggtgatggtaaggctcttgggggtgtggaagatgcggggatgatgatgatgacgatgatgacgatgacgacgatgacagcgtcgtcgtcgtcctggtcctggaaggataaagtcttgtggagaagaggaggcaattctgacagtttggggttgcatcatcttcttcacagaagagatgaagttgtgtaggcaccctaagtatggattgtcacaaaaagagcactaggaagcggggcggggcggggcaggggtggggggttcctggcagtgggaatgctgggcaggcatggcagtagggagcacctgctgcaggtggggttggtgaggtttcctcgtgggacttaggctgcagagagatcaagacaggcctcagctgttgtattaggcatcctggactaattctttaagccctgttaaggtttctgaaccagagggtgattagagctgtgcttgaagttcttgttagccggagtatacagctgcattgagcaagatgttgtaaccaaaggagaggtggtggtgggccaggcaagcaggatcctgcacactcagggagctctgagggacggaaggagggtgccagaccttggacagatgtgagcctgggtggacagttcgcagtgggactccgaggaggccaagggcatgggtgacagcaggcagactgctcgggtggaatgggcatcagctgcagggaagccgggggaagaacagggcacaaatcagagttcagtgtgagacgcagtgagtttgtgggtagcccagtaactgggaacttggaatggagcagttgggccgggagggccagggtgggagccgtgccgtgagaactggctgcctgcaagccgctgacacagccaggaagggcacgtggggcaagaggagaagtgggtctgggagggagccacatcctcaggccatttcccagaccagcctgcagtcagcaaaagcagagagctagtcatttcttcttattttatttttaattttttgttgttggagagctagtcatttcttgtaccaagctgcatttcagatgtgtgggtactactgccactggcatctgaggcatgctgcctgtatggctgggctggttgtggaaggcagagcttcccgcacaaagctgatggagagccccttctcccctgggcccaggcctctctaaactgcacttttggcctctgggtgtcttgtacaacatgaagacgacagcatttcttggtcacttgtaattaaaaaggaccttgggttggtctgtcctctgattgctaagattctatttctgtctaacatctacttttagtatcaatttgtacaaaaatctttgattcaccgaaagtagctgaagcagcgaataaaacgttctcatacagtcaggagcactgtgggcttgggcacaaggtcaaggtcccaagagctcttggttggaaatctcctgccccaggtttttccatgtggcttgaccagcacctgcagcccaggacaggtccagctagaatccctgctccccaccctgctcccgcccctacttggtgatgagtagcctattttactccaccaaagtgaaccacatggaaaggcacacaggtcagggagaatttgtgaattacggaatttgccctgggagggcacatttgttttgcagattccagcattgtcttttttaacattctgtctgaaagttgtgtgtgtactctctgttttgttttccagtggtttgatcttctaaactggcaaagctgcatgcatatggcagaattgctcactacaaagttattcctcagccaacttctctgcttaaggattctttgtccatgataccccctcccagccagtgcagcccaccctggtccccccacctgtgacacagaggccctgcaggccagcagctccccagctctgttgtgggtgggggagcagcaggagttctcttctcccttggcccaactggacctcaagatccctatagatcttctaaacattccaggtcccaggccctcaccccagaccaatcaaatcagagtttctattgggtgcccagccctctgtttaaaaacctccccaggagattctcctgtgcagccggcagtgagaaccacctgggtagaggtttccaaaattgtctgattgtaaaaatcacctgaggagcttggtaaagcttgactgtcccaggcctcatttgaggctactaagtcaatgtccaggctggggcttggacaagaatgtcattctttttgggtcaaagccaggttaggtgataccgccttgccagataaatggccgggactaggtagatgctgaacccagtatgctctgcgttcaaagcacagatcaggggcttcctgaccgtgcaagggatgccggaagcgccctcaccaccttccttagctccaccaccggggctgaatttagtttacggggaacattagcagcaacagagggaggatgatatcccgcacttagcccagggcctggctcgctgtctgacaagcactgtcaccatagtaaggacagtttatctgctcgggatgtaagaagtgctggaaaggagggggcagcattgttcagtccatccctttccaagctcctcacagtttttttctccctgtaggtccttcggggtcgtcctctgggagatcgccacactggccgagcagccctaccagggcttgtccaacgagcaagtccttcgcttcgtcatggagggcggccttctggacaagccagacaactgtcctgacatgctgtacgtacttcctgggccctccgtgctcttctgagttctcttctcaaatacctgttttcttgggtcacaggagattaggagattaaagccattctctctggtcctgcacctcccttgccaggcgtggctaagaggtttgtccttgtggaaggagctgagtgggttggtcgacctgtgcttttccgtgggtaccttaattctaccccatattccgtaatgctttcgttccgatttgcagttcacactgtagtttctcaggccaaatgtctctgtgaaatgtttggccagagtaatccatccttactcatcctctccatgtgaggtttttgtttctttttaaagaaggctacaacacaacacatactactctgaagtcgaattcaagagccccgcgccccacctgtggcaggcctgagggagccgccgcagtgagtgtgcacacagctgcatggccaggactccggcatgcaccacgtagggtcagcttggtgtcttctgaaccctgccccacatgtcttctctgttaagtgtttacaaaagtcataaaccatctaagtaacatgctctccggagcttcatccgctgaccaatgtggacctggagcgtgtgtgagctgacatccctgcggacagaaggatgccagtgctggtgaatttgtcttctcactgcacttttttttttttttttttgagatggagtctcgctctgtcgcccaggctggagtgcattggcgtgatcttggctcactgcaacctctgcctcccgggttcaagcaattctcctgcctcaccctccaaaatagctaggattacaggcacccaccaccactcccagctaatttttagtagagatggggttttaccatattggccaggctggtcttgaactcctgacctcagatgatctccccgcctcagcctcccaaagtgctgggattacaggcatgagccatcgcacctggcaaccccacttattttgaaaaaacactttgcagcttttagtcctaagttttgtcagatgacgagagagagtttgtgatgcctcacagtgttggtgaggcctctctgctcagcgccccctggagaagccccccttttggtggaggacttgctctgtgtccgtggacggtgctgttttgtggctcagtggaggtcagagctgctggagcagggaggccttgttgtccttcctggaatgagtttgaggagggggtgaaggtgttccagttcagtcatcaggcgcacaacaggtacaggttgggagcagtggccttgcttttgacatgcactttaaggcaggcttcagagattgatctggatctccatagctgaacaggaaggtgggctcccactagtatctcaagaccaattcaggagatttccagaaatgcttttcaggacaggtttggcttcattttggaaaggatcctgaggaattgctgggctgttatgtctgcatgaaggcacccagctcctatctctcacccatccacccccctggagccagcacagactcaggctgggcccacagtggcgggataatagatagatatgaaccagacatgtgtcaggtggacaggagggaatgagggctccagcagccacaaaagttttgctcatttggtctcctacagtgtctgtgggccaggaatccagatgcaggtgttcttgctctcagctcagagtcacaggaggcagaaatcaagatgtcagtggggctgcagtctcacctgaggctcagggacatcttcaggctccttcagggttctgcacttgcaggactgaggtccccatattcttggcacctgtcagctggggactgctttcaactcttggaggccaaggccactcacagtccttgccatatacagcctccataggccctctcataacagcagcctatttcttcaagactgataagaggacagctctctactgcttctactggttttttacctgataaagtcagatctacccaggatactctctcccttttaagtgattcacagtcaattgatgagaagcctgattagaggagtgaagtatcctctcatgttcacaagtcccacccgtactcaagtgaggggattatatgggatatttacaccaggggcaacgatcttggggggcatcttagaattccatagtctcagaaatcattgtccctaatcaaacaatcaaggtgctatttttgtttcaaagcactttgagtgttgctacaaatactgaatccctaagctccttgtaaatggccggccagcggagggcatggggtggggaagactggatacacacccctgtgctctgggagtacgttggctgggcggcatgctcattagctgctgcttccgaacataggttcagctgaagtgtatcccaggcagtggacacttcgtgtggaattcagaaaggtggcgcaggaaggataccagggaaagccagagtgaaggcatcacccttgcacagctagcacatgtgggggctcccattgtcccatcaaggcagggccagaaccagaaagtcggctggtgccctgggcctgggccagtgatgggaggctcctcttctctgagggtggcacctacagatgcagtggcactgggtttcctggagccctcatcaaggaaacttcccagcatggcctcttcagaactccacaatccaaacttggaagagactcgaaagaccacttagtaccttttcttgcccagtatagaaattcttcttctccccttctgtgttagttttttatcgcagtataacaaactacccaaaacctactagttaagagcaacagtaaacatgtattatctctcagaggtttctgaaggcgaggaacgcaggagcggcatagctggctggctctggcttggagcccttctcgcggttgcagcccagctgtccgccggggctgcagtcatctgaaggcttgcctgggggaggcagacccacttccaaggtgttgctgcataggtagtatgccctgcatgaatcgccctgttctacgtgggcctctccgtagcactgcccaagtgtctcaggatgtgtagctggcttctctgagtgcagagttcggcacactctttctctaaaaggccggctaaaaaaatgtttttggctctgtgggcccatacgaccttgactgtgactactggactctgccactgtggagcaaacacagctgtgggcgtcacataagctagcgtggctgtgttccaatacagctttatttttaatactggaatttgaattccacatcatccctgtgttgtcacaaaatattcttattttgaatttcttttagccatttacatgaaaaccattcttagctcatagaccttggaaaactaggcagcaggccagattttacccacaggtacatagtttgcctgctgtgccctagagtaaaagatccaggacctgagcagaaggcacgacgtcctttctgaccaaacctcagaagtcacactgaggctctcaccttctccttcaggttacaccatgtgagagtcaatcacgtggggatgtgagctccaggacacaggggagaggaccactggggatccgggagcctggctaccccccagtaccccaccaacacacacacacacacacacacacacacacacacacactgcccctcacaggtgaccatctgctccacactttgagcagcgcagccactgttttcttgccagccattatgagaaaaatcatgctttcaagtctgaatataagccatggagtaagaggtctgatgaccactgaatctgcataaaggtacagtgctagaatctaggctaatactagaactggtggtattttagcaagcttagaaacagcccatgaaagcaggtgtgagttctgcttctgtggtttagggtgggtgagggagagcggtattgttctgtgctttctctttgactcgggtaaacgtttatctacaagagacttgtgggattcttacttggtccacctccaggtgactgggcttttactattaatgtaaactgcctgggacgcagcccctgccatgggaaacgcagggcacttcctgttctcagcatagagtgacaaggaaatttactcagagcggttactctgacattcaatgtttagttcaggaggcatttctgctttgccatcgagaatttttctcccttctaagaaaatgttttctcctgagaaaatttttctcccttccaagaaaagagtagaatgaaaggaggcaacttggtttcatagggagtgtcatgttgtccttctgagtttactgatgagcttacctgagaaaggagggttctagcatgggagttctgttgctacaagacatgaaagaatggcctccgtttatcccggagaggagagtccctgagcccttgggagttgccttgaaacctctgccgggtcccaggtgagaaagtgtgtgagttgtgtggttctgagatctgaacaggcaccatctggtgacactaggggctgaaggagctcggtggctgcaggtggactggagctcaccatcaggaagtagccagattctcacccctcagtgtcaccgagtgttctggctttagaggaaggactccgtggtccccaagccacaaggtgtcgaggtctgagtctcaacgccatgactcagtgtgaattaacttagcaggtatcacaacatcagatttgggttgtggttccctgctgggtctgtactttagattgatgacaaagcccgtcctcagccttatttcagcccagatctcggtatttatgccacagatactgttgagctcctctgggtgcgtgctgaccctgaggtcacacagatgagccaggagtggccctggctttcaggaaacgtagtgacgtaaaaggtcccggctgctgcgggataagggccagggcagaggtgtgaacgcagccgtggaagacttgggccaggaagccatttgttctgctgctaacacttccacagctccacgtgtccagactgttgccagagacgtctttggtctacaggattcaggagggaatctgaactttagcctggagcattatcaactcatagatgagtctgaaacaaacttagtgaaatctgatgttttttgtagttttccagtacagtttttcccatcgctggaatcctggtttggttctgcgggaatcgagtgcttgagtgggacccagacagacaggaagggcgctcctgctcagttagccccagtaagctcactgaggcacacaggccccatgtccacagccgctcctggctgaggcgtggttcctaagacgacccttactgttgagggctgccaggagggagagacacattcagccccgcaggtcctctgggaatccggtgagcgtcggcaccgggctggggccgtgctgattcccggcagcgtgtgggaatgtgcgggtgcctcgtggcctgctgacatcgcacacaggtcacagcctgtccagttcaggacatcagggccaagagtgaagtgagaatacggaggcacctctgtgtgctcaccctgctgaccgtcacccagcctccggggggggtcacagctggcccccaggaagctgcttcccagcagggcaggaattccatttgagtcttgtccctgttccaggagaagggctgggtatgtgtcccccaaaggggagagcattcgagaaggatggcgccagcctccccagaactgacctgtggttaaaaaaaaaaaaaaaaattgtgctttttaaaagatgagttttatcagctcacacatccttctagagtctaatggagattttttgtgtgtgtggaaatagtaaacaaggtcttgaatcccacagagcaaaaaagacttcctttcatgggcagcactggaagggttgttactctggaatggtttaaaagaggcgtcacatggcttgtttgtgctgatgtcactgcctcgctgctctcctgtggcacctcctcggtccctggccacagggcacagagccaagcacatctcatgctcttggcccagttacgcttctgcccaggggtaagtcagctggagaggaattcacagcccaggcatttcatgtcgttatggcctattttaatttttttaaccccaatcatttttcttaggaagtgatggggagtttggaaaggcaggcttatttgtcatcaagctgccagcttttatcaatgcaaaccacatccctgtgacatctgtgactgttccttggacagttaggtgagggagggtctcctggtggccccagggttactcttatttaggttgagaaaaattcctttttccaggatcgttggtgatcaaagtgtagtcattctgttgcgcagagaactccatcccagctccaccctcatgaattttgtaatcttggacaaattatttagtatcttagtgcttctgttccctcatctgtaacatgggggtatattatagtcagtagcacctgcttcacaaactcgtgaggacttcagcagttcacacacataactgcctcgctgcctggcacctagcgtgcacatggcattctaccgtggggtagacttttaaaattctggctacagagatacttttccataaaagtggccacatggaactctccaaatctaagaagcatactgtgggggccttcatattttgtctaattcttttctccccagaacaggaacctgcacccttccttcttttaaagggcgacgtggtaaataaacatttttagacttgcaggccacagtctctgtcctaatgtcctcagctggtagttgtagctggaaagcagctgcagcccacatggaaatgagggagcgtggccccatgccagtgcagctgatgtagaggcgggcagccccgggttaggccctgtggagacgcaggcccccgggctctagaacgctgaattctagtgaattctggatggctctccctcacacccaggcccaccctccctcaaggttgcaccttctccacctgaaggaagctgccaggtggccataggagcccttctcttggcaggccagcttccaggcccagtggcttctcttacatcaggggcctccccttggaatgttccctgaaggccagacacgggcaggtagtctgtggtcaagcagccaccctgacaggaggctagatgccactgggtgtgctttgagtttcctagatgtggagagttctgtgtggccacttttatggaaaagcatctctttagccagaattttaaaataaagaggataacttcctggtgagaacagacgtggaaaggaaggcactttggtttcacgctcatgtaagagagggctgttggcggtcactcctcagaactatggccagccctggatggtagccagctgctttttgccccaaaagtctgtttagctgggtctctgcattctggaagcttgtcaaagcccgggcctttcctgggtcagggcagccggctttccttgtccacgtgtggccggctgttttcttggggagccccggccacagccggcaggactccctttgctccatgtgactctgagggcctcacaggtatttgcagcccaggtgctgtcggagcccagccgatgctaccgacacacagcacaagcgtcatcctgttctgcctgtcccttgcgtgtggaggggactcgtgcccagggctctccttgctggcttgttggaatctggcttcaggtctacacggggcctctcgtttggtccagaacagcctggctcatcggctggggcttgcttgtgcagggctggagcgagcacgtgctagatggagacagcagactcggagtgtgcatttcttcgtgttgcaagcctggcctcacagtgccttcttcctttggttgtctgccaggggtagccctgcaccaggaggaagcttagaaatagcacaggtgggaaccggagagagagcactgttggggaagctgcggtcactcatcagccttcctggtgagaaaccaggggtttcctgctaattctggaaaggatgtttcagcagtgcctgcatgagacgcctcagatagaaaactggttatttttgtttcttagcactgccaccatagataacagctgtcacgatggacagtgtggacctggattagtccttcttgggaaaggagagtttgggttttgtaccgtggtggttctgggttctgggggaagagaatggaaccgtacgaggtaaaacaggagactctgaaggccacttggccatccaggcagaaagccagggatggagaggggcagcagggctgtgttcagtgctcccgccgtacgcttgtatgcgggaaaccactgcaggcggcccatgaagcctcctggccatgtgcgccctcccggtttggaccccctcccgtgtgtcttggctgcaggtttgaactgatgcgcatgtgctggcagtataaccccaagatgaggccttccttcctggagatcatcagcagcatcaaagaggagatggagcctggcttccgggaggtctccttctactacagcgaggagaacaagctgcccgagccggaggagctggacctggagccagagaacatggagagcgtccccctggacccctcggcctcctcgtcctccctgccactgcccgacagacactcaggacacaaggccgagaacggccccggccctggggtgctggtcctccgcgccagcttcgacgagagacagccttacgcccacatgaacgggggccgcaagaacgagcgggccttgccgctgccccagtcttcgacctgctgatccttggatcctgaatctgtgcaaacagtaacgtgtgcgcacgcgcagcggggtggggggggagagagagttttaacaatccattcacaagcctcctgtacctcagtggatcttcagaactgcccttgctgcccgcgggagacagcttctctgcagtaaaacacatttgggatgttccttttttcaatatgcaagcagctttttattccctgcccaaacccttaactgacatgggcctttaagaaccttaatgacaacacttaatagcaacagagcacttgagaaccagtctcctcactctgtccctgtccttccctgttctccctttctctctcctctctgcttcataacggaaaaataattgccacaagtccagctgggaagccctttttatcagtttgaggaagtggctgtccctgtggccccatccaaccactgtacacacccgcctgacaccgtgggtcattacaaaaaaacacgtggagatggaaatttttacctttatctttcacctttctagggacatgaaatttacaaagggccatcgttcatccaaggctgttaccattttaacgctgcctaattttgccaaaatcctgaactttctccctcatcggcccggcgctgattcctcgtgtccggaggcatgggtgagcatggcagctggttgctccatttgagagacacgctggcgacacactccgtccatccgactgcccctgctgtgctgctcaaggccacaggcacacaggtctcattgcttctgactagattattatttgggggaactggacacaataggtctttctctcagtgaaggtggggagaagctgaaccggcttccctgccctgcctccccagccccctgcccaacccccaagaatctggtggccatgggccccgaagcagtctggcggacaggcttggagtcaaggggccccatgcctgcttctctcccagccccagctcccccgcccgcccccaaggacacagatgggaaggggtttccagggactcagccccactgttgatgcaggtttgcaaggaaagaaattcaaacaccacaacagcagtaagaagaaaagcagtcaatggattcaagcattctaagctttgttgacattttctctgttcctaggacttcttcatgggtcttacagttctatgttagaccatgaaacatttgcatacacatcgtctttaatgtcacttttataacttttttacggttcagatattcatctatacgtctgtacagaaaaaaaaaagctgctattttttttgttcttgatctttgtggatttaatctatgaaaaccttcaggtccaccctctcccctttctgctcactccaagaaacttcttatgctttgtactagagtgcgtgactttcttcctcttttcccggtaatggatacttctatcacataatttgccatgaactgttggatgcctttttataaatacatcccccatccctgctcccacctgcccctttagttgttttctaacccgtaggctctctgggcacgaggcagaaagcaggccgggcacccatcctgagagggccgcgctcctctccccagcctgccctcacagcattggagcctgttacagtgcaagacatgatacaaactcaggtcagaaaaacaaaggttaaatatttcacacgtctttgttcagtgtttccactcaccgtggttgagaagcctcaccctctctttcccttgcctttgcttaggttgtgacacacatatatatatatttttttaattcttgggtacaacagcagtgttaaccgcagacactaggcatttggattactatttttcttaatggctatttaatccttccatcccacgaaaaacagctgctgagtccaagggagcagcagagcgtggtccggcagggcctgttgtggccctcgccacccccctcaccggaccgactgacctgtctttggaaccagaacatcccaagggaactccttcgcactggcgttgagtgggaccccgggatccaggctggcccagggcggcaccctcagggctgtgcccgctggagtgctaggtggaggcagcacagacgccacggtggcccaagagcccctttgcttcttgctgggggaccagggctgtggtgctggcccactttccctcggccaggaatccaggtccttggggcccaggggtcttgtcttgtttcatttttagcacttctcaccagagagatgacagcacaagagttgcttctgggatagaaatgtttaggagtaagaacaaagctgggatacggtgattgctagttgtgactgaagattcaacacagaaaagaaagtttatacggcttttttgctggtcagcagtttgtcccactgctttctctagtctctatcccatagcgtgttccctttaaaaaaaaaaaaaggtattatatgtaggagttttcttttaatttattttgtgataaattaccagtttcaatcactgtagaaaagccccattatgaatttaaatttcaaggaaagggtgtgtgtgtgtatgtgtggggtgtgtgtgtgtgagagtgatgggacagttcttgattttttgggttttttttcccccaaacatttatctacctcactcttattttttatatgtgtatatagacaaaagaatacatctcacctttctcagcacctgacaataggccgttgatactggtaacctcatccacgccacaggcgccacacccaggtgatgcagggggaagccaggctgtattccggggtcaaagcaacactaactcacctctctgctcatttcagacagcttgcctttttctgagatgtcctgtttt

SEQ ID NO: 129 - DNA, 117231 bp, Human
  misc_feature (1)...(117231): n = A,T,C or G
gtgtgtatagcatgtgagtgtactgaatactgcatgcacttgtaacacaacggtaagtatttgagtatctaaatatatctaaacatagaaaaggtccactaaaaatacgatactataatcttttgaggctaccgttttatatgcagtctgttgttgaccaaatgttgttatgcagcacgtaactgtataaagaaagtacttaaacagagcctgttcttctgcagcttgcctttatgtagccgaggtgctgagctcagtgcctggctgagattgtgctcactacaggtttgccgctgtggctggtattataattatagtgatgataatattaaagattggatagaaattacaattgaaatatcatttgctcttggtacagaatcttacttcctgttttcttagatcattacctagcttatgataccaaacctcaagaaggcagatcacatggtgggaggctcagacaaggattatgaaaccatcaggggtgggaaaaggagtgttgtgcccacggacccctagcctggaaaggtgcagggataggatttccagcaaggagcaagtcagcaaagcctctgaatctcagcgtccatgggatggggacgtggcctgtgaagagctggttttcagacttaggcctgaactattcctgctgatggatgggaaatctgggtggctcactcttggtggaagaagaggcttgatttgaggagggtgttacagacaggtgcactgacggaaccacagaatttcagcactgtttggagttgtgctgctaacattgtggggctggcataggaccttggcgtgcttcactgggagcgactgactatagatggcttccactcttgttttactttagggatgagtcccagagaacttgtcttgttcacagtcgcatcactaagtcagcagtgcacagggaactagagctccatttctgtcctcctttctgtgagtccccagtgtcacccagagatgttcaggagcctctgggagctgaccacagcccgggagcagaggatcccactcactgctcttgcgttcctcctgcctgcccttttaatcttatctttggaggtgctgtacacagccttctgtcaatgtctcccaaggtgaaaggcatgctggcctgccatcgaggacttagggttaagcatctgaagcttaatagaagcctgtgtcaactcagatccccatggtctctaaaaaaacctggacctgaattttttaacggagcagttggcattggtcctgttcagtttcttccttgctccttagctgttcctcaattttggtcacgtatggagtttaaatttctcctcttgaattgtgcaggtaacgatgggaaaggaactcctgtattcacaggggaggttgactgcacctacttcttcacatgggacacggaatacgcctgtgttaaggagaaggaagacctcctctgcggtgccaccgacgggaagaagcgctatgacctgtccgcgctggtccgccatgcaggtactgccctccttgccatgcgggtcttagtccacatgctcatggaacattttcccatgagtacttttggaaatgcggttactattttctttgtcagtgggttgcgtcacagccctcccccagttttttcatgtggctgtgtgaattattagaaggagcattggactgggaggtgaaataactgaatttgagaccagcatttttgaccttgtgttttcacccttttacacactgcctctcttccatctctgaggtgggatctgcagcctctgccccctggggttcttctgtttggatcctctaggcagatggatgtgcaccttgggctgctgttcaccgctgcctcagcgtgcagtgggcttgtactcgaggctgagcttgctgttgcacggcaggcaccggatgaggtgccaaggaggcagcagcgccccccacagcacaacccctgtccttgggggcctggaatttagcaggaaacagagcaggtggaataataagaatgggagtctcaagcagggataatctgatgggggggatttctggttttaccctcttggcagctcaaattaggtgtacagaagccagttgcctctgtaagggggagatgacccgaagcagagagaatgacttgcctcatgtaattaccacccagaacagtcacagaactgctggcggtatgttctcgctcgtaagtgggagttgaacattgagaacacatgggcacagaggggaacagcacacaccatggcctgtttagggttgggggtgaggggagggaacttagaggatggatcagtaggtgcagcaaaccaccatggcacatgtatacctatgtaacaaacctgcacgttctccacatgtatcttgtttttttttaaagaaaaataaaactgccagggtgacagcactgctgctcctgtcttctgagtcccacctggtttgctaaataccaggttagaaagaggaatccctcttgtggagtgtttgagaacctgcctcactgtgaaccgcctgggcagggagtgctggcagtgctgttgtggttaaacaccctgtgtgctgctgggaacggtgccatagttaattctggcacatgtgtgctagtgaagacattggttttctgtgaagtggaaagagttctagctgcagagttggagacctggctgaggactggtgttgccgcatccaaccacatttgcttgagcgagctgctctccaggcccgggtttcttacggtgaactgggtggtgctgttagattccttaagttaactttttttttttttaaacattactgtgtataagagacaacctaggatctatgagataaggagagatacatttttcaatctgcagacttcctgacatagctctggtttcttggaatctgcagtatttcgtggtatttgtgcgtagatagccctaagtaaattatgaagggagagctaaaaccattccttactgcttgaagaagtcccttaagactttacagcccacctggctccaccccagacttccagtgtttagggcaggtccttgttcacatgcacagtcttgtatggtttcttttaggctgttgacattggaaagtacttctccaaatgtactgtatcaccactgatgagtcatggggttttgccttccaaaccccagtacccaacctgcaaagggagcattttcaaatgagaacgtgtatttttatatctttacctcctccttgacacactttgtaagttactccttcagcgactgttcgccgtgtggtttgctttttgtggatgccctcgcccttgcttgctgtgctggtgacactcagctggtgccccctcacgtcctgcaggtgcctaatcagtgtctgatcacactgaccagctcaccagtcttgtgagttcagcggccacctgtggtaccttgcttgtcttctgtggtagcatgcattgcatcctgcactcagtctgcagatgtgtaagaggttgctggtttcttttagcttcacaggccttcacaggggccgagcggggtgtattagcaatggtgttaagcggggtgtactagcaatgatgtaccactctactgcgtcccaagacacaggctggcttcttgatttgggttttcagtttctaatttcatactgtggggcttgggagaattttgccgttcagttctctgtcccccagttgggcctactcttctgaagaagtattgggatgtagtttgtttctgtcacattaaatgagaaacctgagaatctcggtgaatttttgtgctttcagtctgcccgggttccagaaacagcgctggggattgagtgacgaagtggtttgggaactttgagcccttgacttttggcttaatcactatttattctgtgactcagagaaatcagcattgcttttggctaaaatacacttttgttttgttacagaaccagagcagaattgggaagctgtggatggcagtcagacggaaacagagaagaagcattttttcattaatatttgtcacagagtgctgcaggaaggcaaggcacgaggatgtcccgaggacgcggcagtgtgtgcagtgggtgagttgtgcctggatggaagatctaggtgatgcttttctagggcatccagtttggaatgagttagaagatctttctgtggttcatctaagcctcctctttctataatcacatgaaggatggtaaaaatttttcattcataactcaaatgtcagtaattgcttgatgcactctggaatcctgaagttggctagagctccctgacatgggctaaagccataactgggaacagaaggaaccacgtggaaaatactacatcatctttttagtttgtaacctgaagaataacattgccagtgtttgtgtacaagtgattttattttattttttaacaactttattgcctagaatcgttcaaaagttatggcttgagtgaagtgtaatctcagctgtagccctagtgtaagaggggcttgcatgcttcgcttccttttgctgtcattgttttggtcccgtagctgtcatgcagagacttctcaattatttgatacaggtatttagcacttcatttttgtcatttatgactcactttgaaaatgccaggctatgagaatagtgagaatctgttaaaagcattcaataaggaattgtgagcctcgttggattttaggaattatctcggtattcagaattgctggtgtgtctttaaaagcaggttcaggcatgtccatgtctttactaagaaggactttggaacagagttttaatcctttataacaaaaagcaagtgaaccaagaagtaagcggcctcctgcttgggttgctaaacaggtttcgttaatttctgctttggatatgagacacattctcaccctttggctgtgtggctgtgctttcaaaagactttgtgtcttggggtagctgaagccctgacagtaggggacaatgtcagtttacagttggtgctgatgcatgttgcaagccatttggtctttcttgccctggaagggcattgtgcatccttcatggcgctttctggctgaacctatggatgaccctggaggaccccaatgtggctgttaatgtctagccaaacgtggcactctagggaaacccatccgctgccttggtgggttcagggggctggagaagggctgcacttgctgggtttgggctgatttctttctttctttctctttctttcttttttttttaagtcacttctttgcgtgatgatcatttttaaccacatcttctgttttctccccctttctcttccagataaaaatggaagtaaaaatctgggaaaatttatttcctctcccatgaaagagaaaggaaacattcaactctcttattcagatggtgatgattgtggtcatggcaagaaaattaaaactaatatcacacttgtatgcaagccaggtaaaaattttaaaaaagatgaaatcttttctggcttctgccagaggtcctgcattcttcatagctctgttcctcatcagtcactgcaaagctgatcagacagattggcatggtgttcagcattttgagttccagactctggcgatgggagataggtcatttggaatttttccctcatcccctcctcaaaaccaaatcagaaatggagaaaccagatggtgtcagaagggagttgtgggtctcagcgctgtatcctcttcctcgggactgatactcggccagtcatgtggttacttaacttccttcaaaggggaaaaaaatcataaatggtttaaaacattgcccgtgatctcaccacttaaacacaatgttaattttcattacctttatttatagatgtatgttgtttttaccaagtcaaaatttttatggtaacaaatcttaatgtttctcaaagtgtagtattttgtaaatacttttctatgtttcacagttccattaataatttttaggaacttccttgttgacatggtgtggttttactatttttgaacattttccttattgttggattaatagcgcgtttccagtgttgctaattgtgctattatgtatcctctctctacctcccattgaaatatttcctttggataagttcccagctgtgggataaagtcagaagctagggtcattttgtttgtttgttttatatggtaaaatatacaacataacgtaaaatgtaccatcctaactgcttttaagtgtgtagcttggtgacattgttgtgtaataccaccaccatccatctccagaactttttgatcctcccagactgaaactcagttcccattaaacacgagctctccattccctctcttctactttttgtctctacggatttgactgttctagatacctcatataggtggaatgctacagtatttgtagggctgttttttgacccttctatgcattatacctcatttcccactgtcccttccaagtctacttctagcagagaagaatgaggtaagatattttaggaatgaacggattagtgatccccatctcttttccccattgacaggtgatctggaaagtgcaccagtgttgagaacttctggggaaggcggttgcttttatgagtttgagtggcacacagctgcggcctgtgtgctgtctaagacagaaggggagaactgcacggtctttgactcccaggcaggtctgtgtccaagcaggacctctgctttaatgtgacttggaaccacttaaggttttttccttaacattctgtgtgaggttttcaaggtgacccgccttagaattttattcatgctgtttgaacaaaattctgaacatccgatgtttgaggcttatttgagatactgaaaatactatcttaaattcattattgaggtggttttgctgaatgcaaaaccttcggaacacaagggaataaattatgtttgaaaaggctttcgtgtgaattctaggcaagaaacctctctgagggagaccttacaagaaggccataatatcatgctcgtcctactttgaacatgctgttgtttattagcccagcagttatgggctttgaatagcgctttaggctaacccagtagaagggaatggtggagttggatccatctccaaggaaaatgttagtaatcgcggttctggtggcctcaaggggcagcgtctcttctgcctcctccacttcttcctgccgttgggaacctcctgggaagaacctctccctttcaaactgtggggtgagaccactctgttaactgtcggactgaccttccatacttttattgtttttattctttcttagggttttcttttgacttatcacctctcacaaagaaaaatggtgcctataaagttgagacaaagaagtatgacttttatataaatgtgtgtggcccggtgtctgtgagcccctgtcagccagactcaggagcctgccaggtggcaaaaaggcaagtagcttctcagttctgtttcattcttaggcattatatgctaagaaatattattttcaggaataggtgtgttctcacttaatgtcattgctttatgacaagcatttaaatactgatgagacctggtctgaaaactgaaggatgttaggagtttaatttcccagagaaaggagcaggcccatccttgggaaagaagggtggattgaggtcatgcctcactattgcgcattttgtgcttctcagtgcctagatatctctgtgcgtatttctgcattctgcgtaactgcagttcaaatgaagtgagttgtctaaaccagcggtgccaagaggagatttgggtcccagtgttcctgctgccgttggagaccttgtgtgggttcctgtggtctgcagcccgggcctggttctggtgactcctcacgtcgctcacgggccctcccttcagtgtggcagccttggagtgcttctgcccctcaggtctttgctgagagaaacgtgtgtttatttcagtgatgagaagacttggaacttgggtctgagtaatgcgaagctttcatattatgatgggatgatccaactgaactacagaggcggcacgccctataacaatgaaagacacacaccgagagctacgctcatcacctttctctgtgatcgagacgcgggagtgggcttccctgaatatcaggtaggaatgtttgtccctcatcgcgctccctgaggatactcatgcctgtggtgggcctttcatttaagcagagcttgtatcagtctgggtttccagccaaatcatcaccgtcattagatttgccagggtgcctgggcagtattagtattttaagctgtttatttagtgggttgtgcaccttaataacagcccacaagcctgtcagttttgggtacaaaacatacaaaagcataaaaaaaaatcctgaattaacccccacttagcagaggctaaattttcatcctgatttgttactggacagtcttctttttaataaaatgaagggagatgggcagactaagcttttcttcacagtttctcattgggaacattgctctcgtccttttttgaatcctggttttatgtcacgtgtctttctctttttgccatccctccgcgcatctgccgtggattaggaagaggataactccacctacaacttccggtggtacaccagctatgcctgcccggaggagcccctggaatgcgtagtgaccgacccctccacgctggagcagtacgacctctccaggtgaggcagagtcagctgctctgtttttggcctggtacagatgctgaggttgcaagtgttgctggtgagcgtgtgactgagctgatgatggggagtgatgctggctgtggggctgcaggaccaaggtggggcattttcagcagagtgaattctaataacagtctggtcgcctttgggatagcaaccagtcttggccacagcagagcctcggcctttagcttcatcatttaaaacaatgactgtcagtgcagaggcacgggggacagttaaggtccactgcatactgagttcagcgaaggtggagtgtaatcctggtgcgtcatgcgcccagacaagccaactcctggtagtgtgattggtggagcatgttttatttggtagctttacttccccaactacatagaaataaatgagactgaaatgtgtaagctctttaaaagcatatacattttgctttgaaattttagtctggcaaaatctgaaggtggccttggaggaaactggtatgccatggacaactcaggggaacatgtcacgtggaggaaatactacattaacgtgtgtcggcctctgaatccagtgccgggctgcaaccgatatgcatcggcttgccagatgaagtatgaaaaagatcaggtgaatctgttttcactgcttgtctcctttgccctcctaattccatgacttagtgggaggaggtggttattctgggacatccagatcaaaggcagcacagctgctcgagagaaaccctctgagtaggagtggggcctccatgtgaactcatctgcctcctgtaggagcagaagtgtgtcacacaggaatcattgttcacatggagaatgctgtgttgcagacttttgatcacacaaagggcagaggaagcaccgaatggttatgtctagcctgaattcaaaagtgtctttaggtgctttcagcagacacctgtgaaaaagagagttttgcttccaaaagctcttgtttctggattgattagggggaaaaaccgatttgggagagttgctgtggatgaaccagattcaagcacacgctctcattcgctgcagttcgtccctgggttgaatgcagtcaccgccagaacatttacccgtctcctgtggtcgttgtacgtggtgaatcttaaaagagatgtctctggacatctgtattggcttctgtaaaaatagcatgttgggaatgtacttttcttggtgtatgctaatggcagcttggaggtttttgaaaggaaggtggcaagtgtgctctggtggttaggaatcgagttcctggttgtgtttacctctgcacatgtgtgttctttactggagcaatgagttcagtgtatagtcagtcctctttattcacagattctgcatctgtgaacttgcctacttgagaacacgtgtaactccaaaatcaccacgcggaacactttctcagtcattgttggaacgagtgtagtggcccaatgtgcatagtacccgacaagcctgttcctggttgaagttgaacagggggacactctggcctcttgtttctgcctcaccctgagatgagcaggggatggagagggcgaggcagtgcagtgcaaaagctccagccctggggccagttggacggggtctgaattccaactctggcatctcaactcagagatgctccagagctggaacttccgcgctgcactgcctggtaaggtctccctaagagaagtttcttgcctagaattcacactaaagccttttcaaacatgacttactcccttgtgttcggaaagtttagcggggcagccttaggtgagccacttaacactccttaacctcgtttttccttctgtaaaataaagagagtagaatctgtcagcatgagttgtcttgggatttcagatttataatctgtgtgtaataggtttgtttgcctgatgtgcggccagtcagtacgctgagacattggggattacagccgagaaagagtttaattgtagggcaggcgaatgaggagatgagaagaaacctcaaattcacctccctaaggaatttgggttgagggacttaagggatttggagcgggccaaggtgtggggattgtttattggtagaagagtgcagggtgaagtcatcggatggggagatgaagaaactgcatttggttccctgtagggaggtcttcatagtggttagtgtcagccgttccaccggaattcaggatctgaagaacatcttacacgattattgaacgaaagccttatgattccaatgccagtgattctttctgtagcaataatggggatgtgactagtatctagtgctatgtgactttcagttacaggccagcatgcagcctgattggtgctcaattgcatgcctggaacgcagcatgcagttgttgttaactctttgaggatggtttcctattccatatgtaataaggggatttccccaggagcagtggttctgtattcaataattcattgtttgctgcagctttatagaatgtaaccaccaccaataacgaatcgactgtatcttcagggggaaaagcctaacaagactggttttcttgcagggctccttcactgaagtggtttccatcagtaacttgggaatggcaaagaccggcccggtggttgaggacagcggcagcctccttctggaatacgtgaatgggtcggcctgcaccaccagcgatggcagacagaccacatataccacgaggatccatctcgtctgctccaggggcaggctggtaaggcactgctgctggctggtgaccttcactgctgcattttttgactgagcgttgccttatgtgtctcttaacagcagcagtcttggggtgggtggcggagctaggccagtcttagttctgcttaaggtcagtgtgcggtatatatgttcacaggcagggagtgatttgtggtaccttcatggctgcgatttctgaagtgtaagcctcatcttttgctgcggagtttgaggctctggtgacatacactgtttcctggattttttttctgagtcgtacagacattatcttgcctcttagttcttgtgagttgaggatcgtggcagtggaacggggcttagagatagtttggtcctgtaggggccaagggaaagcttccctttcaccctttgaagtttccctgaaaatcagctgtcaacaggagaaaagacattaaaattttgacgtgcatagcaccggggaataaatagcaggagaaagatgacccagtagcctaatgcaacacagaaggttatgtaccctatttcacaggggagagggagataggggatgtagacagttcttttgacggggcagcaaatgattatttgggagaaagaatggacagaaattaacttgcaaatgattctctttggagcctgaatgaggaaggcattatcttgtgcacaagtctgtccaggtgtgattgctgtcctcagtcttcttttgtgggatagataatgagatttccgagtttcttttggaaagaagccttcttggtcaggtaaggaaattccagagaaagtctctccctgtgcttgagggtggaggtaacaaggcacggttcaaaggatgaccttgattctcaggcagcttctcagcatgtcaaagcactgatccttggggtattgctttctgagccccagcagtccaaaccacaaagaccacagataggaatctgaggcttggtatagctcaggcctgtgggtgaacgatgagggctgtatgtgtaatacaaaacaggaataagaaattaaggctgagggctgggcacagtggttcagatctaacccagcactgtggaaggccaacatgggaagatcactcacttgaggacaggaattggtgaccagcctaggcaacatagtgagaccccatctacaaaaaatttaaaaaaaaatttagccaagtgtggtggctcatgcctgtagtcccagttactctggaggctgaggcaggaggattccttgagcccaggaggttgaggattcagtgagccatgattgcactgcagcctgggagacaaagcgagcccctgtctcaaaaaaaaaaaattgggaggcagaggtaggaggattgtttgagcccaggagtctcagactagcctgggcaacttagtgagaccccatctctacaaaaaattagccaagtgtggtgatgtgcacctgtagtcctggctacttgggaggctgaggtgggaggatcacttgagcccaggaggcagagattgcagtgagctgaggatgtgctactatactgcagccccttggcaacagagcaagatcctgtttcaaaatagtaatcatataaacaacttcagcaaagtctcaggatacaaaatcaaggtgcaaaaatcacaagcattcctatacaccattaacagacaaagagagccaaatcatgagtgaactcccattcacaattgctacagagagaataaaatacctaggaatccaacttacaagggatgtgaagaacctcttcaaggagaactacaaaccactgctcaaggaaataaaagaggacacaaacaaatggaagaatattccatgctcatggataggaagaatcagtgtcatgaaaatggccatactgcccaaagtaatttgtagattcaataccatccccatcaagctaccaatggttttcttcacagaattggaaaaaactactttaaagttcatatggaaccaaaaaagagcccacattgccaagacaatcctaagcaaaaagaacaaagctggaggcatcatgctacctgacttcaaactatgctacaaggctacaataaccaaaacagcatggtactggtgcaaaacagatatatagaccaatggaaccgaacagagtcctcagaaataacaccacacatctacaaccatctgatctttgacaaacctgacaaaaacaagaaatggggaaaggattccctatttaataaatggtgctgggaaaactggctagccatatgtagaaagctgaaactggatcccttccttacacctgagacaaaattaattcaagatggattaaagacttaaatgttagacctaaaaccataaaaaccctagaagaaaacctaagcaataccattcaggacataagcatgggcaaggacttcatgactaaaacaccaaaagcaatggcaacaaaagccagaatagacaaatgggatctaattaaactaaagaccttctgcacggcaaaagaagcatggatgaagctggaaaccgtcattctcagcaaactatcataaggacagaaaaccaaacactgcatgttctcacttataggtgggaattgaacaaggagatcacttggacacacggtggggaacatcacacaccagggcctgttgggggctgggggggagggatagcattaggagaaatacctaaattaaatgatgagttgatgggtgcagcaaaccaacatggcacatgtatacctatgtatcaaacctgcatgttgtgcacatgtaccctagaacttaacatataataaaaaaaggtattaaaaataataataataaaatgaattaaggctaggaggtagaggaggtgagtgggattgatgttggccctgagttccttagccaggggacaacagcagactgtgtggagtttgctctgctcttctctccatggaaatgctttggggccattttatacagtcccaattgcttctgttttttaattggggtaaaatatatataacattaaactgaccattctgactgtctttgggttacatatattatacacatctctggtgtcctgtatttatcaccagtatccatgtccaggacttttacagggtcttgctgtgtcacccaggctagcgtgtagtgggtgtaatcattgctcactgaatcactgcagcctcgacttcctgggctcaagtgaccctgtcacctcagcctcctgagtagctggaactacaggtggagttacctgtagttatcaaaatggtttttaaattttttgaagagatggggggtctgtctatgtggcccaagctggtcttagaactcctaggttcaagcagtcctcctgcctcagcttcctaaagtgctgggattataggtatgagccaccatacacagcctagaagttttttgatggtctcaaatctaatttggaaaggagagctttatttctcataaagatttgcagcctgcagggtggccatttctgacaggctgggaagtgtagcctcaggccagaagccagaaacaagcgctgggagggaggaagactaagacacgaatggatgctgaacaggttagtcaagtatacatattcagcaggttacaggagcagctatgcatattcacgaagggatggcacacacatgcgtggtaggcaacatgtatgcagcatgtgtccccatgttcattttgggttgaagacataacatttaaatatattacagttgggccctgtatgtcgaaaggtgaagcagaggacatgaaggccctctgtgtgcagcctccttagaaggccaggaccacctgggagttgtggtctcttatcagcagggaatgctggtcgattgttgtgttgtcagaaccacaaaaagggatggacgttgtcaggtggtaggttgataccagcagcagagtctttcaaaagggtcggcttctgtttagcacttagggaagaaagcctagtggttaacgaggaaaggggtgtaatggggtatgtctcacctcccaccccgtcatggacaggaatgcaatttttaagtttctctggagtccccttggctaagagtggggtgtgttcagtcagttatggggcttaggattttattttcatttcttattacctgtagttttaggtttataccagggtcatgtgtttttgagaaattatcaaatggttaggagagtggagagactggaagccatgttcattatcaactaaattattaacaatcccttgttaagggtgtgtggcagcttcctcaagccccactgaaatgagccagcaggatgcgttctttccctgcagtggcccagtggacgctgcgtcactcacctgcctggtctgctttgtcattggctaacactctttttcctgagagacacttcctttagagttgaagatctcggtgatcagggaatgaatgacgggcaggctgagcttggcccatgctctctgcgggaggtgttctacccaggttgtacacactctccttgggttcacctgagcttgggccgcccacttcttctctcagtctcaggaaggatccaggtttggtgttccacggggagatgcctaggttgcccagttcagcctgctggtctgtttttgggcacgtctgtgcattccctgcctgtggactgccccctccttctctggtttcttgttgccattgagacactgggtagttccagaaagttcttggacccttggttttccagcttttctgtgataccatatttagtttacagggtagcttcacattgttgtcgtgtctctcagcactcatatagggcctgcagcacaggaaatacactcactgaaggaagaaagggccgctctcccaggggtttgcagtcacagaactttcacaggctaaagctcagtccctttcacaagcacattgtgaagtggaaggagcaggtgtgtttttattctactgctagtgttgctgaggcctggagtgggtgggggctttcaagggtagagagcccttgacggccaagggtgtggactcagtgttagtggctgttgttcctgaacccgtgaccctgggcaggtgtcttaacttccttgtgcctcagttttctcatttgtaggctgtgtttgtgggtcactgtgaggcgcagttgagaaatactaacaaaactcatagtgcagtcctggtgtgtgataaacactccctgatcggcagctaccattgcctgtgtggtggtggtgctctcacaaagctaatggctctttgggggagctttttatggaaacatacacaccgaagggcacacagatgataacgtgacacagctgggtgagtgtccataaactacacatcaagaaagaacatgcttccccctaggagccctcctgtgccctcttcctgccactgctgagcatcctcctgacctctgacagcgcaggccattgttgcccaatcctgagctgatgtcagtgaatcctacgtaccgttgcctttgtgtatggcttcttgcattcaactttttgtgtagggtacttttcagaaccttgagctcagacctaggtttggatctgaattctaccatttactgctggcacgatttctatatttctgaatatccaagcgtaggagattattttgtcttcatagggagaatgagaacattaaattctaattaggtaatgcacattaagtgcctagcttattggctgactcataataaacatctagcagattttggctatttttatgtctcaggcgagtattcttttggttctatcaagttccatgttactgtattgacttttaccctggatttgcccattcagaacagccaccccatcttttctctcaactgggagtgtgtggtcagtttcctgtggaacacagaggctgcctgtcccattcagacaacgacggatacagaccaggtacgtgtgctttcacctggccctcgtgctgagctgcctgctggacatcctcaactcaccccagtgttccagctctgaaccgacccctgccccttctttctgaatcagttactatgttgcattgacaatgggtgtctgcaggtcacccagagttcctctccactccgcagctcccagctcctgggataagaaccaggtccctcagtcttactctctgctcactgtagtttccttccttttgtttccattcctttgtgccttccatgtggcagtggtatcctggtgggctctggggcttctgcaccaccggcagatgtctgactagtcgatacgtcactccacacctaaaccatctcagtgcctgtcccctagagggtagagcccgtatgttttaatgtgaccctatccatagagcacagcctgcaggtgttaatgtgatcctgtctatagggtaaggcctgtgtgtctctcacctgtgcataggccagagcccacaggtgttaatgtgatcctgtctatagggtgaggcttgtgtgtctcaccgtggccctgtgtgtagggcaaagcccacaggtgttaatatgatcctttctatagggtgaggcctgtgtgtctcaccgtggccctgtgcatagtgcagagcccacaggtgttaatgtgccacttgagtctctcagtgcctactggctcctcccgccttctgcccgggtccatgccctccacttgttgagtgcaccctgcagggcatagtagtaagctgctcagtgacgttctctctgacctccccaaggtagtgagttgttttcacagcaccgtgtatatttctttatggtgggacctgtttgccttcccacttcctgttctaagctacactgcagactctggcagcagagaccaaggcttttccaaaccaacggccccagcacagggtcctggctttgtaactgctcagtgagggcaggatgccaggcaccctgttcatggacaatgtttctggggctgtggccaccgtctccttccctgcattcagtggacagagggaggcccagggcaaagttaaatatggagaggagaggatatcatttgacagtcacctggtcatacttcccatgattaccttaagggaataattgagacagaaaacagaacatgagatttcttaagatgtttattttctttaagaaactaatttatgagtcttatatttcctctccaactttagggagtagcagtagtcttcttagggaaatgcagtagccttaacagcttccaggtgagtgtaatttctgagtctgggctcacacttggtatacttcagggtggtgtatttgaagaggctacatgtagggctacatttttgatagggattttgaaagtaaatggagaaacagttttgtcaggtgcatacttgcaggtttctggaggtgctgtatgtatgttatgttcctgtggaattggtttgaatgcgcccctttttccccattttgtttcctgtaggcttgctctataagggatcccaacagtggatttgtgtttaatcttaatccgctaaacagttcgcaaggatataacgtctctggcattgggaagatttttatggtaagagcgatatgatgcatttccagtttgctttgaaacagggggagagtgcattattgaagtcacctgcacgtggtgatatgagagaattgcccaggccactgtggtggcagctcttactcagaaggagatgggaaaatccagatttaagggaaagatgaagtaaaaccatttaccaccattctggcacagttcagacgtgaagactgttattcttcaaataataagttgttctctttaaggaaacactttctaaaggtagtgctgaagcctgtactcattgtccattggtctctccttactgtatcttcacaccagagagcataattgacttcatttttacaactataatataataatttttaatggaataacaaatttaagaaatgtagggtaccactttatatttacttgtaattaacatgatttcaatgatacatactttctcataattgaaaatattataacattatgacttctgtgtcttccctctcttatatatggtacattattacatgcagtagatcttacacatttatagatacggggatgtatgaatttaaatgatgtatagatactaaaccttaaaggcagtttatagatactgccctttggacttatgtactaactgtactaacatgccagaaagtggaaagttggcaagttaactaacaaataagaaatgtttaacctagtgggatttggagttgctagggttcttgtctgtggtgagatacgaggcataaatttgtttgtatggctcttaccgtctgacctgcagtttaatgtctgcggcacaatgcctgtctgtgggaccatcctgggaaaacctgcttctggctgtgaggcagaaacccaaactgaagagctcaagaattggaagccagcaaggccagtcggaattgagaaaagcctccagctgtccacagagggcttcatcactctgacctacaaagggcctctctctgccaaaggtgagctcagagccatgttgttttgtagctaaaaagggccctggtggctctgtggctggccatgcaccttcctgagtgtaggatgtgcacatcccccgccaccatgggctgtgctgtccaccttgctgcaggagccatcacggtggtcttcctgcgtttgacctcgcagaatacaggggtcccgttatccgtggcttcacttttgtggtatcacatggtccgaaaataataaggtattttgtgagaaagaatgagagaaaccacattcacgtaactgtcattacagatattgttacagttgttctgttttattgttgatctcttgctgtgcctagcttacaaattgagcttcatcctctgtatgtgtgtataggaaacagcatagtatatatagggttctcaatttcaggcattcactgtgggtctcggaacatatccccccgcagataaggggggctgctgtagcctgtattcaacacagcagtcagagtgatgtttctgaaacatcacatcatatcacttcccagctcagagccctcggaggctctgcactgtacctagagtagaagccagtgtccacagtacggccatgggacgcccgtgggggctctctgagatgatcaccccctgctgctcttcccgcttggcccgctggcctccctgtttctgatataaacaaagtgcactgtctcccaccctcccctcttgaatctttgtacttgctcctcgctctgcaaccagcacagctgcaggcaggggttttcgtctgcttcattcattccgatacatggtaggaacttagtatttgttcaataagccaacgaattagagttacattgtcttctaatgcttggattggtaaactcgtgggatttaaatattttctggaagagtaggaatgccaggatgttaggcttatggtagaaacctgtcataacataggccgctgttgcagtgtgtaaagctgtcatcacataggccaccattgcagtgagtgtgtaaacctgtcataacacaggccaccgttgcagtgagtgtgtaaacctgtcatcacataggccaccattggagcgagtgtgtaaacctgtcataacacaggccaccgttgcagtgagtgtgtaaacctgtcatcacataggccaccattggagcgagtgtgtaaacctgtcataacacaggccaccgttgcagtgtgtaaacctgttgtaacacaggccactgttgcagtgagtgtgtaaacctgtcataggccactgttgtagcgagtgtgaccactttgttcatgtcgagtccctcgatacacacttggtgccctggtgtcattgctcccacgaacggctgtgaagcttgttgccagtggcagccttgtcctgttgctgcactgtgcttgtgggctgcgccatgaatactgttctgtctcttaaaatctgggccttcttgctttacaggtaccgctgatgcttttatcgtccgctttgtttgcaatgatgatgtttactcagggcccctcaaattcctgcatcaagatatcgactctgggcaagggatccgaaacacttactttgagtttgaaaccgcgttggcctgtgttccttctccagtggactgccaagtcaccggtaaggccgtgcggcctaagaactgagaggccggtcaagagtcagtgtgtgtgtgagtggatatgaaggtgtgtttctgtgtgtatgtatatttgtgtgtgtgtggtgtgtatgcttggttatgcaggcagcgtgacatttctgttatatattctctttgaatgatgcctagagttgtaatgtttttcttgaagagaatctgactatatagttaatggttttaagctatcttttgggatcagatacatcttaagaacagagaagaaaatgcagaggaaacacatttcacatgtactgtcagagcttcttatttgagggtgaaaaaaaaagaaaaagatgttaaactccctaagctgtgccctggaagctgacagtgtatacaggagaccttgacctctgggattgaccctgcctgctctgcaacagtggtacttccttgtcaagggcagtgggggtttggcttttttctttaaagagtctttagggactcactatgttgcccaggctggccttgaactcctggtcctaagtgatcctcctgcctcagcctccaaagtagctgactacaggcgcatgccaccaggcccggctgtgaagggcagttttgagggacagagtgggtgtgttttgtaggcaaagcctctcagcctcccgtggatttccttatcctcacagttaggaatgccaggttcacgcctcctcagggcttatttagggtgaaaggcagttcttgagtgctcacaaggaggcagagttctccagcgtggttttttgttgtgtttcagacctggctggaaatgagtacgacctgactggcctaagcacagtcaggaaaccttggacggctgttgacacctctgtcgatgggagaaagaggactttctatttgagcgtttgcaatcctctcccttacattcctggatgccagggtgagttctccttggtctcttgattggcgtctgttcattttattagagcatttgactcaaggtcatcgccttcctcatgcccaaaccacttattctgttcttccaggcagcgcagtggggtcttgcttagtgtcagaaggcaatagctggaatctgggtgtggtgcagatgagtccccaagccgcggcgaatggatctttgagcatcatgtatgtcaacggtgacaagtgtgggaaccagcgcttctccaccaggatcacgtttgagtgtgctcagatatcggtgtgtgttcagaccagcaatgagatgttgtccccgggtgactccatttcccatttcccttgaacctctgaatcttctatcttgtttaaaacttgcctgtgttttcgtggagtttcagccattgctagggtttgacgagaatgcactcatttcttcaggtcttaaatgtttaataaatgttacgtagtttgcacatggaggtcaaagattgggtactaactgtggctatcatttatttaattttttttttttttttttttttgagatggagtcttactctgtcacccaggctggagtgcagtggtgcaatcttggctcactgcaacctccgccccccaggttcaagtgattctcctgcctcagcctcccgagtagctgggattacaggcacctgccaccacgcccagctaacttttgtatttttagtagagacggggtttcaccatcttggccaggctgatcttgaactcctgaacttgtgatccacccgtctcggcctcccaaagtgctgagattacaggtgtgagccaccgtgcccggccccatttgattaatttttaaaataaacaggaaacaaatcaggctgctgatttatattacagggctcaccagcatttcagcttcaggatggttgtgagtacgtgtttatctggagaactgtggaagcctgtcccgttgtcagagtggaaggtaggactgggcctgtccctacaagtcattttaaatgtatagagtagcagacgttctgaacgatgccttagatatgagaccgtgtgataacagccatagctggggtcatgagacacacgctagggggaggataatttcttttccttgagcttttttttttactgaagcatattgctaatttcacgagtgacattttccttgtgtgcctggattgatgggattttggcgtctgatgcttgaagacactaatgtggggtttggttttgtgttgtttgatgaagcaagtctttattcggggacctagactttcctagaaagctgtttgccaggcgatttgtattatatataaacaaaatcatgtggaaatggcttttaatgcccatttatagctggtatttacctaaccaaaaattgtaaaagtttttttttttttttttgagaccgagttttgctctgttgccaggctggagtgtaatggcgccatctcggctcactgcaacctctgcctcttgggttcaagtgattctcctgcctcagcctcctgagtagctgggactacagggtgcctgccaccatgcccagctaatttttgtatttttagtagagacggggtttcaccatgttggccaggatggtctagatctcttgacctagtaatccacccgcctcggcctcccaaagtgctgggattacaggcgtgagccactgcgcccggccatttgtaaagctttttgcttgaaaatgtgaatgcgtgtgtggttgcagttgcccttcacttcttccatgttcttgaaggggacaactgtgaggtgaaagacccaaggcatggcaacttgtatgacctgaagcccctgggcctcaacgacaccatcgtgagcgctggcgaatacacttattacttccgggtctgtgggaagctttcctcagacgtctgccccacaagtgacaagtccaaggtggtctcctcatgtcaggaaaagcgggaaccgcagggatttcacaaagtggcaggtaccattgtttgtcgttttccttttgttgcaaaggaatggaattaaaatattaaaatattttgctgaagatgaattttcccttgagtcagaaacatgagtgttctactgtaaaaaaaaaaaaaagcatattaatgatatttcggattttgcttgattttcttaaacagagtacatactgaaggatgttggtagagcatgtctattttattcttagttagccatgccagttactgactctaaggtcatatttctcttctttattacaacgttgggacacagtgagctagccagtgttggatgttctggggtagtacttgatagcattgagtcacagggaatgcatttagtacgaggtttggctgtagaaattacagggcacgctgttggtcattcatgctgtttcagcagttgggcaagatttaaatacatttaggaacttgtaaaaatgaagtcaaagtagctggtggtgagtacgtggacagccctcaggcacagtggagaaagtgacattcccttaggtgatgaggctaaggaatgcctcatgtcatcatacacgggtcagtctgtgacgttgcagcagccttggacaaggggaagcctgattttattcccaaagtgtaatgtgacaggagtgcatggtatggtgctgggaggccagggatactttgtctcacactcttcagggtgtgtggtgtcacatgtcttaggctaagtttgacagcctagggacccgaaccaaaccttgtttaatgttctccttctttacaggtctcctgactcagaagctaacttatgaaaatggcttgttaaaaatgaacttcacggggggggacacttgccataaggtttatcagcgctccacagccatcttcttctactgtgaccgcggcacccagcgggtgagcatgtaccgacggccctcagcggggtcttctccccaccctcaggctgctgggatcatattagaaagaatctgtcctcagatctcatcaaatctcctggttaactgagtttaaaataaccatttacagaaaatatgttgaaactttcatcagttagtattgattttcatgaacgtaaccattctttactattttcattcttaaaactcaaagtataaactaaagttttgcattctcacttttatatatgtgcctcttaacttttttagccagtatttctaaaggagacttcagattgttcctacttgtttgagtggcgaacgcagtatgcctgcccacctttcgatctgactgaatgttcattcaagtaagtccatggatgtgttgtctcttttggacagactaacttggtatgattttgctttaataattagtggtcttgggtgcaggggattagattagtcagttaatttacctaggactcggtttgctcatattaaaatgaggagtcgggctaggttaactctcagctccgtcaccacctggagctgctgtggtgactgcatggggaagggattggagctgaagcagagagtggacccctggcactcttgcgtgatccacatgtcagtgagcagagtgggccaggagcggtgtggtgacccctgcgatgaagggaggtcttcgttgcatgtgatcgtccacagagctgctctcaacagctttgccagatcgccctctggacacctggggtcccatccttagagattttggttttgtgggtctgcggttctgttttttggagggatgccctgtgttctgccgtgtgaaacacccagtatgagccacttgatcactgttgactttcctgggggaaagtgcaggtgattctgtttccttccggcctttgtcctgttgtgtcatcggttatttatgtaggtgaaatcatcatttaagttttaggaacgtatgtaaatgcaagcatttagtaatttatgttcagtgactttaaatcataattttagtaaccttaccttttccagttaacattttgtaaatattttcatgtgaaacaaatttgtttctcatttctactggatgggaaatgtcctcagtagatatccccagttcacttagcagttctctttctgccatgtgaggctgccttcagttttctgatatttatatacaaggaataaaattttgattttctttgcacataaagcatttttcctagagatatgtgtatgtgtgtgtgtgtgtgtgtgtgtgtgtgtgtgtatatgtatatatatatatgtattttttttgagatggaatctcgctctgtcacccaggctgaagtgcagtggcgtgatcttgtctcactgcaacctcctcctccctggttcaagcaattctcctgtctcagcatccctagtagctgggattacagacaccaccatgcctggctaatttttgtggtgtttttttttttttttttaatgagacagagtcttgcactgtcgcccaggctggagtgcagtggcgtgatctcgactcactgcaacctccgcctcccgggttcaagtgactctcctgcctcagcctcccgagtagctgggattacaggcgcccgccaccacacctggcgaatttttttgtatttttagtagagatggggttccactatgttggccaggctggtctcgaactcttgacctcgtgattcgcccgccttggcctcccaaagtgctgggattacaagtgtgagccactgagccagcctattttttgtatttttagtagagacagggtttcaccatgttggccaggctggtcttgaactgctgactgcaggtcatcctccgtctgccttggcctcccaaagtgctgggattataggtgtgagccactgcgcccggccttcctaaagatatttttatgctaagtttttaaaagtagaattaaatcagaggagaattttataatctcataataaaagttaatatatgtctattgtaattgagagtccaaaaatattaatagatgaaattacccaccctcacctctccctccccaacccctagcttcactccactttttactgtttcttcttgtggttctttttggaaccttctataactctaaacctctgtttgtcagcttctaatggtgtctgttgactctcttttaaaagatgaaagctgtcctcacctgtgctgttctcctctcctctttcctctgccttggctttgttagttctatttctgtttcttctgttgactacttttagagcatttggtgatattcactaagctctgttcttgtcccatcaccttcaggcagctttcccttcctgccacctgcccctggtttgggcactcctcctctcgtgcgtgcagtactgcagctgccactccgaggtctccttgccatgtcccttgtcacacgtttggttagtcccacacagtaattagaatgatcctcttgagatataagtcccaccatgtcgctcttgctgaaaccttcaatgcagtgagcgcccatctcattgggacctacaggctgaagttcttcctctgatggacatgacccccgtgttgtctctaataacctcactttcactctgttccagccacacggggtttctgtctttctcgggtcatgtcgggcttatgtgcctcgggccctttgctcatgctgttctctgcctgggatgcgctttactgggtgccaggatggtcagtgattccatttctctcagagtctattcacaggtccccttctcggtcacgccttctctggctccactgtctaaaatttcaacagctgcctctgccccccgaacttcatatcccccttatctgccttttttccttcagctcttacttccatcaaatacagtatgtatttttaaaagtcttatcttgttcacggtcattttcttccacaggtaattttggtaaactttgtaagattgatgatgtttaatactgttttgtttaatacagtacccccagtttagcacacagcttttgaatgaatgaccagtttttattcccctctgaagcgctaagagctgccgctgaggtggcatctgtagctgctcccgttcctgctccgtggtggcagagtgtgtgtctcactcactgttaatattgctcctggcatggggttggttcccagttactgtctgtatttgggatttgtgtagttagtgaacctttagcctgtgcagaaaggtcagcaagcccattttaatttcagaatttcagtaactgctggcggccttggttttaaacaacaggtggcgtgcggctgccccgggcatggcccctgctgtgtgtgctcctagcatcttggctgcttacctttgtcaccagcaagttccacttctcagtggcctgagcacagacggcacgcactttgcagacttgagtttttctgttaaaatttaaatttttttttaagtgagcctaatagtttcctgaactattatgttcagggaagttatgttgttgctgattctgatggggtgtgtgtgtgtgtgtgtgtgtgtgtgtgtgtgtgtgtgacagagacagagagaagtcgagtctaaagttctgtcaggcttagactatgcctgaatacttgaacgtttctagacagtgcccaatgtttaaagagaatacgaccaagcctaactaactgcgggttttcttcttttcagagatggggctggcaactccttcgacctctcgtccctgtcaaggtacagtgacaactgggaagccatcactgggacgggggacccggagcactacctcatcaatgtctgcaagtctctggccccgcaggctggcactggtgagagagggcctcctcgtggggtggtgtttgcagtgagtgtatcacaggccagcactggtgagagggggcctcctcgtggggtggtggttgtagtgagtgtatcacaggctggcactggtgagagagggcctcctcgtggggtggtgtttgctgtgagtgtatcacaggccagcactggtgagagaggtcctcctcgtggggtggtggttgtagtgagtgtatcgaaggctggcactggtgagagaggacctcctcatggggtggtggttgcaatgaatgtattgaaagctggcactggtgagagagggcctcctcgtgggatggtgtttgcagtgagtgtattgaaggctggcactggtgagagagggcctcttcatggggtggtggcttgtcatgagtttatcagggaagatcaagtaggatggggattctttggaggcgctttactctctgcagcatggacgtggttcggccgagaaacagcaggacgaagaatgatttaagggtgttaacagttgatccctagtatggcccagggtaaatcagtgctgaggactgctgggaacatgataaccctttctgaacatgaggagatgaagatataatagatagaaataatagccatggtgaggaatccttcttagcaggtagaagatggggggtgtgacgtggaggtcttggtgtgtgcctgcgtatgttgagagttgtatggtcggtccttttgtgatgcagggacagctcactcaaacctgcagtggttggctgagactggatgtcagctgtacatgggaaaccaagggcacctccagggatcttggtaccactcatggcccctcggaaccctgaagatgaaactcatcccatgttcgtggagtttcatacagccccacctgtatcttgggtggctcacctcaaaggcggtgtggttatttttagctgcagaaggtggttccatcctctgtgtggtttgaggctgtggttccacttccccttgctgcgttgtgctgtgcagacttcgacagtggctgtacccctgtggcatgggactagttcttcacccagggcacatggcacaggcattttagggactgggaaacaggcagaattcttggtagcttcttgaataaagaaggtgcatggacgtaggccatttaaaatgttcctctgtcttaatttgggaatataaccttcatcctatatggggttcagaaagaatttcgactgctacagcctagctattcctctacactcacgcccgcctgccccagtccatctgtgacaaaacagcatgtaagtgagtgagaactaacgtgatgtcattgtcatctgacttatgtgaaagaaatagcaggtattttgaagtgactcttagaaagcgtatgaagttctgcagcgtgtgtgacatttattgcctgatgaagttctgttctagcctggggagtcactaaaggcaactctttcttgtgtctggtgctgcagagccgtgccctccagaagcagccgcgtgtctgctgggtggctccaagcccgtgaacctcggcagggtaagggacggacctcagtggagagatggcataattgtcctgaaatacgttgatggcgacttatgtccagatgggattcggaaaaagtcaaccaccatccgattcacctgcagcgagagccaagtggtaagggactgttcctgcaccttctgctgttgcagctttgggaattgagcccatgtgcagggcggtgagccgcacgtcctcatctgccttgggatgcgagttctagagcctgggatgatgcgcccttaccagaggttgggggaacagcgtcgccgcggcctgcaatctggggaaccctcgtgctgtctggctccttagaagcttgcctggcagttcccgactcagaattggttctcttcagagtttgactcagacccctaaaggctgtggaggagattgttgtttgactacatgcccttttgtcttcacggcggcagcttgggaagcacgagaaggttggctgggcccgggtcacaggtagcgctgccacttcccagccacataacttggttaattactcaggtagtctgccctgctcagccgttcataacatgaggcatacttgtcctgcccattgcagggtttcgagagaagaggtaggaagtgccaggtgtcatttctgacacacgggagatgcacagtcagtgagcatgagtgcctgtgatcagttcttcccttacttgtttggcatgcacgtaagcaggtgtcgactgcatacaggtttttctgtgtgtgagattgtggtgagccccagtgctagcgtgcatgacgagctcggtggctgagttgggcattaactcgggcaagaccagctcgctgggtgtcagggtggctcgccccatgctctccagcggtgggcagcagtggtaggggagcttgggatggggggctccaggagcttcaggcctgccctcttgcctggagcggcagggaagtttcctcttgggaagattgtgcagaggcttagtccagactcatgagctgctggggcctctgagcattctcctctgtgacctgagaggctcatggccgaggacaaaagggctgccccacatgtggggggcaaaggtgagagggtgtgtggggcccctgtgcccagggcccagaaggctgggagggaagggtgaaggggtgtgtggggttccccatgtccagagcccaggaggctgggagggaaggatgagggtggtgtgtgggggcctctgtgcccaggacccaggaggctgggagggaaaggtgaagggtgtgtggaggccctgtgccccagacccaggaggctgggagggaagggtgggggtgtgtcgaggcccctgtgcccagggcccaggaggctgggagggaagggtgggggtgtgtcgaggcccctgtgcccagggcctgggaggctggactgcagcgtggcttatcagggtgcccagcaggaatcatggggtttacctgggaaggaaggtgctgctgaactcatcatgctaactctgcagtggacatgaagcgttttgagatgagcagagtaagccttggctggtgccagtgggaggatgcgtggaatgggctagttctcttggtatatctttttgttttgactgtgataatggattttacctcatttggtttttagaattttatcaatgatttacacatttgtgtctccctgtagcccttccagcatcctttgcacgcctgtccccaacccctgtcctgttcctcagcctgagggagcttcctggtcccctaagtgtgttgctgcctgtgggtgtttcacttacctgcaggggaagcccatggtggcagctcaggacacattctgaccctttgcttttcctaatctgcgcctcatcccacaggcacatggagacagaaatgtcacatgctgtggagtttttcagagaagcttccacttgtaagttgaaatcatgatagacatggagtttttgcgtgatcccttcaggacctgtctgtgctttgttgtagaactccaggcccatgttcatcagcgccgtggaggactgtgagtacacctttgcctggcccacagccacagcctgtcccatgaagagcaacgagcatgatgactgccaggtcaccaacccaagcacaggtgagaggtggtgccagtcgttaaccccagcgcaggtgagagacggtgcccccaccaaacccagctcatcaggggagagacccaaagagaagctatgggcagcaggcgccctgggcagaggtgtcatggtgtgtgggtgtgtttggcctttctctggatgggctgctgtgtgttctcctggctctccttcagtggaggagagaatgctcccacagagaatccatccctcctgtcactctcctggtgtgagaggtgctcctgactggggttactgacagtgtcagtccagcagctctaggctctccagggcaggttagagctagcccctggctgcctttcagcatcagtgtagtggattgccaggagtctctcacctgcccttgtgctgggcacccagaaaggcacaggcacagtccattggcagcaagaggtgtgctgggcaggctctccccatgcccaccagactcttagtggctgctgtggtatggcccagcagagggtgctgtgagccacgatcttttcagctaaggatgggacatctcatggatcaagggactgacagtctcatgatacagcctggctgttggtggaggatttaggacaggggtcgtggtgagaagtcagaagtcccgatgctgacataatctgtgtgtgagctcgccgatgatgagcctcccaagtctcagctccctggagtcactgtgtccccatcttcttccaccctacaggacacctgtttgatctgagctccttaagtggcagggcgggattcacagctgcttacagcgagaaggggttggtttacatgagcatctgtggggagaatgaaaactgccctcctggcgtgggtgagtgctgtggtctctcgtgtgttgtctgactctcccgtcctctggggttgtcctcagtctctttgcatgctaatggcaaaaaggatgagcagagccaggaagctgagacgcttttgtctcctgcagcagtcaccccatgtgggggacacatggtcatgtgatggaatgaacattcaatgtaaaacaatggttaaagccggattggacacttgaagttataagtgttggctatgaaattgatggtcctgacttgcgaaagttctcatcagaaaattggccatcgagtctgtgattgtgttttctccgcctttcccttgtggtgcaggggcctgctttggacagaccaggattagcgtgggcaaggccaacaagaggctgagatacgtggaccaggtcctgcagctggtgtacaaggatgggtccccttgtccctccaaatccggcctgagctataagagtgtgatcagtttcgtgtgcaggcctgaggccgggccaaccaataggcccatgctcatctccctggacaagcagacatgcactctcttcttctcctggcacacgccgctggcctgcgagcaagcggtgagttttcagatgggcacgggagaagtgcatgtccagtgcctggctgcacccgggccccttcgtcaggttcacttgcccactagtagatgcccagctgaactgtccactcctgatcaccccaataataaagttgactggaagtgcccagtgctatgtaatgaagcattttgacacctttctactttttttgttgttgttattcagcttttaaattcttatggatgacctagtggtgattaggaaaatttttttgtagactcaaagcagtctttcctacttaacagaccgaatgttccgtgaggaatggaagctctattgttgacttgtctccccttattcatcgcactggtggttatgaggcttatgatgagagtgaggatgatgcctccgataccaaccctgatttctacatcaatatttgtcagccactaaatcccatgcacggagtgccctgtcctgccggagccgctgtgtgcaaagttcctattgatggtccccccatagtaagtatgacaaatccaagggtggagataatttttgcaagacttttagtgataacctttgcgttgtttcttgccttcagtggggagttgctcaagcataaaaaaaatggagaaagtaagtgggactgtgtatgttctgggtccgctactggaagattaaaggtttgcacattgaactgttcgctgatgatggtagccagccagtctttgagcatgggaggtaacacgaatatgtgtgtagggactctacttgtcatgagcctcagggttgacccaaatcaagaagtttttaggtgaagtgacaggaaagcacattgccctagcctggtttctttgtgtgaaatgccttgtcttctgtagttaaaacgcttgcgaaatgcaaacagtttctttggcaaggagttataattaagggcaagagtacgtttgctaatagctaaatattttgccttaaaagctttggttttatgcattaaaaaattattttgtagagatgggagtattgctatgtcacccagccaggctggcctcaggctcctggccttaagtgatcctcctgaagttctgggattacaggcatgagccacagtgcctggcttactagcatgttttaatagaaatttggatctttaaaaattgtctccatgagttatattcatattttgtcaaatccttggtatgttttaatatttgaatgtatctcacaagtcgtctgtatttctgtctgtatcatctattatgctttaaagatggatcctcttgtaacatatctagatgtcctttagaaagatggccattatatgtggcagtgatatggggagatgtcaggagtgtgtaaggagatcggccacagcctgaattagcacagctccagctctgtgtgagatggaggcctggacaagctgagtctccccaggaagctctttggtagcgtcctttctgacagcgcagaccggggatcctcgatcgggaatcattgcctggccacccattgtcaaatgttaaaagatgtagaaagttatttaactggagaaggtgtggtgccacgtggtctgaacgtgccccacagtggtgaatgaagagcactgtagctgagaacaaaatcatggggaagctgcttatacacacactcacacccacatgcacacacacgtgcatgcacacacacattcatcacatacacagttcctggccattcacctttatttactttttaaaaataaaaaaagagttttttgttttttttctcataatactcagactggtcttttatttatttgtttattcactcaaaaatatctcttgggcagccgctgtgtgccaggtgctgtgctaagcaatgaaaatgaacagtgaacacctcctgtcccctctcccaaggacatagccagtggttactgctgggccacgtcagtgggcagtcccggggcagcactgggcagtgagggtggcaggtcagcatggaggttccggccttcccctgtcaggtggtgggaggaccgtgtagcatccttagaggtttttcaggttccgggcttccctcatcagctgatgggaggactctgtagtctccttgatgtgactggagagattcctattgcttaggatctttgaaaattgaagatacctagaaatagaaccaaccttagaactaacgttaggatcaaaacgataaccactgacatacggaggttacacagcatctgtcaagccttccaactggagttggtataaacccagtttctttagatgctgctcattctcagaacctatgaggtctggtttttgcaattctgtatcaattcttaattccactaaccttgggaatggttaatttcctgaaatactgtttgccctcgctctttgtttaggatatcggccgggtagcaggaccaccaatactcaatccaatagcaaatgagatttacttgaattttgaaagcagtactccttgcttagcggacaagcatttcaactacacctcgctcatcgcgtttcactgtaagagaggtgtgagcatggtaagtgtgggcctgtgacgatctagatgctcaactgcgggttagtgagccaaggctagacaaccagaaagtgcgtgtcaggtccaaggatactcttattcaaaatgtctgccttgggtaagatggtacgctagtagtgtgtctgaataatttaaaccactgattgagggctgagtgagctcccccgcagttaacagcatatagaaacttgctgtaatttaaaaacatagaacacaagtatagaaatgacattcagctttgactgctgatgcataaaagtgtcataacttttgtttttactttaacaattactgattttattctaactgggaagtcagaaagacatttgggcagctatagtcactcaggacatagcccagaagttaacaagtaacaaaagacccctggaatcagaatagctacaacaaagtggcaccttttacttataatgaggtattgacttccattttatgtgcattaaaaaaagaataccagcttccattataatgagttcggtattggttatagtctttgaggacgttttcttttgatccctgctctgtgagataaattggtagattatggcccctattccacagggactcagagtagctctgcaggggcagagccaggtcccagctactgcacaggggaacagctctttgctccagggacacagcaccacagcctgtcgtctgtgcttctgaaatctctgaagctctgaaaacttggggctcctttgacatgaatggactgaggctatttatggtgtggatttgtcccacctaatgtggatattgatacatctagctgcagaaatattaatatgtttgatcacaggatctgggggtgtgagaattgcctcttaaaatcctaataaagatgttggattccaaggctcatctgacccctaggagttcaggtgatggattaggatctgttgggtgtcttgtaattctgataaagacatccttctgatgtttgggcctggagcaggtttgtaaagggactgttagacataggtgtgctgacagtgacagaaagtgacctggcagccgcctgaccagtgagagagacagtatttgagaaggaggaggaaacagtcctgctgtttggggctactccacaggggcccagagcacctcaaagcccttggatgtgttcatgaatcttagagtgtagtgacagtcctagttagtaaggaaaggcagagctgtattcagtccacccattgcatctgtttataagcgtattggcatatttttataggggtgtctgggtgtgcctctgtagatgcacacagcatggggcaacgtggattttgccttgcggggggcttctgcattaagttcttcgttctttaaaggacagtcttcacttctaagacccacctcatcatgagtgatgctttgttatctacaccaccagctaaagagtgtggaactatgccttgctttgactctgctgccaacgtgacaaatcgaattagctaatgtgattttagttaattctcagcagctgcacattgagggtgattagtgtttacttgattttagaaatgaagcatcttatgctgaatgtgtgttctagcgttccagaaagatttttagaagatttttcttccccagcagttttcattttcaatggaagtacttttaccactgaatcatagggaaaaagatgcttaacattaattacaaatggaattcctgagagctgcctcatctttttttgttgctgttgaatgagggagggaataaataaagtgattctacaatacttggcctatggaatatctggccatgtggcatcttgccccttgaataaatgtctcccgtgtctagagacagtagattggagcacttgtgaggcagggtctcagtttcacagacctctctcatgacatataagccctccccctttcttcctttgaacccgtagcacagaacattgaggctttctctctaagtagaagacaagacctggattcagccagggagctcacaggatgtgtagggggcaagggcagggtgatgtctgtgccttgaagatggcattgggtctttcagctgctgttgtctagcatcccttccctctgagaggccgctgtgggttatgcacagcccctgtagggacgtggtgtgtcactgctatctatccctatgccatggggtttttaagacccgtgctcttcctggcaacagggaacgcctaagctgttaaggaccagcgagtgcgactttgtgttcgaatgggagactcctgtcgtctgtcctgatgaagtgaggatggatggctgtaccctgacagatgagcagctcctctacagcttcaacttgtccagcctttccacgagcacctttaaggtaatgcgttcaccctgggcgttgctggtgcaggtgtaccaggtgccaggtgctgtgaggctgctgggagtgttttggataatgtggtacctgtgagctgagagggtgtatgtggccactgggcagcatcttggtgctctcgtagggcatgccaggtctcaggaaggttcttggattgcgtggccaactcagcgcagctgacacttgcgttgtacctcatggctctgcacttaacgctttttgatgataagtaacctcatgaggcgggtagtgggaccctttgtatcagacagagggcaggtggggcagcccggagacatgaatgtaaggtatccatgggggcagggccagctcctgggtggctgaaatctacagggatttaattcctccaacctggttgaagatgatcaaggcagttgtttgctgattgtggcagctttgggaagagggaggtaggaggtgccctggaattgagaggcacttgggcatgtgcctccatgccatgccagagccctggcgtgtgctgattctttgggctgctggtcttactgatgtggtgtcgtggtcactggtgcctgggggcccctgactccctaagcctagatatctagatgttaccatgccagtgcctggactggggtacggaaccccagcacctgctgtggcacggcggctggtgagtgatgagcctggagttttgggcccaggtgtcaacaccctggctcctgtgatggagccctctgcctgggtacaggtcctcccgacaggtgtgcagtaggtgtgagccttctgggcgctgggtgggccaggagagtcaggtccatgcttcagcgtgcagcgtcggctctgctcattcactcacttggcccgcacaatgtcttattacacaggtgagggaggtggggtgaccccactgctgggtcccttctcactgggctctgactggagacgacagccagagcagtggctggctggcaggggtggccgaggcccccagcagggagcaggaggagcaagcaagctgggcctaggggttgggggaggccccccagggaaagcctagggccaaggcgattgcgtggctctgatgcacacagaggagtctttgctcttcctcatgaacctgcctccagcatcagctgcaatagtggttctctcttcactttgagacctgggtgctgccactctgctgacggccacgcatggtttttgtccaggtgactcgcgactcgcgcacctacagcgttggggtgtgcacctttgcagtcgggccagaacaaggaggctgtaaggacggaggagtctgtctgctctcaggcaccaagggggcatcctttggacggctgcaatcaatgaaactggattacaggcaccaggatgaagcggtcgttttaagttacgtgaatggtgatcgttgccctccaggtaaatatttgcaatgaggtaaataaacttcaagctcatagtaaactagaaattagacatagcagcagaaagaagctgcggagtggagctccacggtcctatgagtgctgtaaccttgggcgtgaatgtgagctgttcctctgtacacccccggtgtgaatgctggtgtgtgaatcacgctgtgttctctcagttgcctggtgagttttggcaggtgaatgccggttgtcacgtaggtgctttaggatgggcagcttccttagggactgctgctgcattctgaggtgattgtgcctggcgaggcacagctgccacactgataatgttcttcttctttccagaaaccgatgacggcgtcccctgtgtcttccccttcatattcaatgggaagagctacgaggagtgcatcatagagagcagggcgaagctgtggtgtagcacaactgcggactacgacagagaccacgagtggggcttctgcagacactgtgagtaggacggctccgcgtccccacatggcctggggccttgatactgtcaaggctcgattcacactgagacctttgtggatgccccagtcagtggcaggaattctcttgcataaaatattttcttactcgggctgtttcccacagagaaacgtttgaattgctctgtgggattgctgggtaaccgtatctacagaccgtggtagagctgccgtgagatgctgtgctgggtggctggctaggcccactcactagctggagggccttgtgtccacataccaggttttagccctggtggttcagattatgcctcaggaaaatgaatgtctgctatgggtcttcaggattctgaagctagtgaggattccggtaaaccaggcgactcatttattgactttctgccatgtggcagcccaggtggggatggaggtttcttggtgagccacactcagtgccttgcccctgcggtgctcaggaagtttcatgagaggagccaactgctgtgacttgtgtctacggaccgtgagatgagggaaatgcatgaaaaattactaatttttggccaggcgcggtggctcacgcctgtaatcccagcactttgggaggctgaggcgggtggatcacgaggtcaggagattgagaccatcctggctagcatggtgaaaccccgtctctactaaaaatacaaaaaaaaaaaaaaattagctgggcgtggtggcgggcgcctgtagtcccagctactggggaggctgaggcaggaggatggtgtgtacccgggaggcggagcttgcagtgagccgagatcatgccacttcactccagcctgggtgacagagtgagactcggtctcaaaaaaaaaaaaagaaaaattactaattttcataaatgtccagtatcgggggaaccagcccccgatttttcaacgtaggttcttttctatttccctaagtgttggccggtctgagaaataaggggaaagagtacaaaagagagaaattttaaagctggtgtccgggggagacattacatgttggcaggttctgtgatgcccccgagccgcaaaaccagcaagtttttattagcaattttcaaaggggagggagtgtacgaatagggtgtgggtcatggagatcacatgcttcaaggatgactagaggtcacaaggcagaaggtcagggcaggatcacaaggtcagcgcgaaactagaatcactaaataacttccatgtcccactgtgcacacattgtgagggttcaagagcagagaaccggtttaactagaattcgccaggctggaatttccaaatcctagcaagcctgggggcgctgcaggaggccagggcgtgtttcatcccttatctgcaactgcataaggcagacacccctagagtggccatttaagaggcgcccctgccttcctcccgggaatgcattcttttcccagggctgttaattattaaaattccttactggggaaagaattcagcgatatttctcttacccgttttcggtaataagagaaatatggctctgtcctcaccggcccacagtcagccagactttaaggttatctcacttgttccttgaaaatcactgttatcctgttcttaaggtgcccagatttcatattgttcaaacacacatgctttacgaacaatttgtgcagttaatgcaatcatcacagggtcctgaggcgacatacatcctcagcttacgaagatgatgggattaagagattaaagtaaagacaggcataggaaattataatattgattggggaagtgataaatgtccatgaaatcttcacaatgtatattcttctgtcacggcttcagcaggtccctccgttcatggtccctgacttcccgcaatagtccagggaccaaaatgggatgtattaaggaaccaaacgtgttaaatttacgaaggattgctatagctttgttttgaggcttattttgacaaaacgttattccctattttctgaatcacactcctgttttcaagtacttgtaggtattacattattatcttaaattttttttttttttgagatggagttttgctcttgttgcccaggctagagtgcagtggtgcagtcttggctcactgcaagctccaccttctggtttcaagtgatactcctgcctcagcctcccaagtagctgggattacaggggcccgccacctcacccagctaatttttttgtatttttggtagagatgggatttcaccatgttggtcaggctggtctccaactgctgacctcatgatccgcccacctcggcctnnnnnnnnnnnnnnnnnnnnnnnnnnnnnnnnnnnnnnnnnnnnnnnnnnnnnnnnnnnnnnnnnnnnnnnnnnnnnnnnnnnnnnnnnnnnnnnnnnnnnnnnnnnnnnnnnnnnnnnnnnnnnnnnnnnnnnnnnnnnnnnnnnnnnnnnnnnnnnnnnnnnnnnnnnnnnnnnnnnnnnnnnnnnnnnnnnnnnnnnnnnnnnnnnnnnnnnnnnnnnnnnnnnnnnnnnnnnnnnnnnnnnnnnnnnnnnnnnnnnnnnnnnnnnnnnnnnnnnnnnnnnnnnnnnnnnnnnnnnnnnnnnnnnnnnnnnnnnnnnnnnnnnnnnnnnnnnnnnnnnnnnnnnnnnnnnnnnnnnnnnnnnnnnnnnnnnnnnnnnnnnnnnnnnnnnnnnnnnnnnnnnnnnnnnnnnnnnnnnnnnnnnnnnnnnnnnnnnnnnnnnnnnnnnnnnnnnnnnnnnnnnnnnnnnnnnnnnnnnnnnnnnnnnnnnnnnnnnnnnnnnnnnnnnnnnnnnnnnnnnnnnnnnnnnnnnnnnnnnnnnnnnnnnnnnnnnnnnnnnnnnnnnnnnnnnnnnnnnnnnnnnnnnnnnnnnnnnaatctatatcataattaagtttaagggatggtactatgcctggacatgcacataggccaaatttatgtttctccccacccaaaacatctcagcggagtaaagaataacaaggcagcattactgcaaaacgtgtctcgcctcccgccacagggcagcttttctcctatctcagagttgaacaaatgtacaatcgggttttataccgagacattcagttcccaggggcaagcaggagaaagtggccttcctccatctcacctgcaagaggctttcctcttttactaatccacctcagcacagaccctttacgggtgtcaggctgggggacagtcaggtctttctcatcccacgaggccatatttcagactatcacatggggagaaaccttggacaatacccagctttccagggcagaggtccctgcggccttccgcagtgcattgtgcccctggtttattgagactagagaatggcaatgacttttaccgagtatactgcttataaacattttgttaacaaggcacgtccttcacagccctagatcccttaaaccttaattttatacaacacatatttttgtgagctccaagttgggtcaaagtggctggggcagagtggctggggcaaagctacaaattaacaacatctcagcaaagcaattgtttaaagtacagggctttttcaaaatggagtctcttatgtcttccctttctgcatagacacagtgacagtctgatctctctctcttttccctacactccccagcaaacagctaccggacatccagcatcatatttaagtgtgatgaagatgaggacattgggaggccacaagtcttcagtgaagtgcgtgggtgtgatgtgacatttgagtggaaaacaaaagttgtctgccctccaaagaagttggagtgcaaattcgtccagaaacacaaaacctacgacctgcggctgctctcctctctcaccgggtcctggtccctggtccacaacggagtctcgtgagtgccttcccagtccacccgcggcgccacaccctcagcatgtgaacttcagactgcttgacgatggttggctcttttgggttctcaagatgggaatactatgcccatgtgaggctgatggtggttgagttgtgactgttcctggaagcagcccgcagtgtcaatcctggcacagagggtggttctgaggtcagagtgggggcaggagctttggtgactggaaacggagcctctggagctggaagaacctgggcggactgagttaggctgggtttgatttgcgtttgtgtgtagctcaggttgtgggaggcgtgtgggttttctcgggtctttggcaggagctccttaggctttgctggctggggtcagcccatggtcctgaccactctgcgtggggagcgcccgcttggccaggtgctcctgcaagacatcaccgaggagcaggggcatggactcacagggtttaagtggttctaagtgaggtgggaaacttgccgagattctagccactgcctctcccagccccggagcccttctttctactgtaccacgctgtgtccagggtggccgcaggtgtggacattccactccgcgtgtgtctggttggtgagctcccttcttcagtgaagacttcttttgccctttttttttttaattggaaaagctattttagtgctacattcagtgatggaatggagcccttagttatcagaacctttctctgaaagtaaagtgaagagccctcctgtgtcagggcagagacgtcacttgcatgccttttacctgcccctttgtgtcgttttctaggtactatataaatctgtgccagaaaatatataaagggcccctgggctgctctgaaagggccagcatttgcagaaggaccacaactggtgacgtccaggtcctgggactcgttcacacgcagaagctgggtgtcataggtaaggcctgtgggtcctggtccttggttcaaggagcagcatctgaaccgggaaggtgagggtgttctcaggatggcaaggagagtgagcatgtgctttggtggaaacctccagatatgattgcctgtcactgtctcacaggcattttggctctcctggcacattaaaataagtgctgctttgtattatatgagactgcaggtcctagtctgtgtgtttagaggggttgggctatctcggggaagtgcgtctatccaggaggaagtctcagaatgttcagagttcctctgaagttcacattctagctgtagatcaagtgcctaaattggcataaacacacgtgtttgtttaggaaagccaaacagttgcatgaggacttggtacaggtagttcagaggtacatctttgtaaaatgtcttaacaatttttcacgggaaattgatcttgtacttggttgctgagtgaaagttgttttctttcattatttaaaggaggaaaatagaggtttcttagtaagagcaattaggatttgttggagggaccagtaaaggaaaatattcacctttgcctcttaggctggagtggggtttctcgagttgtcctgattcagccacagggctacttcagattagcttgagatgttgagatggagaaagagaattccgagaaaactactgccacccttgataaaaatcacacacagactctgcaggttggtaggtggagggagagctgccatacaggaagtggcgcccagaccgccagcctgagacccgccctccctgggaggttcttactgctttagaggtcagttattgctgccactcccacactgccccagaagggggaaggagggaaggtcgtggagggttgctttttcccctgtaatcttgcagtatatatggatattcgactagtctttccccaacttcagccaactgaaatgactaaaacacttaaggcttcctaaaagtttgaggcaggaggagcaaaagagagtagtgaacacagggggtgacatggaactagatcatctgacttcttagcggtgacctgcaggccacctccatttggagagcaccattttgcaagtccagcctcgcctggcgggaagagctcatgctttctcctgggactggcatttggcatcctgagcacctgctgaccggaacgagaaataatctggtgtctgacaccaaatgagctcttaatctttggcgccaacaagacagcatctaaggacaaccacggtgcccccattgtccgcttagggaatggacccctgttggggtgggaggtagactttttgttttcagaaccaacatgtctcaagcagctgtgcttaatatatgtttaatccccatccactccatggggcagcgttgtcatccgtttcacaggctgggcccctgagccgaggaggttgagcctcctgcccaatcagtaagggctgtctacactattaaagttttttcttgtttgatcccatatgccagaagttttaaaaattttccgtaaaacagtggaattcttttttccaaaattttacacagaagcccaatatttaaaacaaattcagctggagcagctttgagtttggggcaggcctgagagcctagagtcccacctcccacctcaccatccagcagccctcagtacctcagcctgtgtcctgtggaaaacactcgggaagtgagcactgtgcccatgttgcctccaccgcatgcccctgcctggaaggatctgtgtgtgtgtggtcagggtggaaggcacctgcttcccctggacaccctgcgccatgccctggagacatcatctgtccatgcagccaggctgggcccagaccgttcccagaacagccccctgcgcagccacaagcagcctcttggtggtggcttgagagttggaacctggcggccatgctgccccagtgatacctgcagcttaaagcatgtactcacttttctctcagaccctgcgggttcgagggctcaggtttttcttttaacgggtcacttttaaaagcagacagtgctcgactgaaagctagaagaccctagaaaaccacagttggtttctgtttctggcttttcactttttccattctgtgctctgttattactgggaggctcacatgagggtacctgtcaggaaagcacctaatatgatagagagagtttacacaattggagcgataatgaaggctgccattacccggggtcccactgttcacatgagtttgttgggcactttctatacatgcccgaaacctgcccactttggacagtgccctgttctgcaggtaaggccctcaaggctcagaagctcagcaacccagggccacaaagtacgggagtaggagggtttgggtttgaccccaggtcttaggctgtgacaattgtgcagtgggccaggtgaccacccctgagtgtgggaatgcaagaacaggtcgataaacctttagggagcccaaaatttattttcttctggcctttaaaccagatttttactcctaacattgaagctttgtttgtttgttttttgtttttgtttttgagatggagttttgctcttgttgcccaggctggagtgcaatggcgccatctcgatcttggctcactgcaacttctgcctcccgggttcaagcaattctcctgcctcagcctcctgagtagctgggattacaggcacctgccaccgtgcccgaataatttttgtatttttagtagagacggggtttcaccatgttggtcaggctggtctctaactcctgacctcaagtgatctgccctctttggtttcccaaagtgttggaattgacaggtgtgagccactgcgcctgcctgaggctttttataatgcactagaaataatgtcagttcaatcatttgtgtgtttcaggtgacaaagttgttgtcacgtactccaaaggttatccgtgtggtggaaataagaccgcatcctccgtgatagaattgacctgtacaaagacggtgggcagacctgcattcaagaggtcaggagactgggggctcagagcgggactgtgcagtgagcatactggagggaattcctccttggggttttcatgggcaggttttggctgagtcttaggagctcagggccagagccgctgattgtgctgtattgggcggggctgctccaggcagggaagacctccagatacagtgctgagacactgttacaagaccagtgcaacttctctgggctagcttgtctcttgaactaggtttagcactggctgagcagtacttaactgacctctacctttgaatgtcatagtagaaacaaaggggcgtggatttgtcccacccgaggtgttcaagcagcctggctgggaccctcgagcagctgggacctgcatctggacctgggatgtgcttggattatattcaagttttcccggccacattgcatctggtgccagggagagcttggccaacagagggtgcatgtgagctgctgtttgtgaacagaactgattccttccagacgctgagtttggaaaaggggtgactcagaaattgccaaaggatttatgaatgtatgagtctgagaagcttaaacaaaaatctaaaaatctaggagcaaattttccaggttttgaatgttgcacggtttacaaattttaaaaaatttatattgaatgcttgcctgctttgtcacattactgatgtgtgcaccacagtcatcttccctgtccattgtggtgatgaaaagaagtgagtaaaataaccaccctcgctccgagctgccgtcagtgttgagtcgggaaattctgcctaggcctgcgcagcccggggagtgggggcctcgggacccaactgaagtctcgcagcaccttgactgaaagccagtgagctgcttcaagggctccgcagtgttcattgttttgcagtcttcccttatgtctggctggggaagtgactgtagcctgtgcttccctcctcctaggtttgatatcgacagctgcacttactacttcagctgggactcccgggctgcctgcgccgtgaagcctcaggaggtgcagatggtgaatgggaccatcaccaaccctataaatggcaagagcttcagcctcggagatatttattttaagtaagtaaaacgttttccttctgagctgtgaaatgtgttcaaaattaaaccagcaatgccgctctttccctatcggggagcactgcaggataaataggtctgtgttttagttactgttgctggagtcatcgtcatcttttgcttaaactgaggaaaagcgttactcaatcattaagttttaacaccaaagatggtgaattctcatgagtgtaaaaataaatcccccgtccttctccctctcttcatgataatctcaggggttgaagccgaagccttctgacatgtttgagcaggaatcttctgggcttaccagtgtttagaaaataagtttctcagcagtgttactggggctgctcttgggggtggtggccgaggtgcacagacagggcgagggccgtgtggtgctggatacggcacctgaggaaggtggattagcactcagaggccagaactggttggggagaaagcctcttgagagggaaactggtgtcctcagaattgctgtggggtcacagacgtgctgccctagcgtgtccgtgcttcctttccctaggaaaggaagcatcctggggccctgcagtgattctgaggactgagggtttatgtcatgaatgccttcttgaaggacttccatgtcactgtgatcttttctgtctcttcaggctgttcagagcctctggggacatgaggaccaatggggacaactacctgtatgagatccaactttcctccatcacaagctccagaaacccggcgtgctctggagccaacatatgccaggtgaagcccaacgatcagcacttcagtcggaaagttggaacctctgacaagaccaagtactaccttcaaggtaatccgtggcttcccacaaagttccacatttaacttcctccaaggaaggggattaaaattttcaactaactcccttcagttgaaatctcggaccacttttaaaacaaaaaccatggtctaattctttactttgttatgaatttcttgacagtggattgagcgatacgtgtcagaactaagcatttcactgtaggcaaattgtgtcttagttatcaaataaatgtacaaaaaaactaaaacctggtctgatccagtggttctgaggttgggtggaggctgagctgtgcacagtcagaattgcctttgatttggttttaaccatgacacttccttattttggaatgccaaataatattagagaagggtaagagattttatatttgtaagaaggatgaaaggaaactggcctaaatgttaggatgtaggttaaaatcaaccaggacgcacatagggcagagtccagggtgtgaaggaaggttttaaactggcactaataagggtgttgccctttgttccctcacataatcgtgaaaggctgcttttgttttgaacagctagtcttaactatatacctttcataatttgatttttgaaccgtgtgtggatgtaataactctttaaaaaaaaatgaagtgtgtttaaagaaaaccccagcctgctctgatgtcaaagagctgccgatcatgtcctctgggaggggagagtagtgatagctgagaaggagcaggtgctctgtgccctggtgctgagcacattgccgagaaggagcaggtgctccgtgccctggtgctgagctcatcgccgagaaggagcaggtgctccgtgccctggtgctgagcgcatcgccgagaaggagcgggtgctctgtgccctggtgctgagcgcatcgctgagaaggagcgggtgctctgtgccctggtgctgagcgcatcgctgagaaggagcgggtgctctgtgccctggtgcggctgagaaggagcgggtgctccgtgccctggtgctgagcacatcgccgagaaggagcaggtgctccgtgccctggtgctgagcacatcgccgagaaggagcaggtgctccgtgccctggtgctgagcgcatcgccgagaaggagcaggtgctccgtgccctggtgctgagcgcatcgccgagaaggagcaggtgctccgtgccctggtgctgagcgcatcgccgagaaggagcaggtgctccgtgccctggtgctgagcgcatcgccgagaaggagcaggtgctctgtgccctggtgctgagcgcatcgccgagaaggagcaggtgctccgtgccctggtgctgagtgcatctccacgacggcagcacctgatggagggaagctgggtcagcatcgctgctcctggtcacagattgtagacagcgccctggtgcatctgctcatagcacctgtggcccctgaatagaactgggaaagtgaatgttctgctttctgggtgagttgatgatgggaaagttgatcagcctcattcacttgcataactccacagcacggagctagcactctgtgtttctctgttctctgccttcctcacacttcggtgaatccttcagtcattcagaatcagatgttgcatgtcacaggttgtgccttctcttgctgtcctctttcccagtgctcggtaaatcttgattaaaggaaggaaggaaggattgtttcagaagccttcaggggccctatcatgcagagaaggaaagtctaggctctctctgacacagcttgaagatgtctgagaggctcccatgtaccagggtagccttgcaagctgctgctcctacacatgcctcagccatcaggttattcactagttcccaaagtcaccctgtaacctggtgggtttacatatgctgctcttggtgctggaatgccttggcccaccttcctcatccttccaaacctacttctagtgcccctcctgggaaggcccaccttctcatagcagggtgacaccgctggtgtgtctgcaggattccaaacctacctccagtgcccctcctgggaaggcccaccttctcatagcagggtgacaccgctggtgtgtctgcaggattccaaacctacctccagtgcccctcctgggaaggcccaccttctcatagcagggtgacaccgctggtgtgtctgcaggattccaaacctacctccagtgcccctcctgggaaggcccaccttctcatagcaggtgatactgctggtgtgtctgcaggagtcttcacgctccatcgcgcagcactggccacttgtctggttacacataagacctccacgttcacaagtggtatgtctagcagacctttgaggatccccagctttcagagtgcttgtgcatgcgcatttagtcattcttggtaaataaaatccctttcagaccttttcactttcttcattcaccagccccaggaagtagctttagttttaagacatcttttcatctttcatgaagaaatgaagtttctatctcttcctgaggcttgccattccttcgggagggcagagctgtctctcatcaggacgtggagctgctgggcggtttgcttccccacatcagccctgtggaacagtccattcagcagcccctgcttcagctactcccaagcgagaatgtggggccctcccggagcggagccacaccgcctgtctctgggccccatctgtgtgtggacatgtccgtctcctaccctgcactctcgcctctgcattcctggcacccagcagcaccagccacaaagattttcagccagtgacaaaggttgggagcagcagagttcatgcaaggagtccacacaagggttcctcacttctgacagcaacagcacactgaaggggttcccaagccaacttcagatttaccctttcaccataactcacagagctccctggaagcagttacacttatagttatgatttactgcagcaaaaagatacaggttaaaatcaaccaagatgcacacagggcagagtccaggagggaattgaatgcagagttcccaccagctctcccgtggaatcagatgtgttgtgttcccagcacccacgtgtggcagtgcacatggagtatcatcagccggaggtgcttccccgagccttggtgtccagagtttttcccggggctctgacatgggcaggattggtccattgatcactcaggtactgcatggccagcccctgctccgtatcctgtcattagccaaggagcaaggccagccctctttttgggcaaggttaaattcttgccttccctcttgttgccgttgcttctgttcctggaggagctcctggcacagtgatggggtctcaggcctccaccttactgcacgatgaagagtttgaggagatcaagaaggagactggcttttcccacagtcaaatcacacgcctgtacagccggttcagcaacctggacaaaggagagaacaggacgatttccaggggattccagaacttgccatcaacccagtgggggactggatcatcaatgccttccttccagagggagaggaccaggtaaacttccgtggattcctgcaaactctggctcatttccaaaccattgaggataatgaaaagagcaaagttgtgaatggacctgaaccactcaacagccgaagcaacaaactgcagtttgcttttcgactatatgatttggataaagataacaagatctctcgtgatgagctgttaagggtgctgtgcatgatggtccaaataaatatctcagataagcagctgggcagtatcgcagacaggaccattcaggaggctgatcagcatggggacagtgccatatctttatcacagactttgctaaggttttggagaaggtggatgtagaacagaaaatgagcatctgatttcttcactaaaggacagacagcaaactattccttgcagtctagtatttaagtactggaacttgacagtcctcctgtccaccagccctacctccaccccatcattccccttctcccaaagtactactgctgttgcataacaaccccaaatatgttctgtcaacacaaacctgcttttggtctataaacagggcgttacagaatggtacacccagtctatttcttctcagtatccattcgccagttcttcatttataaatatcgtcttcctctgttctgctgctgaatgccacacatccatccagtctgagaaagtaagatagggaatcctgccgaggaacaagccagcaaagctctttcactggatgtagactgcacctgctgccttccctctggcgagtctgccagcatgcttctccatcctttttatatgtcctttgcttcccacttctgtgtacattcaacatactgttcacgtagtcatgcagtctttctgctttttgtgaagcctcagaatctcctctgttctacttggcaccccaagctatgcctggtattgtatttctgacttggctcgatagttcggtggtctggcagtttttatctaccttcattattaaaaggccctctggagctgggcgtggtggctcacgcctgtaatcccagcactgtgggaggctgaggtgggcagatcacgaggtcaggagatcgagaccatcctggctaacacggtgaaaccccgtctttactaaaaatacaaaaaattagccgggcgtggtggcgggtgcctgtagtcccagctactcgggaggctgaggcaggagaatggcgtgaacctgggaggcagagcttgcagtgagccaagatcgtgccactacactccagcctgggcgacagagcgagactccatctcaaaaaaaaaaaaaaaaaaaaggccctctgggatgttgcctctccaggagctttttggtaaccaacacttctctcgggagtatgagatcatcctctgcactcttctctgtcatcaaagggctgctgggtggagatattcttgaaaggtggccttggtgagaggtgtggagtcaagtcttttaggttgcttgcccacgtcactctacctctggcctctgattctcaactttgtacctatggggcgtctcttgttagtgcagtgttgactattcaaaaagtagcaatatgcctgcagatttgcttagtcttgggacacggttaccaccagaacggctgctcagacaatatgcttggggactttctcatggctttttgaacaaggaggctgcgcaccctgtgaagcctcctgcattcacacctctgctgcatggtttatgcctcagtgttatgtgcactggaatgcttttcactatacgtttccaagttagaaagattagtgttatggaagtgcctaatgtatcctagtccaaaatatttaaagattgttctctgtgtcttgaagttttgcacaaaattctttatgaattttacacttggcaaatgttaatgctagaagccatagtccgcttcttatacaagtccaaagcgttgactgttgtatcattagctccctggttacactggtttcccagctccttgtgtagaccactgctaatcccttagaaacaagaggtctggcactagtagcacaacctaaggtggcattccaagtctttaagcaagtcacagcaacttttctgccaaagtcagcttagtttagacttcagtgaatcaggctgttgccatcctaatgtatgtctctgtgagtctgttcattcacatatctgccgttggctgactttcttgactcgctgcttgcttgcttgtttccttgctttggaaagctattgaagatgtgtacataattctttaggaaggggattgctaaaaaatacactgcaaagcgatggaaaacagtggagaacaggggagtagccaggctggatggctcaaatataaatgaatgaggaattctttatgaagtgtcagttggactttgtgattgagtgatgtaatacaggaattatatagaaagggaagaatatctgatactgatctgttagatacttcagaggctccttgatttgcatatttaaagttcctaaaattgtagcttttcccttcttttggctgtacagcagactgttttaatccacggttgtgccttattgttccattaaaattgtgtcttcagtccatcaataaatactcgtggttaaaacaaaacaaaaattctttactgcatgctgactaagggcagggctctatccatgtgcatcgagtggcctcgtaagctgtgaacagagtgcctgtgggacgtgggatgaagtctcttctgcctgattttaagtctttgcaaactttttagaccgtaaggagctaagctcagtctgctcgtgaaaaatgatggtgacatgccatgtgtgcccttcccgtttgacagacggcgatctcgatgtcgtgtttgcctcttcctctaagtgcggaaaggataagaccaagtctgtttcttccaccatcttcttccactgtgaccctctggtggaggacgggatccccgagttcagtcacgagactgccgactgccagtacctcttctcttggtacacctcagccgtgtgtcctctggggtgagtatgacatccggaagcttagcacttgtaccccacatcttcccttaagaataagtgtatgtgtgttttttccccaatgttttcttgtgaaatattcagaacatgcaccaaaaaatagagaaaatgatagaagcggaccccacatagtcagtgccccgctccgttgcttgtcagcatcctgccactgatttttggtccatggctgcgtcacctcccaccacccccagcagcagtgccattgtttcctttgtgtgtaccatgccccgaatagggtccagtcagggcaccccagctctgtccctctaccctgttcccattgctgcctccctctccttagctcctgggaggcaagtactggtggtgcctcctctgtgtaatcctggaacatcttttgtgtcgtaatacaaatgattgtttggtaaagtttcactttgatttgagtgcagtatttttactttgatttgagtgcagtatttttacgtttgtttgaatgaatgaaaagcttactctccagattttgagaatcagcatgagaacagagggagcagtttctgctctgaaggaaggtggcacctccattggttgtcttgtgtcccacagccgttttatactttgccacgaataacatgttgtcagttgctttcctcttggatttattttcttcttatgttacccccacccatcattgtatttatatttatttttattttttatttttttgggatggactcttgctctgtcactcaggctggagtgcagtggtgcggtcttggctcgttgcaacctctgcctcctggttcagacgattctcctgcctcagcctcccaagtagctgggattgcaggcatgtgtcattatgccctgctaatttttgtatttttggtagagatggggtttcaccatgttgaccaggctggtcttgaactcctcacctcagataatctgcctgccttggcctcccaaagtgctggcattacaagcgtgagctgccatgcccggcctggcccaccattttacataagcttttcattctctgtcctgagactttaagattgggggaacatgaattcttgccatgtaattgtttccttcatgtcctgaaaaagggaccgtagagtcagcagacgacagtggtgggggtcatgggggaatgaagatcacacattttacatcttaaatcagcactccccctgcccacccttaacagtggacatgagctcagcaaaaaccagctttgtcctgtgctgttcaggcctgtgtacttagggatcctcagctgcacagtcagggaaagaggcttttggttgaaatttcacttgtggtattttcagcttttgaatgtttatggtgttccggtgacgtcattacaaaatgaaaggattgaaactggaagttcttcctgaaagaagcaaaatgtgaatttttataaaagataaaacccagaagtgaactttccctgcattctctgtcatggagaggctacagctgccatgagatgaatcctgcctcctgacatggcagctggtcttctgtgtgggtttgagggaccaggccaggctaggatcccgtccatgttgaatgtttagagttcgacttctgtgagtaggaaaagcaccgtttatagggctttggtgtttgactctaaaaccagagaggaagattctccaggaaacctcggtttcatgatgttcagaacatcaggattgggagctgtttaaatcccttaacacactgacaaggtaataaggactttaaaaaaaagaaacagaagttgaaaccaagagcaaaaactcagatggtggattttgagggatgcaggtaccacccgggggtgacgtggaatagtgcctgagatttttttttccccaaatgttatcagtgttgtacattgtagaatcatgtaaatatggccagacgcggtggctcacgcttgtaatcccaacattttgggaggctaaggtgggcggatcacttgaggtcaggagttctagaccagcctgggcaacatggtgaaaccccgtctctactaaaaatacaaaaattagccaggtgtggtggtgcacacctgtaatcgcagctactcagaaggctgaggcaggagaattgcttgaacctggaaggtggaggttgcagtgagccgagatggcgtcactgtactgcagcctgggtgacagagcgagactagatctcaggaaaaaaaatcatgtaactataacaaacaggtagcaatgttcgccctaatagattaccatttttagttcttttagctatttcttctggaatttacctcagtattttaaattaacatcctatatctcatctgttgacttcctgcaatagtagatgaagatagagctgtcttacaccttcctcctactttacaaaaatggttctttcacaatatttgattaaagtcaaaaaatttacacaaagctaaaagacaggcatctacagatggaaggggcaggctatgtgcccagcacagttattgatgacaagacccacccacttatgaaataccaggagagcagatacaaagaaaagactgtaaaagctttaggggaggctaatttgttgtattagaaaataattcaagaaaggttaaaatactttaaatcctcactttatatcatcgataggttcttggaaactgcaactttatgtgaaatgatgtataatgaaaccagttttttttcctcagctttatgttatgttatgttatgttatgttatgttatgttatgttatgttatttttttgagacagagtctcgctctcgcccaggctggagtgcagtggcgcgatctcggctcactgcaagctctgcctcccaggttcacgccattctcctgcctcagcctcccaagtaactgggactacaggggcccgctaccatgcccggctaatttttttgtatttttagtagagacggggtttcaccgtgttagccaggttgatctcgatctcctgatcttgtgatccgcctgcctcagcctcccaaagtgctgggattacaggcgtgagccaccgtgcccggcctcatcaactttataatgagacagttttgaaggaaatgatgtcattcgaggacctcccatagtcgcttcacggaaggttgcagtttgaaggaaactgtcagcgaccctatgaggacacactgtactggacaacagtggtgtctaagctgagaggggtggcagagttcccagcttttaaaatttcttacagtgatagcatcatatgaaagtaaaaccattttcttgaaagaaatgaaggaaggaagaaaaggtagagttcctaattgtttggaagacatactgttagacttcctgtcttagtatgcatgccagtattttaagaataaccactaaaataatataaatatagtatgtaacttccaaaacagcggagaagaaaaggagaagtaaaaatacttaaatccccaaagaagacaagcaaggagaaaaataaaacaaaaatcagataagtagaaatttcagcccagtatggtagaaataaatctaaatatatctataatcataagtatagcttgactaaacttgtcagctaaaaaacaagttgtcaaactggatttcaaaaacaactctgtttacagggaacatgcctaaaacaaggatacagaaaagaccaaagtcaaaggagaagaaaagatataccagaaaataatctgaaagaaagctgcagtagttatgttaatataagataaaataggatattaaagaaaaatattagggataaagaataaagagggtcattataattttaaaagggctaatttcctaggaagatacaagaatcctaaacttccatctacctaataaaaaagccttgatatgtaaagcagaaattgacaaaaccacacacaagaaacaagcctagtgattgctgggttgagtagacaaagagtaaagctttttttggaagattgagacagcacagtgaaaagcaagatttaatagacatgcgcagaacactgttccctgcgttgggagaacactgtttgcccaagcttacatcaaacacttagaaaactttagcaaaaattaaccacaaagcaggcaagtcagcaatttcctttttttttttttttttttttttttttttggagacagagacttgctcttttgcccaggctggagtgcagtggtgcgatcttggctcactgcaacctctgcttcccagattcaagtgattctcatgcctcagcctcctgagtagctgggattatgggcgtgtgccactacctcctggctaatttttgtatttttagtagagatggggtttcaccatgttggccaggctggtctcaaactcctgacctcaggtgatccacctgcctcagcctcctagagtgctgggattacaggcatgagccactgtgctcggcctaagtcagcagatttctgactgatgcaattaactacatacatgatgcaattaagttaggaaccaagaacaaacaactgaaaaatagaaatacgtttgaagactaaaactcacttctgaataatctatggtccaaagaagaaatcaaaggtagaaagtaaaatacgcttagaactgagtgatgatgtgtctcttggatgcatttcgagtggtcctgagtggctggagctgcttctgggtgagtgggtttctggcttggagggagaggtctgcatagctctcagacctgtctgtggagtgtggtggtgcttctttctgagcagaggtcaacccttgcaggcccacctagaactggacgccaggctgtccctgtggtttcttgtcttgctgatgttttagattgtttggcttaagctgaactttgagagcggcagcccttgcggctgggccgcgggttggcctgttgccctcaacctcagttctttgagcagccggcatcttcagcagcacaagatgcgccccgctggggttgcctcttatcaccagcagcacaggaggaatttctgtttatgtgatcctgttcctgtgtgtgtggccccaagtgacagagggccagagagattagaagtgtcaagtcgttacactcttgagtgtcatcttgctccctaagcgcaaagggaagtctccgtggttgtttctcattttctattattgtcccaactctgcttgagtgttcgatgtcatggaaacgcactgctttttcccacaagtgtgcatgtgggtcttgggtgggaatggtgaactccgctggtgaggcagctggtgtgctcaagagccttctcctgggatggagcaggcttggagagaggagacccgtcgggggctgtgctgggctctgctgctccctgggccccaccctggtctgtggccgcccctgggccccgtcctggcctgtttctaaggccccctgggcccctttcgtgtggagatggtgtctcatggtgggctgcgctcactgcttccagaagaaattctgagaggaaagagctctgaccctggagagaagtgtggtgcttcgggacagcctctgccccagcctagtcctgccgtggattgggccacctagagggggccgcgtccctcctgcctgtctcctctgtgtttgggtgaatgatagttcatggagctggaagcagtgccttcttgtctgctttctgacaaccctgccacaaactcatcatcaggaactttttgcagccctcttccatgtggagtgggacttgtggccttgttttctgggcaggagtaagaatcacatggtgttgggaaagtcagagctgctcttgccttggggactcaggtctcaggttgtggctgtggcagcaggaccaccctgtgacacggctccttttctgtgacgtccttgcagggtgggctttgacagcgagaatcccggggacgacgggcagatgcacaaggggctgtcagaacggagccaggcagtcggcgcggtgctcagcctgctgctggtggcgctcacctgctgcctgctggccctgttgctctacaagaaggagaggaggtaagcgggtggcagggcgaggtggggcgggtggatgcatgcctcccatagctaatcttggggtcagttttgtggggttttatttatttgtttttaagccctacagcagcgaaggctcgaggttcttagtccaaaactctctggaagcagtccccagcgttgtggtttttaaatgcctgcatttctgtctgaccaaggccgaggccctcgcacatcacccgtgcctgcggcttctaggaccgtggtcctttgtgtccaaagatgagtagaacattaaacggcacctttcatgggtgccttttcccactgagcagctgacccctctgccctcctcacatcataaatgcaggagtttattaagcgcctgctatgtaccaggtatgatgccatccttttgcgccactttgctgggtgaaaggactctccatgtgacggtcaagcagattttcacgtcaggcgtcagtgttagtggctctgacctgggggcaggagctggccagctcaggcgttccctgctgccactgtcatttgccagctgagccacaggccaatgagagaggtggtcagaaagtaccaaccatggaggttgcagtgagccaagatctcaccactgcactctagcctgggcaacacagtgagactctgtccaaaaaaaaaaaaaaagtaccgattgtggccctctacacccaaaatgcagaatggggcagaagaaggtctgggccgggaagggcatgtgatgtctgtctctgcgagccaccattgggcaggcttagtggcgacggactggtgtggtcctgttagtcatgtgaaaaagtccttgccctaatgttaagttgctctagagggccctctgctgttggattccaaagcccatcttctttccactcaatcacaacaaatacattagggtatatataacctgtcacggctactcatttgtcattcagaatgtgggagaaatgcagccaccaccagccccctggtggtgcagatgggggtggggctggcgggggtggggctcctgcccatgccctctctacactggagtaattattgtctcctttttttttatagggaaacagtgataagtaagctgaccacttgctgtaggagaagttccaacgtgtcctacaaatactcaaaggtaattttctgtggcgagtctcttgaaggcctgcctccccggccccctgtgctgcgctgtccatgtcgttctcatcaggggtgccaaggaaagcagtcacaggctgactggaatccagaaaggaaagcaacacccgttgcctcagccacttacgccagcacatttttttgttatttttttccctcaagtttctctcgtggttacaactgatttccttgaagtatttaataattaggttgtttccactgtttttggctgttctttaaaaaaaaaacaaaacacacacacacacagtagtgaagatagttgtgcatgtagcatttggatgatttctttcaggtaaatttgcagaaaagaggcattatctggatcaaaggacataatgtttgtggtctcgatgggtaatgatgaattgctctctaaaactaggcttttgactggagtccctcctttgacattcctcccctgccatgcagtgggcacctttcagtctatgagtagcccggaagagccccttctcccccagctgcgctgggggatcactggtctgcttttcggtccaggccatcccgaacgccttctgcttggtcccacccttggctgtgagactcctgccaaatgaccccactgccaccctcccaaaccctcctgccttggtgcagtctcattaggaacaggaaggtgttgccagccctcgtcttcctttccctgggaactggagatgcagtgactgtgaggacagtgggccagttcttccccagctcgtgccagcagagagcatccctgatgtggtggatggtggagcagaatggggtctcttagggggctcacgtggtctctgctgttgatccctggcaggtgaataaggaagaagagacagatgagaatgaaacagagtggctgatggaagagatccagctgcctcctccacggcagggaaaggaagggcaggagaacggccatattaccaccaagtcagtgaaagccctcagctccctgcatggggatgaccaggacagtgaggatgaggttctgaccatcccagaggtgaaagttcactcgggcaggggagctggggcagagagctcccacccagtgagaaacgcacagagcaatgcccttcaggagcgtgaggacgatagggtggggctggtcaggggtgagaaggcgaggaaagggaagtccagctctgcacagcagaagacagtgagctccaccaagctggtgtccttccatgacgacagcgacgaggacctcttacacatctgactccgcagtgcctgcaggggagcacggagccgcgggacagccaagcacctccaaccaaataagacttccactcgatgatgcttctataattttgcctttaacagaaactttcaaaagggaagagtttttgtgatgggggagagggtgaaggaggtcaggccccactccttcctgattgtttacagtcattggaataaggcatggctcagatcggccacagggcggtaccttgtgcccagggttttgccccaagtcctcatttaaaagcataaggccggacgcatctcaaaacagagggctgcattcgaagaaacccttgctgctttagtcccgatagggtatttgaccccgatatattttagcattttaattctctccccctatttattgactttgacaattactcaggtttgagaaaaaggaaaaaaaaacagccaccgtttcttcctgccagcaggggtgtgatgtaccagtttgtccatcttgagatggtgaggctgtcagtgtatggggcagcttccggcgggatgttgaactggtcattaatgtgtcccctgagttggagctcattctgtctcttttctcttttgctttctgtttcttaagggcacacacacgtgcgtgcgagcacacacacacatacgtgcacagggtccccgagtgcctaggttttggagagtttgcctgttctatgcctttagtcaggaatggctgcacctttttgcatgatatcttcaagcctgggcgtacagagcacatttgtcagtatttttgccggctggtgaattcaaacaacctgcccaaagattgatttgtgtgtttgtgtgtgtgtgtgtgtgtgtgtgtgtgtgtgtgtgagtggagttgaggtgtcagagaaaatgaattttttccagatttggggtataggtctcatctcttcaggttctcatgataccacctttactgtgcttatttttttaagaaaaaagtgttgatcaaccattcgacctataagaagccttaatttgcacagtgtgtgacttacagaaactgcatgaaaaatcatgggccagagcctcggccctagcattgcacttggcctcatgctggagggaggctgggcgggtacagcgcggaggaggagggaggccaggcgggcatggcgtggaggaggagggaggccgggcggtcacagcatggaggaggagggaggcgctgctggtgttcttattctggcggcagcgcctttcctgccatgtttagtgaatgacttttctcgcattgtagaattgtatatagactctggtgttctattgctgagaagcaaaccgccctgcagcatccctcagcctgtaccggtttggctggcttgtttgatttcaacatgagtgtattttttaaaattgatttttctcttcatttttttttcaatcaactttactgtaatataaagtattcaacaatttcaataaaagataaattattaattgggtgttaccattttttccttgatagtgagacgttcccgagcgagttacccatctgcctgcctgtcttttctttctgttaagtgactgaatttgggttttaactctggtgttctcgttgaccctttatgaggcagcactttcatttttctccagagtctcctggtcgtaggtgttaactttgggtccaatctgccttcccttggctctttctagatccgatttctttaccttctccaggccaacctcggggtgtggtcctgttcatcaaaacaatgaacatggagtttagagtccagtgagtcaataaagcttttttttgtgcaacctgatctaacatggagatgttttctcttgagtaaactcactgagttttccatcttaaattactcagcagtgactgagagctacctgcatggaagcaggaagttactccagtgttataaacaaacttcttagactcaacatcctattctccatccctttttttttcctgtagagtccaaaaacctcaaccgtctcatttttaaattatccaattggagttacctttttaaaaaagttattcttaaggactttccaatacctctcctgaggaagacatgtcaggtcttctaaaagtttacattatgaccaaagaaagatgctggtcctcaggcattctacccagggggctgttctccaggccattcccacctcctgctaagaccatggggagccctctctgtaaggaggggcatatgcagggacctgcccatccccttggtaagctggatggcaaaaaggcatgttgtctgcaccactggctgcctgctaatgtcgctgtcagtggggaaggagaagtgacaacacgtttgagtgcatttgctttgactcttagaaacccaagcctctgaaaaaagagtaactacttgccagctgttgttacagatgatatttttaggaaaacatcccgtgacagcaaatcagaattggactctttttcagagaaatgattttattgatggagtacaacctgggtatttagcttcctttcaacaaaattttttgtgcccctttcttgagactgtccatgaatgacagagacatagaataagaactggggtgctaaagatggaataggcaaaccccacaccaaggaaatccacagtgaagtggaaatctggttcttatgaacattttaagagcatctgaagcctgtacttcaccaaccctaaaataatacgtaacacgagatgattcctcaggaaggaacatatagacatacagacaggagacaacatatagacattagaacttacaggacaaagaactctttttccctgaatcatttgagatgaagtttcttcccatcaccaggcattcctacaaacaaggaccttcacacgactaagatgccacctggtgattaaagaacactttgggctggtccgatccattgtacaagttaaagcactgatgggtacacaggtcttacccctgttggcgatcgggtcacaaggagccagtgtgtgtgtcaccaggaggttgtatggacgagactggatttctggaaatatcctttactgactctgaagaatcccatggctcagggaggtacactcatgtcctttcttacttctccggttccactctgttgactagtagttggcctcttgagccatacttgctgtcagttctggacattgttctgtgagaatggggtcaacgggcagtcgtggtgcaggtgagcttgtgtgcaaggcggcaagatagccacattgagttggggacagtatggcctgggggtgttggataggtaaggcagaagcaagcccagaacttggagcctgttgtgactgtcacagtaaggagtttgaagtcctgaaagcagttgagagctgtaggagggccagattgggcttttgagcaagatagtctagatgaaagtaaagagatggagacgcttcagcaaccagatgggaggttgggcatgggagctgtggctgtgctgagctgagaagcctcagactgcctgcgaggctctctctgggaggaagtcaggtctttctttccttcgtttccttcctttcattcctttcctttccttcctttttcctctttctttccttttctctctctctctttttctttctctctttctttcgagatggagtctcgctctgttgccaggctggagtgcagtggcatgatctcggctcactgcaatctctgcctcccgggttcaagggattctcctgcctcagcctccctagtagctgggattaaaggcacgcactgccacgcccggctaatttttgtatttttaatagcgacagggtttcaccgtgttggccaggatggtctcgatctcctgacctcatgatccacctgcctcggcctccgaaagtgctgggattacaggcgtgagccaccgtgcccagccaggtctttttcttaaagagggacagactgaaggtaggctgtgaatggtcagttatttgtatttctttaccttttatgctatcttgtagtttgaccagtttgcaaaacaaattgaataaaaagtaattgataatgttgttttgatgctcagtgtttgagggaaacacaatctagtgaatggggttattggttgtcacacctgggagagtgaaaatgaggggctcacaacccaggtgaggtcatctggtgccactcagccccatcccagagaaagcagccttgggatgctggcctcggtgacaaccaagaagtgatggtgggttgctagagacagggtggagcacagagccctggaaggaagcaggaagtcaggttcaagaaaggacttgtgacctcacccttggcttcagggttttatttttctttcttttaaaacattttgagacaacatgtagacattcaaacttacagaacaaagaactattttttccctgaatcatttgagactaagttccctcctatcaccagacatttctacaaatgaggaccttcacaggactaaggtgccaccatcagaaccacaatatgtggggacggtactgccagctaagccttagtgctgtttcggtgttgacagctgtcacaatgatgcccttttcagtagaggagcctgtgatggtcacgtgttgcaggtgatcattgtgccatttggtttacttctgtctggaaagtttctcctttctgtaacctccatgaccttgacacatgaggtcactcttctcacccgccccacctctgggagggtgcctgatttgccctgccccacccagcggctttaggactcagctcttcaggaacaattagggagagggcccttgggtctaactgcaaaatcatacttgaactagaaaatcccgttggcataggtatggattgtcatatagaaacatttttcgcagtgtgccccgtggaacacttgttctgtatgttgttaacagatgttttgcaaaaaatgaaaaggacctgagctctaataagtttgggaaatgctgaattgaagtgaaacagcttttcttggtgtgagacctttcagagtctttaaaggagagttgctgaccacacgtgaaatcacaatagaaaatggccagcaggcctccaggtaggcagcaattcctagacatttgcctgtgttccctgggggagctggtggcctgtgaccatccactgggaaattcccttctgtggcgaggttctgttgttttccagaggctcccacggagcatgctgggtgggtggtctgtatgagaccacaccgttgatgagcagtgaggcccaaacaggtatatcaaaaaatgctcagcatcgctgatcatcagggaaatgcacatcataaacacagtgagacgttgcctcacacctgccagaatggctactgtcagacgaaagacaacaagtgtgggtgaggatgtggagaaaagcgaacacttgtccacctttggtgagaatgtaaattggtatagccattatggaaaacaggaagttcctgaaaaaattaagaacagctaccaggaatcccacatctgggtgtatatccaaaagaaatgaagtcagtaccttgaagagatctctgcagcccctgttcattgcagcattattcacaatagccaagatagggaaaaagcctcagtgtctactgacaaataaagatggatcaagaaaatgcatgtatgtatacacacacacagtggaataccaagtcttgcagaagaaggaaatcctgtcatttgtgacaacatggatgagctgagagaacattatgctaagtgaaataagccagacacagaaagaaaaataccagatgatctcacttatatgtggaatctaaaaaggttggactcagaagcagagagtggaatggtggttaccaaaggccagagggtgcaggaagtgagcagatgttggtgaaagggtgcagaggttcagctatgcaacatgaatgaattctggagatccactgtgcagcatggtgactatgatactgctttgtgtatttaaaattttcagagagtagatcttgtgttctttcccctctccaaataaaaggaaattatttgaggtgatggatatgtttaactagcttgactggggcaatgattttgtaatgataagtatctcaaaacatcatgttgtacaacataagtatacaattgacccttgaacaatacaggtttgaactctgtgggtccacttacatgcggttttttttttctgtaaaagttacacccgatgcgtcagccccttcttctacctcttccacctctggcacccttggcacagcaagaccaaccccccacttcctcctcctcctcctcagcctactcagggtaaagacaaggatgaagacctttatgatgatccacttccacttaatatataataaatatattttctcctcatgattttcttaaaactttttctgtattttattgtaagaatacagtatataatacatacaacatcgaaaatatgtgttaattgactctgttattggtaaggcttctggtcaacagtaggcaatactagttgttaagttttaggggagttaaagttctatgtgggttttcgattgtgtgtggggtctgtgctcctaatccctgggttattcaaggttattctacataatttttctgtccgttacacctcagtaaagctggataaaagcgaaaaccaaaagactacgaaggctaggagaaaatcagtacatgccactccagcccccattctccccagaagcagtccccacttcttcccctcagctttgtcccctgtcagtttaaaatcatgaggttcataaatttgaaaaggaaagctttatttcttgtaaagggtctcagcctgcaaaatcgccatcctggcaggctgggaagtgtatccagcagagaccaaaggcaggtacttggagacggggaaggatgaggcaggaatttatgctgaatgggttggccaagcatacatattcaacaggtgatggggggagctatgaatattcatgacagggggacatgcacatgcattgtaaacattcctgttacatacgccccatgatcactttggggtggagacttaacatttaaatgcatttcaattaggacttatgtgtcaaaaggtgaagcagggacatgaacgccctcagtgcatgcctgggcaaactagacaaccagtccatgcttggtggtcttttaccaggagaaagtccctgaaatcaggctcttgttaaagctgtagttacagctggtggagaagggggtcagttagtctgcatctggccataggtggtgagctgaaattgttgccgtattgctgatctccaggcccctgcttatttagctgccagagaaaaagaaaacaaaacaaaactttgtggcagttagaacctagtttattttttaagtgcctgacttaactcttgcctggcatggccataggtcatgtttataatttggcatcttacttccacaaagagtctgttctgtcgtgttatgatctgtaattttaacaccaccaacagacttctctctccttcaggtcaaattctccaagttaaccttagcattgatgcagctgaaatactggagccattgaacggacacttctgacctgttcctacactatcctcccacctttgggtgctgaggtagattgctatgggttgaactatattccccaaaattcacatgttgaactcctaaccccagtacttcagaatgtgaccttatttggagatagtgtctttaaagagataattaagttaaaatgagatcatatgaatgggatgtaatttaatatatgtgtctttataagatgaggagattaggacgcagactcacacagaggcatggccaactggaagccaaggagagaggcctcagaagaaagcaaacctgcccacacctggatctcaaactcccagcctccagaagtatgagaacacaaattgtttaaactacacagtccatggtactttatggcagcctaagcaaactagcccagacacactcagcaaccttcccactgccagtcacacgatgcgcgcacatacatgctgggcactccccaaggccctgtgcctctgggagagtacgcagaaccccatgtcatgattcctcccatcggagctgaaggaagccagaacatgctgacctgcaacatgctactttagcctaaggattatttggcactggaggcagttaagaagcagcaaatgtatttgcctaaaagcaagacatacatttttcaaaagtgtctctccttccctctctgaacaagagttaatcacaaagacagctccagacaccgctcagcttggagatggcagcagaggtgttcacgtaaccatcctcactaactcgccttctctaccccaacctttccacttggtgcagacgccttcctgcagcgccgtctctggaagcttgaagtcactttcctgtgtcccagcatttctctacaaataaattgttcttagtgaagatggtacgtatgccagagcgtgaagcctatctttcaattgctgtttcctgaatttctctcatgtctatatgagatgtacatgctagaaacttgtttttctcttattaatcttttaatttttttttataggggccccagcagaaaacttagaagagtacacagaataggattttttccttctttacaaagttccgtgtaggaaggcatgagcatttctcttcctatcacaagtgtccatgccatggtgtgtccggaattggtgggttcttggtctcactgacttcaagaatgaagccgcggaccctcgcggtgagtgttacagctcttaaggtggcgagtctggagtttgttccttctgatgttgggatgtgttcggagtttcttccttctggtggattcgtggtctcgctggctcaggagtgaagctgcagaccttcgcggtgagtgttacagctcttaaaagcagtgtggacccaaagagtgagcagtagcaagatttattgcaaagagcgaaataacaaagcttccacagtgtggaaggggacccgagcgggttaccactgctgactagggcagcctgcttttattctcttatctggccccacccacatcctgctgattggtagagctgagtggtctgttttgacagggcgctgattggtgcgtttacaatcccagagctagacacaaaggttctccacgtccccaccagattagctagatacagagtgtggacacaaaggttctccaaggccccaccagagtaactagatacagagtgtccattggtgcattcacaaaccctgagctagacacagggtgctgactggtgtgtttacaaaccttgagctagagacagagtgccgattggtgtatttacaatccctgagcaacataaaggttctccatttccccaccagactcaggagcccagctggcttcacccagtggatcccacaccggggctgcaggtggagctgccatgcgcccgcactcctcagcccttgggtggtcgatgggactgggctccgtggagcagggggtggtgctcatccgggaggctcaggccgcacaggagcccagggagggggtgggagcctcaggcatggccggctgcaggtcctgagcccttcccggcgggaaggcagctaaggcccggcgagaaatcgagcgcagcgccggtgggctggcactgctgggggacccggtacaccctccgcagctgctggcccgggtgctaagcccctcattgcccgggccggcagggccggccggctgctctgagtgcggggtctgccaagcccacgcccacccggaattccagctggcccgcaagtgccgcgcgcagccccagttcccgctcgcgcctctccctccacacctccctgcaagctgagggagctggctctggccttggccagcccagaaaggggctcccacagtgcagtggtgggctgaagggctcctcaagtgccaccaaagtgggagcccgggcagaggaggtgccgagagcgagcgagggctgtgaggactgccagcacgctgtcacctctcaatggtacctgggctaaaatagacattcaggaccatgtttttgaacagttaggaaaatgagtggattttctgcatcaaattttcagtagttcccaggaacagttagcataatgggccacaagggcatgcagggtggtgagtggatgtggtgggggccgcctggatgacaggcctggcctggggctcctcatggccggaagtcagcctccctgtgttagctctgcccgcaggtcctgggcctcatctctggatttgtttgggagggctgccataataaagtaccacagactaggggcttcaacaacagaaatgtatgtcttccagttctggaggctgggagtccaacatcaaggtgttggcagggttgattccttctgagactgtgagggagaatctgttccaggttcctaggagcacagcgttccccttctgacaggcacaaagcaggaaacagccaaccctgggggcctgttgaggaggacagaagcctaggacacactgcggggccctgagcacagccccatggggaggggagtggcaggagcaggagtttccaccccaggcagctgccccctctgcacctgggaccatcgggtgggcagcaggcccagtgcccagtgactgacttgctcattcatggctgattttctcacacatatgtgcttccccagacctccatcatggcccttggggccaggactggtctgccctgtgtgctgacagccacttcactggcaggtacctggattcatgtacaaatctgggcctaaacccagctcttgccttctctctgtttccaggtgagacctgcctctgctccggctctggcagctggcttgatccccttctcctccctggccttagggggcactgagacctaggacagatgagatgcccacctggagtttgtgtctagttggacattaggtgaataggatttcagcatagggagttttggaaaatcagtccctggtgacagggctttgagtgagttgatttattaagacttgacatagagccaggcatgtgattctgggcagatgacttgcccccttaggccttcgtttctcatttctcatctgcagtacgtgggggtgagcagttccatcagatcaggagacggggctcagaaggagcccggcctgccatcctagatgctcaggatggtggcaacggcttgttctcagttggccatggccctcagtcccatctcccctttgcaattttgattgcctgggatgtctggtcatcccctcatggacccaaaccatggggctgggagacagtggaaaaggaaggatgcaggggtgggtacaggctcccttgctccctagtccaagccaaagaaaggaggcctgagtccattgagcacccagagttgggggcagctgctttctccatgaaacaggtgagcagtggcaccaggcttggcctggacaggccactggggaggtggtaccacagaggggcctggtttctcctcaaagtgtgctgaaagtgggccccttgcaccctggctgcttcccatccacatgcaggacactcgtgtcagggttgtgggcacaacagggccagcactgagtgtgcgccaccaccttcctctgggctggggagtgtctgcctctggcccacctccctcctgcccagggcatgctcagccttctgggtggcagcccccttgagccctctcttggcagcagctgagcatttccaaagaagaaaaccccccaggagtgggaattatggagctgcagcccccaaggtggggcatgcttttgaccaaatcagccagtgggtctactgggcttgaggctcagctgagagtctcagaaatccagagtatgcctgacaccatgggcctctgtttatctgtacttctatgtgcatgtggaggggctcacccccaatgccacatgcactcctaggtctgaaaatgggggagggatggggtgttttccaccttgcgccactttgatgccttccatcagcaactctgagccagagcctactggggcattacccctgtgcagaggtaactccctggcccaggttccctaggaacttgggctattgcaccatcagcgaggagtctgcccaggggaggggaggcagtgagtggcacctgtaggagctcgggtaggttctggagagcacagccatctgggtcattgacaaggtgcaggcaatgggcctgctggagagtgctgggctgctcagtgtggggcagggaggagccctgcagctgctctgggattcccaggagcctgaagctttcttgtctgttgccgtgacaccatgtcaccacaaactgagctgcgtaaagcatgcacactccatgtctcctgggctctgtggtcaggagggtagctgcagggcagctggatgttacattcaaggtgttagctgcagtggtggcctcgtctcaaggctcatctggagaaagatttgatttggagctcaagtggatatcggcaggattcattctgtcccacttcaggaccaagggtcttggtttcccgctggttgccagctgaaggtacccacagctccttgccatgtgggcctccaccacagggccagggctccatcacagccagcaggggagagagactctcagccatgtggatgttacaatcttaaggagcatgatcatggaggtgtcatccgtgacacttgccatttccattggttacaggcaagtcacaggttctgcacactcagctgagaggtgaggatatgtgggccactggacagccagtctgctacaccctctggtcttctttcttgtctcctgctcttccctccaccttgtaaggcactttttggatggtaggactggttttggggtcctgtggtgccccatgcctgctgctgtcccagctttggtgactgtctctttgttacaggacctttgaggtgtcaattttctggctggaaacctctgtggtcacggtgcctttgcatgagctcttgtcctgcgtccaggaagaataagggacatagacaagtgaagggtgagcaagacgaagatgagctctattgagtgttacaacagctcagaggacacctgcattgggtagctcctcttctaggcaggtcatctgtcgagtgttcagttctcagtagagaggaggcccaggagaggtagctcctctctgcaactggtcatcctgatgtttgcagctctcagcagagaggaagccctggagagggtggttcctctctgccagcaggttgtcgctgcagctatcagcagagaatgtggctcctctctgtgggttgtcccatcatctccagctatcggcagagagggtactcctttctgcagctggttgtcccatcatctctctgccctcttcatcctctagctatcctctgccctgctctggctgagtccagggcttttatggacctcagaagggaggaagtgcatgccagttgttctgtgggtggccatgggtgggttaggaagaggcaccacaagtccccactctggtttccgggactggcagcccaggccccagccttcaggcccttcttggcctgaaggtgggccttactagggacacacctccttcttcccaggactctgtctgcctcctgctgccattcatggccccaggtctcaaccccaaccctgctctgagatcggagcaggtgctgggatgggagaggggccaggcagtgggagcagactcttctgagcctgggatggggactagtggggaggccttcccaggcccctgaggttgcaggctgcagagatgcccaggtcttgtgcctgggagggcagccacagctgcatccacggaactcccaccctgccaactcagaaggggtggggttcctgcttgtccctggctcctgcctgctctgtggagtgagaggcccaggtctgcagccacaggtcaggtggttgcagctgcatccaggcaggcagatctggcctgctgctggccccctccaagagcacaaggaggcttggatccacagtcccaggagggtggggcttccatcagctccgtggagtgttcagccccagccacgcctccctgctgctgccatcatttccccctctgaagaggtacacctaactgctgttagggtagggacaatgaccactcttaactgcttcgtgctgaccagggatattgttttgggaaaacaacagtcaagtctctctcagagacctatctaagaatatccagtacaaggcagccatcatctgaggctccattttcatgaccatttggagtttaacggcccatcccttgtttcttctgagctgtagtcagatatcactagttggttcaccttcacaattgtcaaaagctacaaatagctcaaaagaaaagcttccttgattctgaaaaacaagataaaggatcaacagtattccaagcaaaaggtcaaaacaagattgcttcagtcttctattagttcagctcacccagtcaactcctattcacaatctccaaaattatcagaaatctgcatttgaagactataatccatcccttgaagaggatcaaaacatgacaacaattgtctgtgaatgtcaaaatgtcctagcgtattcatagtcaaaaacacaattgatgaagaaatctggtcacctctgtgatttacaataacctaacacaataaccctagctatgattgataacacaaactcaggcatcagaaatctagaaatcccatacaattttgaaacacacattaacatttttcactaaaatataacctgaagatcaaacaccttattttggtaatcctatgtaactaaacttgtcaaataaccctgtttacctctccctttcgatgctccaggtgtcttctgtagcatccaaaactcaggggttaggaaagaaaattttgaagctgtaaaggctcaaaacacttaacagaatttttggttactataagtcattcatttaaatgactcaaagcaaaaaccttcagtcactaagagggaagacctaattttccaaacaatctaacttttaaccatcgcactcctttttaagaagtccttttaagtctcttattatccaactttagccatgccaaatggccagttgaattcatggaggggcagagaatatagtgatttttttattgttcctgcaaccagtttgcacagagagagaaaccaaaagtctgactggtaagaacttttaccctttcgccagcatgtcaggctgctgagctcccttcccctcagctatggagccctattgaccctggagtcctgttgatctcttgtccttcccttcttgtgtcagtagcttattcacaaagaaaacaaaatctttcattgcatgaaaatcttgttcaagtgaaagccaaattttacccttacattagtctattaatgtcaaccccaattaaaaaaaataaaaccttacagagaaatccatccaatcttaatcagtttgatcatgaactgagattgttataaatcttttataaccttttacaaattttttttgttaaacagcatgtaagtgcttcaagaaaaccttgttgtgcttgtattccattgttcaacttatggaaaaccaaataatatcctttttagtgtagtcaatatgtttacacacaggattccttttacaagattaattttttacaaaccttccataacttgtttgaaccttaagctttatcttatataatttaaaacaatcatttaaccctctgaactaggcaaaaatttacattcccatgccttcttatattattttactaatgatacattttactctccttactcacctcacgtgtagatctgttttcagtagtcatcactacatgttataatggtagctcttagtaattgttaattttggtgaaatacccagtaagttattttagttacgtacttaggtgcagatgaggtctaactatttccagcatagctagggcaggccctaccaaactgcaaagcaggaaagttgaacaattttcaaaagccaaagcagtttatgaccttaaagcatttagtcaacctagtttctgacttgcataatttagaccatgtctatattttgaagacatttctattttcattttactgataatttaaaagacagcctatttagcaaagtcatacttaagtgaatttgaaaattgcttagacttatttacttaatttatgaacactcttttacttataagccaatttggtagacacaacatataacagtaagtgtacatacaagtaaacacatctagacatgtatacacacacacaaatgaagaggtggagcttaaaacacccaaattgggtgcagtgtatactgcttgggagatggatgcaccaaaatctcacaaatcaccactaaagaacctgctcatgtaaccaaataatacctgttccctcaaaacctatgggaaaaaaaaactaaaaaaaatacttaaatggtatcacagaactaattagccgaatacagtatctagtacctggctgtcacccaatacttgcctcataccatcacatctagaaaacaagtagatattctttttggaagagccctgagggagctactaggaggtttgcacggcctgctctcctgccctcttcttgctctgtggctgaacttcaattctcttcgggcttagaccccactgactcgctcccgggcaaagcaaacgatttgatcagatggccacgtgcattcttccttttcctgaaaccagcaccatagggtaaaagattatttctacttggttgccttccagatgtttcacacttggacagcaaactgatttcaaaccactccttttcaaagatctctgagggagacattgcacctggccactgcagcccagagcaggtctggccacggccatgagcatgctgagccatcatgcccaccgtggatgacattctggagcaggttggggagtctggctggttccagaagcaagccttcctcatcttatgcctgctgtcggctgcctttgcgcccatctgtgtgggcatcgtcttcctgggtttcacacctgaccaccactgccagagtcctggggtggctgagctgagccagcgctgtggctggagccctgcggaggagctgaactatacagtgccaggcctggggcccgcgggcgaggccttccttggccagtgcaggcgctatgaagtggactggaaccagagcgccctcagctgtgtagaccccctggctagcctggccaccaacaggagccacctgccgctgggtccctgccaggatggctgggtgtatgacacgcccggctcttccatcgtcactgaggtaaaaaagcctctgtaacatgggagttcctgggacagggagaaatataaagcaaatcctatgaagttcagttccatatcaggaaagaggtagggggctatgtttattgtgcagttcgtgggtgtctggctgtgtcccaggcacggggcattctcttctctagtttaatccaccacaaactctgggtctttgaggaggaagctgaggcaggagagaacagctagcacaagtcgggggccaggttgccaggttgcttgaatgggagttgactgggagaccaggagcctctctgcctgccccactggcttctcccagaactatcaacttgctctgggtcccgcttccccaccaatagtactgtgggccccctccttctgctcaagagtgatgacgattgacctcaatgatggtgttgaggtggcctggaattgccctggcttggaagtgagaatatttggtggaatcccagctgtgccccttattagctgagcatcactgggtaagtcactgcctctctaagcctcatttcctcatcagtcaaccagggatgatgacggctgcctcataggggtgtgagcttcagctgggatctgtgaaagcactgagcaaatccaaactgagtcacaccgtgcagtccgatggggcccatgggatagggcgatggcctcaaaagggccttgcttgagtagtttacttggttatttgagcattttgctttgagaatcctttagtaaaaagtgtcaccacatttttttcccatcatgagcccttttgaaactattgcacggtaacaagtgtggatgcttggtgggttggagaagctgtgggccaaagcccgtcaggggccttctgttagtaacgagcagtggcgtggttttggtgcaggcactgcttccctgaaataagaggtaactgggccctccctgcctctggtcctgcccacttgtctgcccccactaccctcgcccaagctctccggacttcttgggtctctgttcttcctcttttccctttcctgagtggtatcagcggtgacacatttagggctattactggaggaaagcttagggtccctcccctctgggcctgagcattgctctacctgcttgcctggagcagagcaggtgccggtgcaactggctttacgatgctgaagagacatcttgtctccaaggcatcctccaacaatggatgacaagttaggcagcccaccttccagggatctccaaccatctgacattcccactgggaatctagaagcagaccaggatgaggatgtgtttgctctctgggactgagacatactctgctttgaggagatcagatgtgatcattcctccagtcagacatccacccagtatgttcggcatactccctctattctggcactgggtgtgatgccgcaggggagatgcagaagaagattgtgaggtccctcaaggagtctgcagtcttgtggggactgagaggggaagaggatggcaagaatgagaccagtgttcgtttaatgacagcccaaggccgcctgtggtgaatgccatgagcagggcggaaagggactggtgggctctaagaaggtagagatctcagctgctgagctctgagctgatcatagacgtcttctgggaggaggtggctttgagctgagcctcagctggtatttggaccagcaaggagaggggacaggtggagtagaggggaggggaagtagatccccagaccaaggggagagcttgagcctaggctcagggcccagggagtgtttgctgcattcagggtgcaaggagcactgatatgagggtcatgatatgaggagttgtggggagaacactggtgtctaaccttggggccagaacacggagtgcttagtgtggggttgccaggtacaatacaggatgcccagttaaactcgaacatttgaacttcagataatccaactggataggatacttacttcccagatactgcatgatatttggtactgataactgagactggaaatgcaaatattgcatgaacatacttatcctaaaaaaaaaaaagttgtttatctgaaattcaaatttacctgggcattctgtatttttatttgtgaaccctggcaacgctaccttagtgcccaacaaaggagtttgggtcttatttaggcaggcaagcaaggtgaccctagctggactcgtgaatgggtgggaaggggcggtggtgggattggaggcttcaggagaggtagagagatgcatgaggaggccaagagtgagccccggtaagaagtgttggccaacatggttgtcatgggaatgaagggaagacaagatgtaagagatgccagcattgtcagggctggggagaaggaggcccagcttggcggagggctctggcttggggggtataggcaaatggagcttctgaacgctgaactgggagccttggagaggcagccatgtgggcaggtagaggggcctggtaagaggggaccttggggtgcagcagaagtggggaggctgggacagagaggggcccgagagtgctttagaacagcttgcctgtccgtggcagctgtggagggggcttccaataaccccaagatgtagagccctggggaggattgtgggaatcctggaactctgatgggcagagatggtgaagaggatatggtttgtattgtacctggcaaccccacactaagcactccatgttcttttggggtcgtggtaagttgggagggtggtgggattcatgtggagattttccaaggtgattggaagcctgggggtaggtgggagggtgatagaaactggctcgtgggtaagaattgtctcccactttaaccccaacttccttggccccagctcctcctccaaaactgaaaattattgttggggaatcaatcttagttattcatttctgcagaactaatttttaacctagcattgccttggacattggaacttgctttaggagggaaggtgagctaatctgttcgaacgccaagtttaactcccactgcaaggctaggtgctaagatcatgaggtccactcgggggggatgtgggcattttcctggcttttgactctcccaacaagaggatctcctctggtgctaagatcatgaggtccactcgggggggatgtgggcattttcctggcttttgactctcccaacaagaggatctcctctggtgctaagatcatgaggtccactcgggggggatgtgggcattttcctggcttttgactctcccaacaagaggatctcctctggtgctaagatcatgaggtccactcgggggggatgtgggcattttcctggcttttgactctcccaacaagaggatctcctctggtgctaagatcacgaggtccactcgggggggatgtgggcattttcctggcttttgactctcccaacaagaggatctcctgtggtgctaagatcatgaggtccactcgggggggatgtgggcattttcctggcttttgactctcccaacaagaggatctcctctggtgctaagatcatgaggtccactcgggagggatgtgggcattttcctggcttttaattttcccaacaagaggatctcctctggtgctaagatcatgaggtccactcagggagggatgtgggcattttcctggcttttgactctcccaacaagaggatctcctctggtgctaagatcatgaggtccactggggagggatgtgggcattttcctggcttttgactctcccaacaagaggatctcctctggtgctaagatcatgaggtccactcgggggggatgtgggcattttcctggcttttgactctcccaacaagaggatctcctctatcagtcttggtttcagccacagcccccacaccaggccagctgtcttccaccagccatgagtgctgagcaagggaaagtggtctcaggccaagggagacagaggtagttacattagtgtttctcaaacttggctgatcctcaggatcacctggattcctattcgggacccactgaggcagaatacacaggggaatctgtggttccaccaggaccctgtgtggttctcgtgatgaagcagtaggttgctttataatcgtgccggaaagagctgccccggccctggtgaaatcccagcaggagcagcgagtgggcttaggagattcccatcctccatcccgtccctacctttatgcagccccagcttctcccagggcccagcctatcttctcaaggtgcacaaatgtgtcagggtactcatggttgggctggtgtttgggagcagaggaagcatggcaggtttacaagctttgcaggtggctctagaaactgatcctcagggtagcctggggcagagccagttctctgtgtggatgagatgttggaaggtgggatgcactccagctccaggagctcactggttccatatacagtcctggggcatgatggcaacagggtgtttcaggaaggcggcaggcacatcttacagagataccaacttgcaaagattataataaaaaccagacaaacaatggctgagaagggaataagccgaggccccaggtaataattccacatctttccctgacccctgcaacttgagtgaaatcctgtacggcagaccacgggtgaggctgcaaagagagagttgggcagttggagacacaaaccctgggaaagccagataaggacgtgtccacgtgtattctaatggcagagcacacggcaggcaggaaaagaaccacagccaaaaagagttatacatcgggtgggtgacctgggaggcgctccatggagaagctgtgttttaagctgaattttagaggaaatcaatattgggattggcagaaaacatgagagtgacactgagcagtagcttgtcgcacgccccagagctgtaccacccataggagcagacactggggtctgggcagaaggcagttactaggagaggcttgtgtttgtttctgaaactcaggtggtaacacagagtttaacctatatttcagggaaaaaaaaaagtgctcatgtcaaggaactagtcagtccatcagacagaacccaggctggctgagttcagagtccttgaggctttgaatgttgtttggtttttgagacagggtctcacactgtcatccagagtagagtgcagtggcttgaacacagctcactgcagcctcaacctcctgggctcaattgatcttcccaactcagcctcccaagtagctgggactacaggcacatggtaccatgtctgactaattttttaatattttgtagagatgaggcctcactctgttgccccagcctggtctcaagctcctgggctcagacgatcttcctgcctcagactcccaaagtgctgggattaaggcataagccactgcacaaagccagttctgaatgtttgaccccaggatcggggcatggtgtggctcaaactggcaactttagagatttgagggttggaagtgggggtaataaaacctgtttctaaaataaaagggtttattatttattaaagctatctgcatgtgatttctcccctccaatgcacccagcagccctatgggtgtgatggaatgggtacaacacacgtttcagacagggaaactgaggcccagggctgtgaagtgactcactgccatcgtactccacagtattctggttaggggagccatggacttgatgcagacaaagcagtgtggagggacgggggcaggaaggatgtgtcgaccacccaggaggggctgtaccaggaactgaaagggtcgagaggcctccacccaacaccctctgttctccccagagtccactctttctgcctgtctcaactctaaagaggaaggggccattcttctgccctccagcctctaccatgtctaggcatgtgccagcatcaccatgctctgtgctatgggaggtaggactcttggatgtccctccactcctggttttcttccccaaggcctctaaacgcagggaatatctgccttctccaaaaacccaaacaaaacaagcccttcccagcagcccatgcctgtcttttcctctgtcccctccaccttgatatcttccctcccctggcttttggtgcatgggagcctctgatgtcctcctaacctttggtcccacccacatgtgaccataaggcacagtctatctcaagaaacttaacaactaatagcttactattgactggaaggaagctttgccaatcacataaacagccaatgaacacatatcttgtatgttatatgtattatacactgtattattacaataaagtaagctagagaaaagaaaatgttaagaaaaacttaaggaagtggaaaaacatcacgaagtggaagtgaatcatcatcaaggttttcaccctcatcatcttcacgtggagttggctaaggaggaggaggaaaagagggcttggtcttgctgtcctggagggcagaggcagaaaaggtggaagaggtagaagaagagacaggcacactcggtgtaaattttattgaaaaaaaaaaatctgtaagtggacccgcgcagttcaaacccatgttgttcgagggttagttgcatttgatatttgctgagtgattcatcagaaactttgaatttgtcttatgaaaatgtagtaggagaaaactctgtgaaacagcccagggataccgagtttgatgaactgcatttgctttgctgaagagaggatggaagggtgtagtcctgactcacacatggttctgtgcttttcgtcctcctcttgccgtggtatgactggcagttcaacctggtgtgtgctgactcctggaagctggacctctttcagtcctgtttgaatgcgggcttcttctttggctctctcggtgttggctactttgcagacaggtatgtaaaggccagtccaggtaagcctcctctgaatgtcatgagaacagattctaagggcgaatctgttctcagtggtggagaacatgaccagttggaattaactgcagaagctgctggagacaagacacagtggcccctgctttgggatactgtggggctaccaggggagtggtggagagatttgaggtgtgtttcagagtccaagctgcatgcagattgtacagttagtgggctgagagaaagcggggacacagccaagattgatgcttccagcaggtgcctggtcgtgaggccattttgagatgggatgcagagggttaggaagggattttgttgcagcggttgataggggagaggttatggaggaaactagggctcttagagatgttaggtttggagatgagttgcacggcctgagacatctacgaagagatgccaaggagccacttgggtatgtgagtgagctctggaaaggggtctgggctggagttcaatatcgggggtttgtcaccagtagttggtatttaaggctgtacagcatatcaggatgtgctggaagagggtgtcgagagagaactgcaatgcagaaaggtaggcagggaaagtgccctgggaaaggagacaggaaaaatggcagcgagatcgaaggacaactgttctccagggcgcttgtggaaatgcaccaggagaccacgaggaggagtggtcagaatctgctgtggggggcctggcacccaggacagggtggttggagaaaacccgaaggcaggagagtggagttgtgtgaacaactctttaaaagagtgtggggagggtccaggatgaggaggctgataggggagggagtcagggatgcaggaagaagacaggggccagggaacccaggcctggctgggggtctgaggcccagctcagaggtggagacagagagaagggacagagagccaggtgctgccgcaggagacagggagaggggacagagccaggtgctgccccaggagacagagaggggacagagccaggcgccactgcaggagacagggagaggggacagagccaggtgccgctggaggagacagggagagaggacagagccagtcactgccccaggagacagggagaggggacagagccaggcactgccccaggagacagggagaggagacagacccagatgccgctgcaggagacagggagaggggacgaagccaggtgccgccactggggctgagcatccctggttagaagacgtgggttctggcagaagttcctatgttttcacaaagggcaagggtttactggccggtttggggctgtcctgaggcggggtggaggtctgaggccaggggacacaaggtggacaagtgaagtggcctagtggaggcagatgggggtggcagaggggacgggggcggcaggcgggtggggagcgtgggtgggcgggcacactgcatggtctgcccttggcttctttccttggctcttggagaacatggggtgtggtcaaaaaattgggtgggaacagtgcaatcccagcgagtaatttgcccatttcattcccggaaaaaggagaagagaaacagccctgtatggctacactatcagagctgaatatggcactgaaaagcttccatgatggttgataagactatgggaggaaggaagcctggtttgggtgcagcctgaccagtggcgataataatgatgccatctgctaaatatgaagataaggcaaggggacaggcgtgaactggagagggtctgcgggcactgcccggctgagctgtgatgctgctgggagcgctcagactcctcttcagacccggaagggctgcggagcttgttgggacagatgagcaggctgggcggtgcactgggcactgctgtcctgatagaccctgcagtctcccaggacagtggtgcggtggcctccgactgtgacccttggcatcccaccatgcatgtctgaccccagatttcaacctctcccacctgccctccatgtctccttctctctgaaggtttggccgtaagctgtgtctcctgggaactgtgctggtcaacgcggtgtcgggcgtgctcatggccttctcgcccaactacatgtccatgctgctcttccgcctgctgcagggcctggtcagcaagggcaactggatggctggctacaccctaagtaattatcatggggatgaggccaggtctcagggtagaatgggatgggcctaacgtgggtagggggttgtttgtggggtcaaggagcttgcggggcaccagttccttgtatttatgtgactagggcaggacatgggctagaatggcctcctctctttttgtgtctgagacacttaaattatcacttagattactgacctattaatcaactaatctatttggggaacaaaaagaccccatgctgatgtgctcacagcagtcaggatggggtgcagaagaggagataagtgagagaatattctagcattttacataagaaagaaccagcaactccttaaaataaatacagcaaacttgacgggcttgaatggcactcaagaattaggaaagaaaacaggagcaaataaaataaggattgtgaaaatcaggattttgaaaaagttgaagtataaaccaacatgaggagttttacatatcagcctttttttccctttcaaatattctaaggttaagaatacaaaacaaaaaaccctttccgggaggaatgcagcctaagagtcatctgtacttccccaggccagggcacggcagccagcagtgaggatgagccacacttttactcatttgtgggggagaaaaaagaaatagcctgtcttttcatctttgaaaacaaggtgctatcacttggcattctgagaactcattcactagggccaagaggatccacgttcccgccttgagaagccatgagcagcctggtgaagctgagctggctcagccccatgcgtgtggagcctgtgacagcctctgctgctaggcaccgtcccacacatggttagggggtctgacccggggccacatccacgctccaacaccacccgcagcccctccacccacgactcccctgacttccttttccccttttcatttttgttcccgttacacgtatcacgctctaacataggattgcattctcttatctgtgatgtggagcgtctgccaaatgaggtctcccagggcaggactctacctcctatgcttaacgatgtgcctcagacaccccgcacagtaccaggtccccaggaggcactcaaagatatttgctaaatgaatgaacacccctggggtcctgacaaatattccagctgagtctggagcttctcgaggaaggcgttggggaggagaggccagtggactgagtcctgaagcaggcagaggggagtgcagatggtaaaggagcagacgcggaaagcgacggtcagggaaaagccagagagccaagcagcctggtggatctccggggccttggtttgatgggtccggggccccggtttgatgggtccggggccccagagagaaggggaggcgtgagcgcggctgtggtttgcgggaaggagaaatgggagacacacaagagagaagcctgggagcaggtgaggctgggcaaggccgggtgggagcttcccgcggggagacaagctggactggggccccgagcttctgaacgcacggcgtcgggctcctgggctcctgcaaggaacccgcataacgtccacacctcctgtttcagtcacagaatttgttggctcgggctccagaagaacggtggcgatcatgtaccagatggccttcacggtggggctggtggcgcttaccgggctggcctacgccctgcctcactggcgctggctgcagctggcagtctccctgcccaccttcctcttcctgctctactactggtgaggcccttcctcctgcctacggggaaggggcgccggccacccctctggctgcgctttctgtcctctcgagggaccagtctcttggagtggggggcgcctacaggccgtcttccaaaggccatggtgtccacatgcataacgcatggggctgcgcggagcccggcgcttcccacactcatgacgcatagggatgagctggtcccggggtttcccacacgcatgacgcatagggatgagctggtcccggggtttccgacacgcatgacgcatagggatgagctggtcccggggtttcccacacgcatgacgcatagggatgagctggtcccggggtttcccacacgcatgatgcatagggatgaggggagcctggggcttcccacatgcatgatgcatagggatgagcagagcccggggtttcccacatgcatgatgcatagggatgagcagagcccggggtttcccacacgcatgatgcatagggctgcacagagcccggggtttcccacaggcatgatgcatagggctgcacagagcctggggtttcccacacgcatatcgcatggggctgcgtggagccagcgcttcccaccacttgtactgttcaggttgttctgttattaccaggcggcccaggttacatgtggagctttcctcagacaaagcctctttagataggttcccccagataaaggtgggccatgccaagagtcggacagaaatccaggaaaactcagggcctcagcatgtgcactttccagaaacacaaggctgaacctcactcccgggtgaaggaggcagctttttgagggttgctcagtggccttgggaaatctgtatcagcgtccagtggtaggaaaggctccacaggtggcaatcccactgcaatggctaccactcccgagagtcccctagagtccgtcccaggggtgctggcatgaagtcagatgctctgttatcttcttgatcctctccctcttccccctcttctcttcctctctgctgtcatctctgctcttctcccacttcttcatttttatagtactattggtattattattaagacactgaaatacctctcatctagccatagagcaggcatttgatcttgattgaatgaatgagtgacagaatgaaggaacaacaggcctgctcaatgcaaccttctctggggactgtgtaccctgagccattatgacacagaatcagtccaaacaaggtgttaatcatattagctgtgagtgcttcgcagagtctgaagggcaaagaactccacaggtcagtttttattgtggtggagggaagagggggtagcagaaaggtccacagagaggaatttctcatccctccaccttttgtcttagttttgctgagagcagacctcatctgtgggtggcactagagttaacccagtctctctaaatgaaagagttgtacacgtatggccagggagttctgaggagcctgcccttcccctgcctcgtccttgtgaaacagggatctctccagcagaaaggcaaattctgcatgctcaggcagggtgaggcagtcaatgccggccagctttcagaagacccttatgccagagaggcccagtctttgagttgtaccctcctcgtcccatttgaaatagacagcatggtgttgatttgattttaaaggacagtaaatacattttattttgtttgagaaatattttgagaagtgttcaacagcccttgtattgcctggagatgtcctggtgtcatcgggtaatatacatggagcatctgctctgtgagtgttttccgtgggggacaaaggctgccccaggagagatgaggcccctgctgcacagaaggaaggctacataggaagcgatggctcccttttggtctataaatcttaggtgacactaggagtctgagtgacccacagagctgtgacctgggccacatgggctagcgcacagtgaccccaggtcctcatcctcttgagggattacagccccaacgtggggagggcaggctgcactgagcaacagcatcaccccgctcagggctgaacgtcagaccgaggaaaatgccagatagtgatgagtggtgttcgcaggtgtgtgccggagtcccctcggtggctgttatcacaaaaaagaaacactgaagcaataaagataatggaccacatcgctcaaaagaatgggaagttgcctcctgctgatttaaaggtgaaatctaggaaggggtatctcacatcactgaatctggggctgggttctggtgcagattcgtctggggctgccaggggaaagagcagaactgtgccccttgtcatgggtgtgaagcacggtggtggcaaggctcacctccccaggggctcccaggtggctctgctcatgacagcgtgagtgtggctgatgctctccctccctcctagatgctttccctcgaagaggatgtcaccgaaaagctgagcccttcatttgcagacctgttccgcacgccgcgcctgaggaagcgcaccttcatcctgatgtacctgtggtgaggggcgttcctgtgcgtctctccaggcagaatcagcacgctcgcccaagcactgggctatagattagagacagtggaatactcaggtggaaaaagagaaagggaaaaagaattgtaatatagttgtgagtggtcaaagagctctttttgtttctcccttggggattgaataataaggaaaaggcttcattttagtgaggagcatttgttacctttgggagatcaccagtgggatgagagaaataggataaagggttatcggggctgcctccgttccacatggtctcatcttctgggaatagccaagtcttgactcggcgtcagaaggtggatgagagctcctggagcgttcgaggaggaagttccattcctcatatctaaacaccctagagaccctacctgagcatctctgtgcatttgttacctattgactagagaacgcacacccacatggacccacgcacacacgctttgcacattccaggggtctgcatgctcccccagctgctgtcacgagcaggaatcccctgccctgctccctaggaggatgctggctcacctcctccgcacaagggctttcccctcagcatacagtgagggccccccaactgcactctgggcctggccccttcagcgggagcagctccgctacccaggcacacttgtttgctcttctatgtgaggttttattggaacaaagagtttgtagtaagtcagtgcctggcatattgcagaccctaaatcaatatttgctgaaagttgaatgagtaaacactgtgccccagaatctgtccaggttcagtgtgtcctgtcctgcctcaaccttcaccctccctgtctccgagtttgccgctggggtcctgcacccagccacatgctgggcccgtgaacctttgcaaatagccccatgtacctggtgggtttccatggatactcagtgttgaactcagcatggaggctgggactggccgctgcagtggaagtaactgcccgctctgctacgctgttcagctcccctccccagctccgagactccccacaaggcagtgttcttgactcttctgttctgttacccccacatccagtcctctggcaagttccatcaactggcttggaaatgccttcagaacctgctgcctcccatcttgggcaccctgggttcccttgctggggttgtagtagccctgtccttggcactaattctttgtataaatgtcagctgtctcatggacagttctgcagcatctcttacctgcattactgtaggcaccttctgggtggcctgctggctttacccatgcccctcggtgctccacaaagcaggcaaaggcatcccttagagctcaacagaccttgtctctccctgtttaccctctgctggcttcctaatcactgagaataaagccagatccttttctgtggcccacaaggcctcacgcctttggcccctgaacgcccttttctactgtcctgctggttgtcatgactgagactcgaaaggtctgtccaccatgtcctggctgtgtgaccttccaaagggccttaatctctccgtgactcaatttccccctcagtaatgggagaagtgatagtacctatctcacagatgtgttgggaggattaaggagattatatgtgtaaatgacatagaagagggtacagcatccatgcaggaaatgttcaatgtcaatgtggttttttttgttattttaatacacacatgcaattcatgagctctgcccacaggtggcagcccggcacatttgttaactggcttgttgacaggaaaatcaaggttacacgttcctttctcttaaaccagtttctttatcagtaatatgactgctgtctttaactggctaaatggtacagaggcactcaggctaacctcaactccttgagttgcaggcaagcaccttgtttcttgttctcttgaccctttgtccaatcaggaataatttaggactagaaacaaaagcatcccaatgcttctttaggcgaaattttatcaaagaaggatacattccttagcaacatgcattttcatctcagttttggagctgataggcaatctgcatgctgggatgagacagtaatttcttattgacccaaatctgttctcacaatgtaaatatgactgtaaaagctttctagcttccaaatgatattttccccccgaagtgacacatgaggcaccctacattttggctcaggtgagagtgatttagctaggcctcgggtctgtgtgccatatgctgtaatgttgctacattttctcaaatatggacggagggggtgtgcagtgaatggaagagcgtaggtgaatcaatagcgcccactaaggacagcacagtaaagggccgggaatgccatggtgcggttggaaagacctggcccatgcctctgtctgttgtgccctgagtcttctgagtgccctgagtgcatactgtgtgctgggaactataattggcacttttgtacgctaattcagtgagtactcaagacaaacagatgtgggaggtactattacaatcccatttacagacgagggaactgaggcccagagaggttagttaacttcctcaaggtgacacagctcataaagcaatccgacacctggccccttacttcctggtctctcctgcccacctcctcgtaggcctgttggggtgtcagatgaggtacgcacgtgcagggcttggtgcagaaccagacatttaaatctgcagtgaacagtagccatcctcacgtgcagtctccaggagacttggaggcatatcctacaagtcagactctcacatctatcatgaaaaaaatgtatcattggggcccttctaggacactctttctcatttttactcccctcttctcatattgctctagggcattctaaacccagtgattcatgctctttctccatctgcgaggggctttttttttttttttttttcttcagtctctgactcatgcctttgacttgaaacctcctcttggctcaggttcacggactctgtgctctatcaggggctcatcctgcacatgggcgccaccagcgggaacctctacctggatttcctttactccgctctggtcgaaatcccgggggccttcatagccctcatcaccattgaccgcgtgggccgcatctaccccatggccgtgtcaaatttgttggcgggggcagcctgcctcgtcatgatttttatctcacctggtaagttgtctgctttcatcatttcccaggcaatcgaagtgtggggaaagtgttgtgactctttgataagcctctggaatgagaacaaagatgaggtgctacctttgtctacaaagtttttttagattttaaattgaggggccgtgcacagtggctcatgcctgtaatcacagtactttgagaagccaaggcaggtggatcacctgaggtcaggagttcaagaccagcctggccaacatggtgaaaccccatctctactaaaaatacaaaattagccgggcttggtggcgggcgcctgtaatcccagctacttgggaggctgcttgaacccaggaggcggaggttgcagtgagccgagatcgcacactccagcttgggagacagagtacaactccatctcccaaaaaacaaacaaacaaacaaacaaaaaaacccccaaaaacagcaaaaaaaaaaaaaaattaaattgagttttaacatacatacaatcagcaaactataagtgcatgactccatgagtttttaaaaatgtgtacacccgggcagcatgatccacgtaaagatggggaacctttccaacttctccaaagcctccctcaggctccttcacaacaacccctgccacccctccaaggtcaccactactctgccctttgtcagcacagattgtgcctgttcttgagcttcatatagatggcaccataccaaatatactgtttttgttattgttgttgtgttttgagacagaatcttgctctgttattcaggctggagttcagtggtgcaatcacagctcactgcaaccttgaactcttgggctcaagggatcctcccgcctcagcctcctcagtagctgggactacaggcgtgagccactatgcccggttaatgtttttattttttgtagagatggggtcttactatgttgcccaagctggtctcaaactcctgggctcaagcaatcctcccacctcagcctttcaaagtgttgggattataggcatgagccattcatcattgcacctatgagacccacccatgttgtcacatgagagtgtagttggtacttcaaacaaaattattgtgtaggattccactgtatgaatatgacactctgcatcccttccactgttgattgtcacttgtgttgcttccaatgtttgccacttattgggactaaaatcatccttgcacgtatctttgggcaggcacatgctttcatttcccttgggtacaggtctgtgagtacacttgctgggtcccagggaggcatatgtttagctctagcagacactgccaaacagctttccaaagtggttagaccattttatactcctcccaggaacacatgggagctccgattactccagatcctcccaacacttgatctggctcatctttttaagagtggccattttggtggatgtatactttagtctgtaattcttacaatcaaagataaaccaagctacatttaaacctaaagcagattaacttcagtcagttttaatttgagtacgtaaattgcctttcacattcattgctcttggatatgttgtaaaataaatacaagggcagatctgctcttttctcagtttttactgcgtgtgctctgcacttgctgatttagtgagtcattttggcaggctttcgtgcagggtattgtagagactgttctgtgaaatctgtatgcccaagaactaggctgtgtagatcaggctggaaagaaaaagggttggggaaagaaagctcagttttcttttccctttttttcatggagaaagaacagagaacacaggaaaaggggcagcatggatctgaaatagattttgctcactttcttcccaatctctctgtttctggaatcctgggtaagatgtgatggatgggcatacttttaaaaagttcacagcactgagtgccaagaaggagggccatcgagggctaagtccattcagttgtcacctggacagagcccaggcatcgtcccctccccagccccctcctcccagctcctgtcctcccctcgtccctctgtcttagtccttatcacattttaggacagtcattcattcaacccgcaggaaatatctccaggccttctatatggctggcaggtatctaggtcctaggatttcaaccatgagcgaagcagagagagttcctgctccatggagctgacattccagagggaaaagagaaggatgtcagtgctttctacaatgggcacgggaggcctgaagaggcctaaatgaagtgggaagagccatgtaaaaatctggggagagttttctgacacgtgcaaggcccttggggtgagaagaatgtggcattggagggactgctcgggatctagggacaagggtcaggcgagctcgtggggagcagtggagtgaggcgtggagtgagttgggaagtagccagctgtggactttatcccaagagtggtaggaaaccactggtggctttgagcaggggtggacttgacccaactccagtctgaactgggtccctctggctgctgtgatgagcggccctgggggtgcagagtggaggcatgttcagttctctgaggccagggatgctgtttacctctggtcaagcatcaccaggctaaagacctgtgaatgaggacctccctcgaggcattggagtgaactccttgccttttatcttttagaagctagatgaggtgtggtccttaacagaaggctcagcttggcttctctatcagggctgagagctccaggaggcagagagactgtgttgcacccatgagacgggtgaggggcactctcatttggaccctcacactggctgagtgagatgatacaagatttccataaatagccagtatctggggacaagggtcaagctgacatcgtgtctgtgaccccagaggcctttatagtgagctggtgtgtcacagggttacttgcatttcagtgctgggggtaacccatgcagagcagatgatggtggttattaaggatctgagcttctttccaatgaagccaaattctttgatcattctcaatagggagagggctttctgggccttcaggtggtcgagaaccccacagcagcctgccagcgtgaaacaagggctcgcttccctcattctcagcctctgagactattatgaaaggtgttttggttaaaactgtattggaaacaaatattaaattgaggattagaaatctgttttgttagtttgagaactactactagagggattatgtttattgagtgctttctgtgtttcaggcactgaactagaatggatactatcatataataaataaaaagccaactttaaaattctgtggtcacagtggacatttgacatacatcagctctaagtctcatgatgatctataagctgggtgtcattattcccattttacagcccaggaaaccaagctgagattcaaaaagcccattctttcccctgttcaatggagtcttcttgaatatgtcatcgtcaactccccaaatctcttgagactcagtttacttatctaaaaatgaaaaagttagataagacaaacttccaggccccaccagctctaatagtccaagcatgacccaccatggcctctcacagtaactcagggaacgaagcccccatccaccacccacaccctctttgtacttcctttccagacctgcactggttaaacatcataatcatgtgtgttggccgaatgggaatcaccattgcaatacaaatgatctgcctggtgaatgctgagctgtaccccacattcgtcaggtgagtgcatggaacaggggtagccagtgaaatggctgtgaacccaccagctcagtgggaaccaacatctccaaggtgcttcctaaagatgcagccaagcattgctcagtttggacattgagtggcattgttaagaaatcacgttcagagagatggggttaagcatcaagagagggtcaacccataattatagcagagaatgtgaaaggggaccctgtgagctgatggatggggtcaaagttgttctgtacatacaacaagtacaagaacaaaaggtgtagagaagtgggtactggacagggacttgggaaacctgtgttgtagccctgtccttggcactaattgattgtataaacatcagccatttcattgacacttctgggcatcattttcttaaacagctgacatttgtatagtgatacgcgagtatttccatacatgtgattcccttaaatttgttcttgggtatgatcatccccatattacatatgaggaagctgtgatttagaaagggaaagaagcgttgtaggggtcagacagctagaaagaagcagggctggggcaaggaccacatcttcctgacctggaaccctgtggtttttccattatggcacattactgttctgtaaactgaggaacttttcaaaattgtggtaaaatatacataatatgaaatttactatcttagccacttttaagtgtacagttgagtagtgttaagtaccttcacacaaccaagctccagaactcttcatcttgcaaaacggaaactctgtactcattaaacagtaactccccatactctccaccctccagctcctgacaaccgcctgtctactttctgtttctatgagtttggttactttaggtacctcatataagtggaatcatatagtatttgtctttgtatgactggcttagatcacttagtgtgatggcctcaaggttcatgtatgttgtagcatgtgccaaaattgtcttctttttaaaggctgagtaatattccattgtacatatataccacattttgtttatccattcatctgtcaatggacacttgggatgctccacttcttggctattgtgaataatactgctatggacatgaatgtacaaatatctcttcaagatatctttcaattctttggggtggaatatccaaaagtggaattactggatcataatctaattctattattagttttttgaaggaacggctgtattttttttccataacggctacactattttacattcccaccaacagttcacaaaggttccaattcctccacatccttgccaacacttgttaatttctgtttgtctttttgatagtagccatcctaatgggtttgaagtgttatctcattgtggttttgatttctctgatgattaattatgttgatcatcttttcatgtgcttgttggctatttgtgtattttctttggagaaatgtctactcaagtcctttccccatttttgaactggttttgttgttcttgagttgtagcaatggtttatataatctggagattaactctttatcaggtacaaaatctgcaaatatttcagcccattccataggttaccttttcattctgttgattgtgacctttgatgcacagaagtttttgattgtgatgtagtctaatttatctctttttacttttgttgccttttcttttggtgctgaagaacttttttttttttaatcaagtttattgaggtacaattgacagagtaaaattcactgcttctaacatgcagttagattagtttgacgacacacacacacacatacactcacacacacgtatatatagtcatttagccactgccatgatgaaaatagagaatatttccatcacccccaaaaggttcttcatgtctctttgcagttaatacccttttcttctcacctccagaccatgcagttttagcttttccagaatgagctgtaaatgtaataatagggcacgtcaccttttgtgtttggcttccttcacttagcatgatgaaactcacccacttgttggatgtatcagtgttttgcttgttgttgctgtatagtactccagcatgtgaatgtcagtgtgccacaattcatacactgtttagctattcaccacttgagggacatttgaacggcttccttcagagggattctgatgcagatgctatagacatttgggtacaggcctttgagtggatacatgttttcatttacgttgggttaaaaactcaggagtgggattgttaggtcatatggtaagtgtgtgtttaattctatgagaaactgtcagactgtcagaccgttttccgaagtggctgtgccatcttgcgttcccaccagccatgtttgaggaatcctgtcgttccacattctcatcagtgtttggtgttgtcagctttttttttttttgagatggagtttcactcttgttgcccaggctggagtgcagtggcgtgatctcggctcactgcaacctctgcctcccaggttcaaacgattctcttgactcagccttttgagtagctgggactacaggcgtgcaccactgcgcctggctaattttttgtacttttagtagagacagggtttcaccatgttggccaggctggtcttgaactcctgacctcagatgatctgccctccttggcctcccaaaatgttgggattacaggtgtgagccaccgcacctggtctggtgtcagctttctaaaagtcattttggtaggtaatggtattattgtgacttgacttttcctaattactgataatgttgagtatctttgtctgtacttaattgccttctgtatcttggaagacttagttttaaatgaagattattttaattgtaaaagtaaacactttacttaaagttctaagaaattctagtttgttagaaattccgtatgttacttaaactctttttcctctgtatacattgtttcttctccttatgtcatcataccagtagtttctaggaaataccccagctccctaatctcatcttatacatgcgcagtgctctgagcccttcagtaaagccagaaggcaccaggatggccttgattcactctttcctgactaatcctttattaacaggccatgtctgagactctcattggtaaaaagttactgggactgagtacaggagatgaaggcatattaaaaagaaaaccttctatatttggcagttctgagcccagagtctaaaatagccaggccaaacaattccattgtcatggccactgggccaaggggactgactcaaaatgtaaactgtgaaaggtactgagtgtgtagttctctagggagaaaggccaagcaacccatccccgaggagccctcgaccactgctcagagagctggtgggagaatcattctcattcactagggagggaagctagatgttcagaaaaaactctcaacttcttatgtacacacgcgcacacacacaaggtaaggcagtcattcaagttccaatatttctaatcaattgaatcaaatttaatttgcagagaaggaataatttctgtgactttattactttataagcactccaagtttagacagtctctatgtaaaccattctgaccctgcctccgttccaggcagtttcagagttggactgctctgctcctcttcactttgtgcagcacgtgttgtaagaacattcatttggcattaatacccactgccttgttttgaaaatgatctttccatttttatctcctcaccttctcatgagctccttgaaaacagaaaccacatgtcatgtcatacttctctgtacctcacagaactcttccacagccagactcactacatgctgtagaatgactcaatgaatgaagtaccgcaaacatctgaattttaaataaggggcctagttccctacttcttctagcttctgtgtgcttgccatttttttccttttaacaataattttttaaaaatagtaaaaaataactgtgtcttttcttgcacctcttggaaatcacacaaaagctattagaagaatgagggataatgcaaatgtgtttgaaactgtgataacatgaaaagacaatctacaagaggaagggctgcctagtgtgtgaggtctaagggagtccgagaagattccaggaaaggacccctgtgacagcaaatcgtaggcgaggccagcagctttccaaagtagacagcgtgacttgaagggtgtgatccatggtcccttgtttggagaaacagaatgatgggtgcatgggctggaggtggaagctcccttccctggatgttgtatggctgaaggtgaagcagggaggacaaggctgtaaaagaagatatgcaggaactttcagacagcagttactgagaggcgggtggaagagactagctccacaccatcagcccctgtagatcaggaataagtgagccaaaaaaatctaatcatatacaaccctgatcaaagaaagaatttctactagcccagaacatggcctggctgcttccccacaaacccttctagaaatggctgatagaggaagaaataacagtatgaaaagatgagtaataaacaaaaaagtaattcattcaggaggtacacaaacatatcatgagataaagggggaaaggagcagaaaaagcaaaaggcaaatgaagaacatgtaccagaaaaatgctgtaacaacatagatcaaagttctaactacatatactaccaaaatgtaaagtattaataaatcagtcatctctataaaaataagactttaaagcagaggtatagttctagagagaatatctggcaagacaatagaagacactgaagctgtcttaagaaagaaacgaaaaagaaaaattaagaagtggagaaattcttgcatttgagaaatgaaaaaccaatttgaacacaatgcaaaggagaatagattcagtgagggaaaggcaagacaggactaagagttgcaaagtaaaatggaaataagaaataagcagagtttaatccaggcatggtggctaacgcctgtaatccctcactttgggaggctgaggtgggcagatcacttgaagccaggagttcgagaccagcctggccaacatggtgaaaccctgtctctactaaaattacaaaaattaactgggcatggtagtgcatgcctatagtccaagctactcagcagggtgaggcaggagaatcacttgaacccaggaggtggaggttgcagtgagacaagatcgagccactgcactccagcccgggcagggagactttgtctcaaaaaagaagaagaaaaaaaaaaaaaagaaataagaaataagtagagtttcaaaggttctatgtatgtatgtatgtatatagtccgtaaactttttggttaaaaaaaaaaaagatatatatatatacaccccccgcccacacacatacgcaataaatatacttcaggaatacatctgaaaataaaagaatgcttgaatctataaattaaagggacacatgtagcagaaaaaactgacccagtgaacaattattaggacatatttttatttggttactatactttaaagatagagaaagagtcaccaagtagccaggctgaaagtttgtcacctatataagaagaacaaattgttatcatttgatgaagacagtcaatgcctgcagtgacctcaagaaaataaagtgcaatccagtgatttttattattgtttttttgagacaggctggagtgcagtggcatgatctcggctcactgcaacccctgcctccccacttcaagtgattctcctgcctcagcctcctgagtagctgggattacaggcgtccaccaccacgcccagctaattttggtatttttaggagagatggggttggtcaagctgttctcgaactcctgaccttagaagatctgcctgcctctgactcccaaagtgctaggattacagatgttagctatcacgcgcgaatccagtgaattttatccaaccaagctctcatttctatatagaagcaatagccaatcatttaaaaatatctcaaataatatggttcctatgatcctttcccaaaaaagttgttagaaacaaaattcagtaagtacagtgacgaatgaagtaatgtgtcagaattattggtagtgatcattgaaattgatattaaaacgagtgtgtttttggctacaaaacaatataatatcacaaatctgaaaataaagaaatgttataactcacaaagactgaaaagagaaaagagaaagaatgttggagatggtgtaatacactgatttcttcaatacacttgttttttggaaaagtgtatccttaaaaactgacaagtataattagttcagcagcaatatatttttaaaaactgataagtagtatcctaggcatatgttaagatataaaagaaaacactaaaagtaatgatagaatcaactaaatcaggtcatggagggatggtttgagggggaagtagaaatatactaattttatgattgttcataataggaagttaatcaatactgtctaaagaaataggatattaattatataaggttatacagtaatcatttgactaaaaatacagcccttccaaatgatcaggaaaaatacagataaccaacacatactgaaaataaaagacaccagaagcaataaaaagccctggtgtgaataggtgatagaatatgaatagatgacagcattgatatgacagaactgacatggtagaattaagacgaaacatttccgacatttaaataaatgaaaagaggcttaactcctttattggaaaaaatgagatgactccctagcttgattacaaagtgaaatccaacaatatgctgctatatgaagtataacttttcctgagaaaagctaaaaaagaaagaatgcacaaaagcatactagggaaatatatagcaagtgtcataatctaattaaagttgaatttatgggaaaaggtgctaaataagataaggagggccctaaataatgataaagaaggaatccacaatggttttaaagggggatttttaaaaacatttaacaaatagaaaattccaataatatttaaattgctctaaagcatagaaaaagaagaaaattttccaactttaaaaaataaaattagcgtaatattggtaccaaagaacaacaaagataaaggaaacaaggaaactacagacatatatttatgaatatggatctagaaatcctaaacaatatattatcaaacagtggagaacattaaaataattactattctatgtcttagatgaattattccaggagtgcaaagatggctgagttttagaaaacctcacagtataaatcatgtttattagtcaaaagagaaaaattatattattatctccattgatactgaaaggcattcaataaaatttccacctctacgtttgttttaaaaatttctaagagatgatataagcatttttatcatcaggatataggtcatggggggagggattgggaaagaaatataaatatatgaattttgtaattagtcatagtagggagtaagaaattatgcaaataattgcaatagaagaagcttaaaagtaatacccgaaaggatagaacttttcctgatttattattcctattttaatcatgttttcaaaacaaagctcaagattgtttctaggaatacaaaatcgagcatggaacaaagtgaaatttacaatttctgacatccaataaaaaattaccaggcatacaaagaagtaggaaaagataacctatcttgaggagaaaaataaatcaattcaaactgacctagaaatggcacagatggtagaattagtggacatgaacattagaacagttatgatacctatattctctatgtttaaggtcctagagtaaagattgagcatgttaagtagatgcaaggaaaaaaaatttaagtcccaaattaaacttctagagataaaaacacaatgtctgagatgaaaaatacaccacatgagttaacagcagattaaacattatggaagaaaatattagtgaacttgaagatagcaattgaaactatcaaaaaggaaagacagagagaatcagtgagctgtgatacaattcaatgaatgtaattggagtctgtagaagtgagtaggaggggttaatagagagagaaataatgctcaaaatttcttcaaatttgatgaaaacttcaaatacatagatctaacaatctcaataaatactaaccacaaaaaaacatcaagaaaggcacatcataaaaatcttaaaaagaccagcctgggcaacatggtgaaaccttctttctacaaaatatacaaaaattagctgggtgtggtggtgcatgcatgtagtctcagctactatagaggctgaggtaggaggcttgcttgagcccaggaggtggaggttgcaatgagccaaggtcacgccactgcactccatcctgggcaacagggcaagaccctgtctcaaaacaaaaacaaaaacaaaacaaaaaccttaaaaaggaatcagagaaaaaagatatcacaaataggaacaaagataagaatgacagaaaatttctcattggaaatgatacaaacaagaaggtggtagaacatctttaaagtactgaaagaaagaaaaataaactgccaatctaaaattcttgacccagcaaaaatactttcaaaaatgaatggaaaataaagactttttcaaacttacaaagtctgaaagaattaatcaccagcagacttatactacaggaaatattagtcttgaagatctttcagaaaaaatgaaaacagtatcagatggaaatctatatctacacaaaaaaatgaagagcactgaaaatgataactacgtgagtaaatggaaattttttttttctggttattttctttaaaagacaatgaactgtttaaagcaggcattggcaaacttttccagtacagagctggatagctaatgttttaggctttgtggatcacatacagtctctgttgcatattattctttttctttttctttctttctttctttctttctttctttctttctttctttctttctttcttttctttctttctttctttttttgaaatggagtctcgctctgtcacccaggcgggagtgcagtggtgcgatcttggcttactgcaagctctacctcccaggttcacaccattctcctgcctcagcctcccaagtagctgggactacaggcacctgccaccacgcctggctaattttatttatttatttattttgtatatttttagtagagaaagggtttcaccatgttagccaggatggtcttgatctcctgacctcgtgatccaccctccttggcctcccaaagtgctgggattacagccgtgagtcaccgcgcctggcctaaaaaaccttttaatcatgtaaaaaccatttctaactcaaagctaaaaatgctgtctttggcctgtgggctgtagtttgccaatcaaaacaataatcacaatgtgttgtgcaaaggctgggagggaagaaacacaagtatactattgtaaggttcacatataatctatgaatgttacaatattacttgaagttactgtgatcaaagagttaggttttctgtaaacctaaatcaaaaattaaaaaacaaaataattatagctattaagtcaacacagaagataatgtgaaatcatttaaaataatttataagaaggcagaaaaagaaataaagggttacagaggacaaacagaacaaaaagaaaacaaatagcaagatgatagatttaaactcaatcatatcagtaatcacaagaaatataaatggtctagacactccagttaaaaggaagagattatcagattggacaaaaaagtgaaacacaaccacatgctgtctacaagaaactgactttaaatataaggggagaaagatagtttaaaacgaaaggatggagaaggatattttatgctaatactaatcaaaagaaagctggagaggctatagtaatatcagatagtgtagatttcagagcaaagaacattaccagagatgaagagggtcatttcaagtagatagtttctctacatgtttccccactaactttctttcttcgattcctcaataccttctatctacccttccctatgtttccgtgcatcaggggttctctagtggagactcttttcctcccatctcttaacatctgctctgagcatccccagcaactcatcaggtggaaaaagctactagtcacagtttaaatctcattctcccaagaaaatgctcatcttagcacagaccaaagcttgcagtcacaggaaaggagctctaagttagaatttcaatgattagtcttctctttctcaacaactacaaattcagcaccagattatcctcatcagcactgcagatcccccatggtgctagtgctagaagctggaatccatgtttttcttgggaaaatctacttaaggcctgttgccctgtgctgcaaatctctgggtcacatgcataaggaaccacattcattgacccttaaccaatgaacgccagtggcagatccctcattctgattaggtctcctttcttccccatgtgcctcctctaagggtcacttgttggctattgaggtgatgggttggttagtcagtccctggtgcacatcagtcaggatttccttcctggcttgaccctgctcccagggtcttagggctgggaagggcccaaatcccactaaactcagtcactcccagacattgtgctttcccacaggtgatgacaggtcatggacctagaacaggagtgaggtaaaattgaagtttagagcagggagcatgtgttctttttatctttgtaaggcttgtagcaattcttcaggtattatacacctaagagctaaatatttgaatgtgtagttaaaaagaggtaggctctctgccattgcatgggcaacggatggctcatacccactttcactctagcctgttacctcctctcaataccctctgggctggtcctcatggttcctcctgacccctgcagttttcttctgaggtgctgagcactggacagccacagcaagctgcaggtattggcattgtacttgttttagcatcaggtgaacatttggaaaagtgaatcacagaattatcgtattttttgtcctttgtattttatcaggaacctcggagtgatggtgtgttcctccctgtgtgacataggtgggataatcacccccttcatagtcttcaggctgagggaggtctggcaagccttgcccctcattttgtttggtaagattttgtggagcatatatcattccttcttttgcagcttggcagtgggctcagcatgggtggaactgagtgtgagtactcagtcgtatttgttgagtgaagggaatgatatctctcagtgagtttacagaaggcaaggatgatgcatgctcttgggatgtcttctggcttattctgtcttgcttcatgggaaagataagaatccattcctaggatatgggtcagggatttccatcctctggctctggactccaatcattcatactataggacagaatctgagagaccttttgacagtctcctgataaatctgatcaccaattcttacacatttaacacacaattgctagagtcttgaagatgctgaattatcacctgtcttctgtatctagatcttaacaattgagaacactcacaaggagatgagtgggaatcaaagttccgtatcagctttcttcctgatacagttggatgagagaagggagaggggattcctacttatctctccaaacctaggccagagaacttccaagaccctgcttacccacttgatagaagacaacagttgctggttgtttgcagagccagccatgcctgggcacaggtgaatacaaaaagaggggtggaggaagagatagggaaagggagaaaggaagaaggagggagaaagggaagtagaaggcaaagggaaaaaggagggagaaaagagtgatgggaggggtccaccctgcccacatatagactgtgctctatagctaattctatgtgtatatgtaccccaacaacaaatccccaaatacttaaacatcagttactatggaactttacacttctatagaagtaaaatgaaggcaatgtttcctttacgtactctgacatttccccagttatcctattgttttaattttcttttataaatgttcctaactttttttctttttaaaaaatagtatctctcccatctgtgttgtctcttcctctctttggctggctgtgattatttctgtaaatgacattggctgtgctctaatggctccatttgcaatctgtttcctttgaagcggtgttgggcctgcttgccgcgggagtgacgctacttcttccagagaccaagggggtcgctttgccagagaccatgaaggacgccgagaaccttgggaggtgaagcccatggtgcccaggactccgaggcccatgagtctgacacgccctccaaaaggggcctaatatcactccacattctccatttcctctatcttaaaagtttaggagagctttacagatatttgtatgtctttttattactcccagaactgctatgaggaaaaaaacccatgatagctactgactttatgtaagaaaataatgaagagcatgacttgacagctatctgttctcaagtgcatggcagagaatgatttgtctgtaatgttggctgtggtgcaccaagatccctagctcaccccaagagttaatgactctgagtggggaacattttaaaatcaatcttctgtcctctgagcaattgttgtctcagattctttagtaactttgttcacaaaattcttttgacagagagcaaggtttgctggagtttcatattctagtcttagagcaataaaaaaggaaaggaaggaacagtgcttgatgaggtgatctctctcaagatcctttacaggctcagttctgtggattccacagcaaggatgcatgtgtcctcgtgaatagagagagaaaagtctatgcagtcctacagacttacgattgaacctaggtcacctgactcagtaggccatgtgactttgggaatgtcattgaaccctatggagctttatttttcatttaatttccatgcctgcaaaatagtcacaataatacttaatttacagagtttctataaagatctaatcagattaagtaggtgacagtgactaatccattgcctggcacatagcaggtgttcaatagagctcagattttctccattcttcttgcaaatcgtgctatgtccccagtgatcctccaaactaagtgtgcagaagaagcacaaaaggaacatgctaaaatgctaaattccttggccttcttggtttttggtttagaatgtgaatgatgcaactcaggaatctgttttaataatctctgccaacaatgcacatgcagataggcactctgtacacttcacttggggaaattctagatttctcagtactgataagggcaaaacactattttaacagtaaatgcattttctagttgctgatgatttccttctttttgatcccaagtgttgtgttatctgatttaaagatatttcattctagtttgttaacagccacttggttgtcttttttttcttttttttgacttggagtttccctcttgttgccctggctggagtgcaatggcactaccttggctcaccacaacctccgcctcccaggttcaagcgattctcctgcctcagcctcctgagtagctgggattacaggcatgtgccaccatgcctggctaatttattatttttagtacagacaggttttctccatgttggtcaggctggtctcgaactcctgacttcaggtgatccgcccatctcagcctcccaaagtgttgggattaca

SEQ ID NO: 130 - DNA, 30146 bp, Human
agctgctctgcatccttgctgccacctggtctaatcagatggctaatgctgtctgtctggtgaatggacagtagctcactgtagctatactgtgcatttctctgatgtgatggggttgagaaccttttcatatgtttgatattttttatctcctgtgaagttgtctttcgattgtttttgcccattgttatacctactgaggggtctgttattctttcaactaaccagccctctgaaggcgaatataaggatacaaaacatgcttcctgcccccgaggagatgacttgacaattctagaggcagatatatgaacaagaagtacatgataattgtgattactgaggcatccatcttccctagcagactagctaaaggatggcgctcttatttgtgtcatatcctgggtgcttaacacagtatctgccacataattaggtgcttagtaaagttttgttaaatgatcgaatggggcgtttttagcgcagtgtgcaagtgccctattaggggtaggcgcccagtaactcgagaagcatggagtaagaaaccacaaacagcacctgctccccctcctctccccctacctgctgtggggaaggcctcccttgtaaatttgaaaggttgattcacgggaagccgtggaggaggtgcatgctaggccaacgaatagaatgtgcaaaggcccagaaggaagacagagcccagcctgcaagggaatgttaatttggagtgactaacaccatgaaagggcatcagctggagatactgctataaagggactgccttgtaatttcataagcatgggggtaaaattaagattaaacacagggaaagaacattctcacaggtgaggatggtgttgaaccctagaataatcgtttcccagataccttgaacaaaaatcgagcagttagagaagcctgaccatgaagcaaatttgacttttgtccctctagataacaaaagttatctttttgaaagtaatggtgtaatttgaatgagtgtagagaagcgctgaagactgagctttactaaagccttcagacctggatttggcagcagcgtggccttagtcaagcctcggtttctacacctgcaaagtgggaataatgcctaccttggagggctgttgtgaagattaagggagataatacatgtaaagtacttaaccatttgcctggtggggtagtttttatgacctagatcctaaattgttcactgctgctgttgctactcttggtactttttactggctggcatctgcttgcttaagtttataacatagtaggagcattaacaaggtcccacggtggggaccttggtcgtttgacgagatctgcgctcccgcccatcccctcccccccccctccacattggagacgcggccaccaccgcgctggcgcggagagagggaggaccgggcgtcatgctgtttctggcctgaggttttgtgtgcctttgttttccttttgctctattcgtgtattcctgcctacggcctgtgcggggaattaggagctcagtactgaaacggcggttttcctaaacagtaccggacgggcgcgggggctgacgcctgtaatcccaacactttgggaggccgaggtgggcggatctcttgaagccgggagttcgagaccaccctggctaacgtggtgaaaccctgttcttactaaaaatacaaaaaaaaaaaaaaaaaaaaagccaggagtgatggcgctcgcctgtaatcccagctactccgtaggctgaggcaggagaatcgcttgaacccggcgggcagaggttgcagtgagccgagattgcgccattgcactccagcctgggcaaaaagagcgagactccgcctcaaaaaaaaaaaaaaaagtaccttccgtagttctcatgcagcggaggggttcgacttgtaaccggcctgaaaccaagcgtggcgcaagatttgctcaagcccctcctcttggccaaactttccggaggggaaggctttccgaggaaacgaaagcgaaattgaaccggagccatcttgggcccggcgcgcagacccgcggagtttcccgtgccgacgccccggggccacttccagtgcggagtagcggaggcgtgggggcctcgaggggctggcgcggcccagcggtcgggccagggtcgtgccgccggcgggtcgggccgggcaatgcctcgcgggcgcaatgaatccgcggcaggtaagccgggccggccttggaccttcgccgccgtctgggttcgtttacaacctcacaggctttgtgttgcagtgcgtagcgtgtgcgtcttgtgagtgttagagtgtgtgtgtgtgtgtcgtcttgccaagcagcattgctggtttaggaatttgtgcgtcttgtgagtgtgtgtgtgtgggtgtgtgtcgtcttgccaagcagcattgctggtttaggaatttgtgcgtcttgtgagagtgtgtgtgtgtgtgtgtgcgtgtgtgtgtagtcttgccaagcagcattgctggtttaggaatttgtgaatttgtatcctgctcattaattctgcagaatggagcagtgcgtgaagagggcttgggggaaaatgcgcccccgtctgagtaggaaggcctgagcccatgtcaaggcagacacatcgtctccctttctgctagggccccttgtggaaccccctacccccgctttagccccacttgaacaacgttcggactttgagcagcgcacactatcctcagctcaccttatccacctcctgaaggccttctgggagttaaaaatggcacttaagctgtaggagaaagcttgttaaccactttatagctaaaaactgggaaaacacaaatggccttcagcaggttaacagataaactgaaatacatccacataatgggatactgcttagtagtgaagaggaaatactgttacaagtaacaacacgggtgactcgcaagtgcgttatgctaagcacgagaagccagactcaaaaggctgcatactgtatgagtccatttatatgacattctggaaaaaaaaaaccacagttatagggatggaaagtggatccgtgggtgccagggactgggtatcgtggaagaaattgattgttgagtggcatgaaaaagctttttagggaaatagaaatgttctatatcttgattgtggtggcgattgtcgaaattcatagatttatacacttaaaaggataaattttactgtatctaaattatatacctcaattttgttaagatatatatatatatttttttttttaagcactcctttgaaaggattaaggacgcctaacttgaaggaaaagcatttctgcacaggtgtcagtgtattgcactgtggaacctgtgtggtaaaggcaaagggggtagtgcttatctcttgatcctaaatatgtgagaccagattaaagtgaaatctgggaggcaatgaatgttaaatgagttgttatgtaatttgcatagaggtgatgctgagagatttagaaaggatcactgtgggttgcttgctcactttcttgctctcctattccgtagctttccaaatggctgtactcaacggtggcttggtgtttaggggatttaaggggggcaaaaagaaagattaataatctcctcctctccctctaaccctactgccctaagatatccttagcaaacttacatctcctttcttttctctgtgttcattccattgtgcgcacacatacacattcatggattttctctttttgtttagggaaaaaaattataatgtacatactattctacaactttttgttgttttattgaacattatatgattcctaaattatccccaggtgaatacaaatagatatgacacattttaaaaaaataaaataactggccgggcgtggtagctcatgcctgtaatcccagcactttgggaggccgaggagggcggatcaggagatcgacaccatcctggccagcatggtgaaaccccatctctactaaaaatacaaaaattagctgggtgtggtggcgtgcgcctgtaatcccagctactccggaggctgaggcaggagaatcacttgaacccgggaggcggagattgcagtgagctgagatcacactgcactccagcctgattgcagtgagccgagatcatgccactgcactccagcttggcaacagagcgagactccgtctcacaagaaaaaaaataaccgtgtgagtactattccatagaatgaatgtttcataatttaattcttctatagacagacattaaaatattttccagatttgggccaagagtagcagtttaaaaaacatttagcttttaactgactttagccactttgaaacacaatttttttttcccaaggtcactcaaagagctaataggagaacccctaagtcccataattcagctctgggagccagcactcactctgtacacacatttgcctctgtccctagcaatatggtgggcgtgagggtgcagcaagaggaacaagaaagaaatgattgcttgcatagtggcgtcttgttcatgcagtcattaattcaacaaatgtttgttgagaatcagctttgtgccaagtgctagagaggttgagatgattgaagcatagtccttgacccccaagagctcaccatggaatcaactgaagcccctcatcagtactgtgttgggaatattgagagtggagagttgagtataacttataggacacctaatgttaattacctttcagacactgcaatgtgtgtgtgccataaaaaaaaaaaaaaatccagtagctctgatacgagggaaagtaaatggttttaacaggtgctgagtaggagaagctcaaggagaggaaaccccaagggctgaagaaggtgggagtcaggagtctcctgaagcaagtggcatttaaggagctctataaggaaagggtcagagttgtgataggtggctgtggagggagatgtgccacctggattggcatgtagagggatagaaagattataggcctttgcaatggcccagtaagaggtaatgaggggctggaactggaagaaaacacatttaagacacagtacagaggtggcagacaaggtgggacttggcaactacctgatgagatccaggagatgaggccaggaggcgggcagcaaagatgacgcaggtttctagccttaataagctaggaggagagtgatgccattagcaataagaactacaggagaaggagctgagtttgagggaactattaatttggttcagaatatgtgctgtttgagttatggcaggatatttaagtggacagactgtcgacatagttggaaattcagatcttaagctcccacacaaggtagtggctggacatagtagatttgagtgctcttgcttcagagggctagtttaggttggggcagtgattaaagcaacctaggaaataaattataaaggaagaagaggtccttaaaaccttggagactgattatataaagggtggatccgttaatacagtagctattaaaaaattataaggggtgggaaaaagggacaaagaagaaaaaagaggtgaaagacctttgctgtgtcaccaaaccctgggaggagaattttttaaaagaagagtactcaatccacagtgaactacggcatgtttgttaaacacaattgaccaccacacagcgaagacccaactgaggttcaagagaaggaatttttatggaccctgttagcacaagtcaaggtccttctccagtaccactgggaagctttggagaagaaaagggggacagtgggccttgggtggagaagggaactgaccatgagatccaggtggggtgaggaggtgtgtgaagtcagagtggggaagaatcagggtggcttactggcagcttcaccggggtcatgcgaggagcaggttccaccagagtaaggagtgaagttgtagaaacacagggaagtcaccatcagaaaagagcaggagtcaagaaactatggcccacaggtacaaactacctgtttttataaataaagcttcatggtaaatgaattgtaaataaagttttgcatattgtgtgaggctgtttttgtgctacagtggcagagctgtctggccctttatagaaaaagtttatcagccactggaaaagagttgcaggatttgaggtcttggtgtgatggcctaggttagagtcatagtgagattgaaggagtagctagacaagccaattgtgtggcagaaaggtagggatggagatcactgggttaaggatccttgtagccaggacaccatgagagtgattgacaagaatgctgaaatcccctaagtgtgtcaggatgtggaagagtagaaggctagagttatggaagaaagggtcccacctctacctgtgcagcctccaggagagtctgaggagggggcggtgagtgtgagtaaatgttgtcagaatccctcctcccagtctacaagccccagggaaaggaagcaaggtgtttactgacacccccaggcttataagtacttcctggctccatcaccctccagtgaacagccctggggagaagacagtactggtttgcaggtgggtgggtggggaaaggggtcacaggtgcttggtgttctggtaaatgtgcatatgagaacatggggttgcttgtgccctgtccgtcagggttcagaagaacgtgcagtggaagcagctatggggaagtagctagggaaggtaggactggtctgaggtggtgaggagcagatgctgccagctccacacatccaggagagcctgggtggtttgggcaaaagtctctggcatcccttctgagcctgggtaccacactgaagagtgaggacagtgtgccatttttatcaggaaaccctccagctccctgaagaccaaattctgatcctcctgggatggcagtgaagagccacagagatgactctgaggtcccgtggccttttcccacctggagattgttttcgttactgcgctgttacagccttggaggactggggttcagtttcatccaatcacatttcttcttttgtcatagtcatctaaacgatagatcttagagacaggtgggcaaggggtgcactggtgagcctgacttaaggagaggtcatctcgtcccttccctagtcccatctcccttggttattgttatttcatgtgattgttctggttatttcaggttattctgtttttgttttcaaaacaataacatatatttgttgttctgattttaaaggggtaattgttttggtaactagaaaattaccttctcaactcccttaaattctgtcaaagggaaaagtaagttaggttgctggagaggctatgctgaggcctcagaacctctgtactcctggaagttctgcgtgctttgcctcctgctcccctctctgtgttcctgttggcaggcccctaggcaggatttaggaggtaggcaagtcaccctagccaagtcataagcccatggctcaattgccttctcagcccttcaagggctgttccacaggcagcaaagggaggggcctccacaggttcaccactgcagccctaattcattttctttttccactgtcttattctgcaggggtattccctcagcggatactacacccatccatttcaaggctatgagcacagacagctcagataccagcagcctgggccaggatcttcccccagtagtttcctgcttaagcaaatagaatttctcaaggggcagctcccagaagcaccggtgattggaaagcagacaccgtcactgccaccttccctcccaggactccggccaaggtttccagtactacttgcctccagtaccagaggcaggcaagtggacatcaggggtgtccccaggggcgtgcatctcggaagtcaggggctccagagagggttccagcatccttcaccacgtggcaggagtctgccacagagaggtgttgattgcctttcctcacatttccaggaactgagtatctaccaagatcaggaacaaaggatcttaaagttcctggaagagcttggggaagggaaggccaccacagcacatgatctgtctgggaaacttgggactccgaagaaagaaatcaatcgagttttatactccctggcaaagaagggcaagctacagaaagaggcaggaacaccccctttgtggaaaatcgcggtctccactcaggcttggaaccagcacagcggagtggtaagaccagacggtcatagccaaggagccccaaactcagacccgagtttggaaccggaagacagaaactccacatctgtctcagaagatcttcttgagccttttattgcagtctcagctcaggcttggaaccagcacagcggagtggtaagaccagacagtcatagccaaggatccccaaactcagacccaggtttggaacctgaagacagcaactccacatctgccttggaagatcctcttgagtttttagacatggccgagatcaaggagaaaatctgcgactatctcttcaatgtgtctgactcctctgccctgaatttggctaaaaatattggccttaccaaggcccgagatataaatgctgtgctaattgacatggaaaggcagggggatgtctatagacaagggacaacccctcccatatggcatttgacagacaagaagcgagagaggatgcaaatcaagagaaatacgaacagtgttcctgaaaccgctccagctgcaatccctgagaccagaagaaacgcagagttcctcacctgtaatatacccacatcaaatgcctcaaataacatggtaaccacagaaaaagtggagaatgggcaggaacctgtcataaagttagaaaacaggcaagaggccagaccagaaccagcaagactgaaaccacctgttcattacaatggcccctcaaaagcagggtatgttgactttgaaaatggccagtgggccacagatgacatcccagatgacttgaatagtatccgcgcagcaccaggtgagtttcgagccatcatggagatgccctccttctacagtcatggcttgccacggtgttcaccctacaagaaactgacagagtgccagctgaagaaccccatcagcgggctgttagaatatgcccagttcgctagtcaaacctgtgagttcaacatgatagagcagagtggaccaccccatgaacctcggtaagagaccacccaggaactgtacctagggttggggtcaggtgcttttgctcctgacgcagtcttggctgatttgtgagcagtgctgtttggtggcgcctatcttttcctccttcccttctgccttttagctaaattccccttgattggccctttctccagatattgagcagggaatatagaccttggaccagccagaatcttggctgaacaagggggaggttgactctgttggctgtaatgaagcttctttagaaatgattggttttggccgtacgcggtggctcatgcctgtaatcccagcactttttgaggccgaggcaggcatatcacgaggtcaggagtttgagaccagcctggccaacatggtgaaaccctgtctctactaaaaatacaaaaattagctgggcgtggtggcgtgcacctgtagtcccagctactcaggaagctgagacaggagaatcacttgaacccaggaggcagaggttgcagtgaactgagattgcgccactgcactccagcctgggccacagagcaagactccatctcaaaaaaaaaaaagaaagaaatgattggtcttgggggccggggcggtggcttacgactgtaatcccagcactttgggaggccaaggcaggcagatcatgaggtgaggaattcgagaccagcctggccaacatggtgaaaccccatctctactaaaaatacaaaaattagctgggggtggtggtgcttgcctgtaatcccagctactcgggaggctgaggcaggagaatcacttgaacccaggaggtggaggttgtagtgagccgagattggcgccactgcactccagcctgggcgacagagtgagactccatcttggaaaaagaaagaaaaaagaaaaacatgattgatctccatgcatcaatatcatgcctgcctcctaaggcagaggtaatgaagacttaattcccttctgtaggccttcccctcctccctaagccgttttctgagagaggtgcaggagcaggtgggttggggcaggctgcatacacagtgggggtgggttgtgctgctaagcagcagcaggtccacaatcccccctctgcatagctcctggggggaaaggatggaggagcgtgtgcacggctgcctgcctgttgaaggtggtggttctaattttataaacctcctctgcacagatgggtaggctagcacttgctgccactcctgagctgtgaagtcagcgattacctcactcagatagctggtcaggccctgcactgtaggtcctaataggccagtggacagattgaggaaaacaggagcttctgaagggcataacagagagcaaaaccactgaagctgagtggctgcagctgcagccagggaaagagccagtaggatgggggagaattccactgacctttatgtttacctagcctggtttctaggggtgtagattcctggctagggcccttattccttgtcttgactgtcttcatgacaccaatttggcatttcaggagagcggttaagaaaaggagttgtgtctgtccaaaagctggcaaggccagagctggattgtttggggtagagactggatggccgtcattctcttttgcctccatccctcctccccagagttggaggaaagcagtggattttgtggttagtcattctttggactcacactaaaagaaacattggtgccatgttcaaatatatcagaagacctaggaaataagaaatttgacctacttttctaaatgaaatcccagactgagcaaagagctcaccacatttgaaagcttgaacaaagggggcctaggctaagtccagaggcctagaacaaatgcttttttattttctacataacaaggggaaattccttgttatgtagaaaatagctggagacaaatggtgctatagagtgactcataacaaactacggtgatataggtctagggacaaaagcaggccactgataagtggcagatgcctgatccccctaggtagtggggagtgtgagactgggttataagaagccttcactatcttttaggaccctcccttgaggaggccagtctaccacaattgctttagaatgaaggtcttttggttgctcacaagactataatggtaatttttggctcatcatttttgtgtgtgtgggttttatcttaattcattgttaaagagatagtgggtttcccctgagctagtttcctatcatctgtgcctatgtttgcttcactgagctatggggaaagagtcactggctgctttgtttacaaaaagaaaggacaggctgagccttaaggagtaggaaggagttccttggcctacccttcatctcctccacaagtgaaaagccccttagcgtagcagaaaattccaggttgaaggtctctttggagaaggcagaaggagtgacctagactcctgttcacacatctaatcactttccgtcaagatttaaattccaggttgtcatcaatggccgagagtttcccccagctgaagctggaagcaagaaagtggccaagcaggatgcagctatgaaagccatgacaattctgctagaggaagccaaagccaaggacagtggaaaatcagaagaatcatcccactattccacagagaaagaatcagagaaggtaggtgtcctcctgccatctgggaggatcagttccctgtcagtgtctggattgtaactgactcccttgaggcaatcccagcctaaacaactgacaccatctcggagtcagcttcccactcttccctctaccctatctcgccagcccacctttcctcctctcatacccagctcctctgtctgctcctgtcccaacataattggatttacagaatttcggacttgaaagagacctgaaagtttattgaggccaatctcctctcttggaagatgcggaatgagagctccagcagcccctttaactttgggaagccaaccccttgacaggtggtgggaataaagtcccccatccccatcccttcttctgtgatggactaaccagtgttttcttagttttgttttcttcttgtctctcattttctctagactgcagagtcccagacccccaccccttcagccacatccttcttttctgggaagagccccgtcaccacactgcttgagtgtatgcacaaattggggaactcctgcgaattccgtctcctgtccaaagaaggccctgcccatgaacccaagtatgtcctacgtgtcctctgtccagctgaggttttctcagaaagaaaaagagacacattttcttccttgcctcctcagggatggcagattgaccaatttctcctgtttcaaaatggggaaaggagggctctgaggtcctggttgctgcttgtgaggcagacaattagggattaggaattcaaagggaattcctggcccaccctctatctcctctataagcactagggaggttcacggcttggaggtcactcactgttggtgggacagaaaggtacaggacctgagaagctctctgcctgtgggtctatagactcacatgttcaagagaagtgttcctggaagaggtgaaactaggttgatgcttaaatgttgaaaggggtcagccaggctaagagacactggctgttcaaggcagaagtgactgcatgagatgtgactgcacagaggtgatgtgttcaaggaaattaccagtagtggaggatggcagcctggcagaggctaggtcaggctcctcagtcaaaaccattttaatccttctacgtgcttcatctcctgtcaggttccaatactgtgttgcagtgggagcccaaactttccccagtgtgagtgctcccagcaagaaagtggcaaagcagatggccgcagaggaagccatgaaggccctgcatggggaggcgaccaactccatggcttctgataaccaggtagggcgttttcctactcaaaagatacaggtcatttttagcaactgagtggtttaagattgccagtgactccctcaacatttcctgaagtgtttatggctcctctgtttgatggattctcctttagcctgaaggtatgatctcagagtcacttgataacttggaatccatgatgcccaacaaggtcaggaagattggcgagctcgtgagatacctgaacaccaaccctgtgggtggccttttggagtacgcccgctcccatggctttgctgctgaattcaagttggtcgaccagtccggacctcctcacgagcccaagtgagtgtcctagtcctggctaatgcatgtgtcaccagttggggatggtctgtaacccagggaaaacaagggtgtgctttagctgtgtaggacagaaggggcgagttgagggaaacaagtccagccctgtctccacggcctcttagaagacaatagacctgccaagagtgaatgcgttcactcttccagtaagcatgatcctttttaattttttgactagttttaatttttaaagaaatgtataggtacattaaaaaatcattcaggccagacatggtggctcacgcctgtaatcccagcactttgggaagttgaggcaggtagattacctgaggtcaggagttcaagaccagccggaccatatgaggaaaccctgtctctactaaaaatacaaaaattagctgggcgtggcagcgggtgcctgtaatcccagctactcgggaggctgagacaggagaattgattgaagctgggaggcggaggttgcagtgagctgagatcgcaccactgcactccagcctgagcaacagagcaagactccatcttgaaaaaaatcattcaagctgattgaaaaagtagtcatttcaatgaaaagtctcatttccgtctcagacttccagtttccctccctagacccatatattactatagccctgcattagcaactgggatgcggtctgagaagcatggttttgttgttgtgagaacatcagtgtgtatttacataaacctagatggcatgggctcctacacacgtacaggctgtatggtatggccggttgctcctaggctacaaacctgtacagcatgtaactgtagtgaatactgtgggcagctgcaacacactggtaagtattggtgtctatctaaacagcaaaaagatacagtaaaaagacagcataaaggattaaaaaaatactacacctgtatagggcgcctgccatgaatggagcttgcaggactagaagttgctgtgggtgagtcagccagtgagtggagaatgaatatgagggcctaggacatgactgtacactaatgtaggctttgtaaacactgttcacttaggctaactacatttatttaaaatatttttctttaataaattaaccttagcttactgtaacttttttactttatttttactttattttttactttattaacttttttattttttgttccttttgtaataatacttagcttaaaacacaaacatgttgtactgctatccaaaaatatttcctttgtttatatccttaattctatagtcttttttctgtttgtaaatttttttatttttttaactttttaaacttttttgttgaaagctaagatgaaaatacattagctgttagcctaggcctacacagggtcaggatcctcagtatcactgtcttccacctccacgtcttgtcccactgtaaggtgttcaggggcaataacatgcatgggggccgtcatctcctatggtaacagtgctttctggaatacctgcctgaggctttttttagttacttatttttctagaagtagaaggagtatacgctgaaataatgataaaaatatagtaaacacataaggagtgtgtagcctagatccctcgcattcacagttcacagtcgagttcacactcctacaagaatctcatgctgctgctgatcccacaggaggcggagctcggaccagaatgctttcttgctcgccactcacctcttcctgtgtgcccaggttcctaacaggttacagagccctgcacttggtgataagaatttttcagctccatcataatcttacggggcccctgtcatatgtgtgatttatcattgaacaaaacactgttatgcagtacatgactataccagtttcttgagtccttctagaaattgctgtgcataactagcacattttcccttttgtctttttaaacaaatatatcttctgttttatacgttgactcctttacttaccagacttcttgcatagctgcatagtatttcattgaatagaagctgacaaattcagtttctcagaagtaaacatttaatagggacttaggaacagaaatgatgtcttgggtggctgcaagatggtggatccctgcacttaccctccagaaagtatgctttctatagaggcttttttggttaaacatgcagctggtcacacattatactttcttgtgaaacttatgagcactagctggtggggaggcttggtagacatctttgtgtggaattatttatgctacccaacactttgggatgcgggagtcagatattggtggtcatagtggttttgcatcaagatggcatcactcttgccatgcaacaggcatgttttcttaatctctaaggtctatcacaaagtggaaaagcaaggtgtaaagtgaggggagaggtgaagattgtctgtatatgtctagaatattttcttgaaggatcgaaaaaactggcaactgtgtttgcttctggggaaggagggacacttttattgtacactcttaactgtttgaattttcacatgtttggcatccaacttgtccattttaaagtcattaaggaaaaaagcttataaaaatgctatcttgttactttaaatttgtctctccttaatagaagtaatgtcagccgggcgcagtggcttacgcctataatcccagcactttgggaggccgaggtgggtggatcatttgagctcagtaatttgagaccagcctggccaacatggtaaaaccccatctctactaaaaatacaaaaaatagctgagcatggtggtatgcccctgtatgccagctactccggaggctgagcaggagaattacttgaacccaggaggcggaagttgcagtgacctgagattgtgccactgcactccagcctgggtgatggagtgagactccgtctcaaaaaaaaaaacaaaaaaatcagaagtaatggcatttcatttattcatatttatgtgttatttgcatttccttttctgtgaaccacctgttcttgtccttttccagttttctttcagattgttactctcatggatatgtaagaacttttaacataatttttaaaagtagccctttgcccaacatgacccaatttagaacacacatctgcccactgtttaagccatctggaaaaggagaggcccagtctccctccagctgctcttctactaattcatatccttcatctcaataagcacctccttatctttaagcacagtccttcagatgataggttcagtgcatttcctctttctcttctgtgaaatcttctgtgaaatcctttctaggacttcaagtcagccattcattgagaatgtaagaacttactatgaactagatggaagatacaaaaaattgctgcccctgagtgtgtagcagacatatagccatagcagtattgaaatgtgccattggaggtgaatgcagagtgctgtggggacacagaggacactgctgccactgtctgccagggagctgaggaaggttgcatagagaggggaaatgctaattgagtaactacgtttattaactatctcgtacaataatatactttagttgcttcttaatgtgaattatgctgggtctttttttcctttctgtctactgtggctggtgacgttaactaattttatgacttcttttctgttttttttttttttttttttggagatggagtctcactctgtcacccagggtggagtgcagtggcgcagtctcagctcactgcaacctccgcctcctgggttcaaacaattctcttgcctcagctcctcgagtagctgggattacaggcatctgccaccacatctgactatttttgtatttttagtagagacagagtttcaccatgttggccaggctggtcttcaactcctgacctcagatgatccacccgcctcagcctcccaaagtgctgggattacaggcatgaaccaccgcgacagccatgacttttaatatctaaatgctggagaccactcagagctcccgattcctccatctagttgcttacttgtcacctctgtttggattaacatccctaatatgacatgtccaaagcagaactcttgggttttgcccccttcgcttcatttcccccaagtctttcccagcttagtaagtgataccactgtctacccagtggctcaagtcagaaacctgaggatcatcttttcctctatctcctttacctccttcgtcaactcatccttaagtcctattggttatacttagaatttctatcccaaatcccttcctcttctttccacctccagcgtcagcactctaatccaagccactgtctcatctagactgtcacaatagcctcctaactgatctttctactttatttactcaacacttatttatggagtatcttctattttttttagaacaggaaccaaacattaaccaatagtcacctaaagaaatgtaagatctcatatttgataagtattccaaagggctggagttgcagcgagaatcaattatagcacagtttgacttaggaaggagagggggaagggcttccccaagaagtactgcctgagctgagactttaaggatgatgaagagagaaagactgagggttctaggcgaaggacactgttaaatcctgtggtgggagaagcgcagagctggcaaagaggctgagaggaggcacttatggcaatagccccatttggctagtggctaccatattggatagcacagctctaaaggattctagttgcataattaacaaactttatcatatatgtaaatatatcagtataaaactttgcacgtaagagttcatattcttttcaaacacatggggcagtcatgaaattctcctggatccctgaggtaaagatactacacaatctgtccctcctgaccgccttcaccatcttcttttcatgccactgtccctctcattctgaacttaagcccactggcctgcacgggcctgccagcatggacaaagaaaagagtgaaggcatttagttgcttcggatcatcaaggaacagtgagaaactccatgtggttgaacataaacgttgattccttttactgcctgagctgctaagtcttgaaactgaagcctctgttatatgcagttagagtatccaaagctgggttctcagccagtggattaggatctggttgaaagctaggattcttgatgccttgtctggtacatttccaagctgttttgctccaccatgctcttccctctgtgtttggaaattaccagccggagcggtagaagccacctccctgctccacttgggcactttattgtcagcgcagctcatgcgcccaagatccattccttaccccagagttagcttaagcctgccaggagtcaaaaaaacaactcccagcaaaacctgggtccctggcctaaggccgaccttgacctaatgacctctccaggtcaagtccccttgagctaataggaagtaaatgagggaatggagttgggcgctttaaaaatcagacagtgtatgaagtaacagtgacttgtggggagaaaggtagtcccttctgattttgcttaagaagagagtccaagttggtgctagcatttcgttaagccttcctcatacttcataatcttcctttatagtaaggacaggctcagagcctttgcaggtaacagtatctagtcagaattttataacatgattttatcatattctgttttacagccaccttcaatatgtggcaagtgatactggttttccatttacagtagtgaaacaaagtttcctatttcagtgtgtttacatttttatctcttttttcatacctagtattacggatatttacatttttagagtctgtttgtttattttagagatggggatcttgctgtctcgcgcaggctggagtgcagtgatatggtcatagctcactgcagccttgacctccagggctcaagtgatcctctcaccccagcctcccaagtagctgagactataggcacagaccaccgtgcccagctaatttttttttttttttttaagagacaggggtctcgctatgttgcctgggggattactatgttgcccaggctggtcttgaactcctggcctcaagtgatctcccaccttagctcctcaagttgctgggattacaggtgtgagccacaatggctggctctaagaagtcaatttagagaaaaatattaattaatagtccaagtaatacctggatgtggcacaaatcatgtggtgattcatgaatgaccaaaatctaggaaatgctgccttagaaacagcttctgtttgacgggtccatatgtttgcaagactggccacatcttcagcaaaactaacccttccttggaacaatgtcagggtctggcacttgtcttcattctctgtttctcatcccaaaggttcgtttaccaagcaaaagttgggggtcgctggttcccagccgtctgcgcacacagcaagaagcaaggcaagcaggaagcagcagatgcggctctccgtgtcttgattggggagaacgagaaggcagaacgcatgggtttcacagaggtaaccccagtgacaggggccagtctcagaagaactatgctcctcctctcaaggtccccagaagcacagccaaagacagttaagacgtctacttttggtgccttttttggggggggggggtcctcctaactcctaagtggaggtggctcttgctgtcatgcgagttattcctaggctttactcttagcctcgagagagcagtaactgggacactagatgtaagaaggaaaagatgactcacacgacaagtagagcttgatctccctgcccacggtgaatatggtggacacagcctcagctttgtggtgctgacacagcctcttttccccacagctccctctcactggcagcaccttccatgaccagatagccatgctgagccaccggtgcttcaacactctgactaacagcttccagccctccttgctcggccgcaagattctggccgccatcattatgaaaaaagactctgaggacatgggtgtcgtcgtcagcttgggaacaggtgagtgaggctctgagacatgccgcctcccatggcgcctgaaagcgggtgcctctcatcctcccctggagtccatgcatgtaagtccaaggcagggagaagagacttcattttagctacagtcaattcagagtgaggaatgagttcttagttcctagaggagagaatatgggagtctaggatctgagaaactgaggctgtttctgccttgaagctttcagaacaaatagccttcatcctgttttccatcggtttccttccattattctatttctgttttaaacaccttcctagggaatcgctgtgtgaaaggagattctctcagcctaaaaggagaaactgtcaatgactgccatgcagaaataatctcccggagaggcttcatcaggtgagcgaggtcagagctgtggcccggctgcccggctgtggagagctccagttccctgccccacatggctctgacacggcctctgaatccccctcagacagacgggtcatgatgtggcagtggcagcctttgcttttcacccgtccatttgaacctgtctgatggaatccatcccctctgtgacctgagctgcctcccactgctcggcctgtttttaaatgctgtccttttttctgctaactctgctgcttcatgttcttttctaaaaacacaaaatgaccttttagtcctcagggccttgaggatgaggcagctttccatttccgtttgaggacctacacaaccttgatgcccctgccagctttctcctctagctcaccttttctttaatttatgaagggagagacttagaaaggagcaacagcttcctgtagtccttgaatcagtttgctctgctctagaatccctgtagccgccatagcgaggagccctcagcagaaatgaaggagacccaaaaggctaactatgctttatgaaatgctgaggtctcccctggagaatttccacctgataaactgtgaaaggtctgcaacattgagacttttccttactttctcatttggaggtcagattatagaaacaactgcttttcccagaattgaacctgccttcctaaccagactttctttttgtaggtttctctacagtgagttaatgaaatacaactcccagactgcgaaggatagtatatttgaacctgctaagggaggagaaaagctccaaataaaaaagactgtgtcattccatctgtatatcaggtctgtacagttcctgttgctgccagggtgggccctgccaggctgttagaattgggtatccaaatgctctcctggcctgtaaatcgaacctgatacaataagccacactccactgtgggtttgaggtccatattcaggtgtagatgactcacatgtactgctgtccacctccagtctcccatggtaggccttagaaaacatcccttgcttctgtcacatctgactgttttggagccccacgaaattgcagatttcccacaggtgagttttaacagccacccctgtttttcagcactgctccgtgtggagatggcgccctctttgacaagtcctgcagcgaccgtgctatggaaagcacagaatcccgccactaccctgtcttcgagaatcccaaacaaggaaagctccgcaccaaggtggagaacggtgagtgatacatgcccccgcctcctttcctcaaaaggctctgcaaggtccagggaccccaagtctctacaaggctgctaggattttaccattagtcactgggcacagaggtgctgtttacaggaaagggaagacctgggtcagggagctgtgtggtaagatcagggttctattttgaatgtgttagtttgggagatctgggagatccccaagtcaaataggaggtgggggttcccatgtggagctcagaggagggagcttggctggaaatagaaatatgggagtcatccccctatagggtcttcatggccatgagaatgcataggattacctcaagaaagcggggaggaaatgaagagtgcggcacaaccaagccctgaggagttgacagatgaggatgccaaatgctggggtcccctcctgtctagctggcagttgactctgccttgtccactggctccttctctcctatcctctcctgtctccttactgtctcttcgcatccactccattgcgttcaggccacgtcagcagtcatcatggtggtcctgaaaccttgctaaataccctaaagtatagacacagttaccatggagccggtgctccactcctaggtatatgctgcagagagatggagatctgtgtccacacggaaactaatatgtgaatgttcatggcagcattactcacaagagccaaaaaagtggaaacaacccagacgtccatcagctgatggattcataaataaaacatcaaatatatccataaattgaatattattttggccataaaaagaagtgaagtgctgatacatgcttacaatatggatgcacttgaaaacttgatgccaaatgaaaaaagccagtcacaaaagatcacatattgtatgattccatttatatgaaatgtccagaatagacaaatccatagagacagaaagtagatgagtggttgccagggccaggagtgggagagttggagagatgaggagtgactgcgccaatgggtagaaggtttctttttggagcgatgaaatgttctaaaattgactgtggtgacagttgcagaactctgtgaatatactaaaaatgactgaattgtatgctttaaatgggtgaactgtatggcatatgaactatatctcagtaaagcatttttttttgtttttttttaaacccgatagtggtttcccactgcactgcatatacaagcaaaacctgctgtgatcacccggcctcctctcatgccactttccccatccctcgcatatgctctgtccacactggctctctgtcaggcgcctgaacagccaatccgctggctgccttggggcctttgcttttgtcctgtgtgcctgaaacacttactccagctgtcctcctccatgtctgggctcccctgctgctgctgtcccaggaggtgtcccctgtggtcctccgtcatagctgcctcagagccttcagagcactgtcagcatctggaattcttccgtatgtactggctactggtttagtgtctattctcttccctttcaatctcctcaccaccatagatgttttaagaggacaaagatcttacttggttttgctcaccgttctttcccagcaccaagcatagtgcctggcgcatagcaggggctgtgaaatatgtgaagaatgaatgaatgtagcctgtggcccaagcttaaggaggatagaaaccacgccagggagtggtttggtccattggcgcctgtgggtctgacccaagtctctcacacaggagaaggcacaatccctgtggaatccagtgacattgtgcctacgtgggatggcattcggctcggggagagactccgtaccatgtcctgtagtgacaaaatcctacgctggaacgtgctgggcctgcaaggggcactgttgacccacttcctgcagcccatttatctcaaatctgtcacattgggtaaggggcctgccttgggatctggaactggtctgtccttcttgtgcccagatcccaaactgcatgctttattgccaggtgttttgtctcccttatcaaagtgagcatgattcactcctcagtaattgattgagtgtccagtctgctgtggtaggaagatcctggtagccccagtcagaaggtgcttcctaacaaggcagctgtttctctttcttgacaactatatcttgtacctccaaaatccccacatgcttctgcctcttaacagcatttggtgcaaacacaggtatatatgtttctcttttttgtactcaggttaccttttcagccaagggcatctgacccgtgctatttgctgtcgtgtgacaagagatgggagtgcatttgaggatggactacgacatccctttattgtcaaccaccccaaggtgctataacccccttctattttccctgacattttcctccttttcaagcagtcatgtaaacagaggaaaaatgtacactgtgggcaaggggaacattgcccacagtggtagcccacaagggaacattgcccacagtggcccaccaccaacattggttggtctcccaagaacttaaactttcttccttttggatgccaagggcttttcttctcttagtctggaattaatctgaatcgaggtggagttagtatgtctagagggtgctcagtcttagccaaacagaaccctaaatacaggggaaagatcatgaccccacacttcctctctcctatgagtcttgagtccctgcttcagaatcttattcctgaaaggtttccatctttctcccgttgcttctgggattcctaggttggcagagtcagcatatatgattccaaaaggcaatccgggaagactaaggagacaagcgtcaactggtgtctggctgatggctatgacctggagatcctggacggtaccagaggcactgtggatgggtaaggagacaggagagcgcagtgaggaccaagcctctgccctgacttgcaagggtgcatcatacctctgcagtctcagggcttgagagccgcctcccctcccacggtgtctccactgtgagctccttatcttacaggtcccaggtgaataatgagtgcttttgtttctctaggccacggaatgaattgtcccgggtctccaaaaagaacatttttcttctatttaagaagctctgctccttccgttaccgcagggatctactgagactctcctatggtgaggccaagaaagctgcccgtgactacgagacggccaagaactacttcaaaaaaggcctgaaggatatgggctatgggaactggattagcaaaccccaggaggaaaagaacttttatctctgcccagtatagtatgctccagtgacagatggattagggtgtgtcatactagggtgtgagagaggtaggtcgtagcattcctcatcacatggtcaggggatttttttttctcctttttttttctttttaagccataattggtgatactgaaaactttgggttcccatttatcctgctttctttgggattgctaggcaaggtctggccaggccccccttttttcccccaagtgaagaggcagaaacctaagaagttatcttttctttctacccaaagcatacatagtcactgagcacctgcggtccatttcctcttaaaagttttgttttgatttgtttccatttcctttccctttgtgtttgctacactgacctcttgcggtcttgattaggtttcagtcaactctggatcatgtcagggactgataatttcatttgtggattacgcagacccctctacttcccctctttcccttctgagattctttccttgtgatctgaatgtctccttttccccctcagagggcaaagaggtgaacataaaggatttggtgaaacatttgtaagggtaggagttgaaaactgcagttcccagtgccacggaagtgtgattggagcctgcagataatgctcagccatcctcccatcctgcactttagccagctgcagggcgggcaaggcaaggaaagctgcttccctggaagtgtatcactttctccggcagctgggaagtctagaaccagccagactgggttaagggagctgctcaagcaatagcagaggtttcacccggcaggatgacacagaccacttcccagggagcacgggcatgccttggaatattgccaagcttccagctgcctcttctcttaaagcattcctaggaatattttccccgccaatgctgggcgtacaccctagccaacgggacaaatcctagagggtataaaatcatctctgctcagataatcatgacttagcaagaataagggcaaaaaatcctgttggcttaacgtcactgttccacccggtgtaatatctctcatgacagtgacaccaagggaagttgactaagtcacatgtaaattaggagtgttttaaagaatgccatagatgttgattcttaactgctacagataacctgtaattgagcagatttaaaattcaggcatacttttccatttatccaagtgctttcatttttccagatggcttcagaagtaggctcgtgggcagggcgcagacctgatctttctagggttgacatagaaagcagtagttgtgggtgaaagggcaggttgtcttcaaactctgtgaggtagaatcctttgtctatacctccatgaacattgactcgtgtgttcagagcctttggcctctctgtggagtctggctctctggctcctgtgcattctttgaatagtcactcgtaaaaactgtcagtgcttgaaactgtttcctttactcatgttgaagggactttgttggcttttagagtgttggtcatgactccaagagcagagcagggaagagcccaagcatagacttggtgccgtggtgaaggctgcagtccagttttgtgatgctgcttttacgtgtccctcgataacagtcagctagacacactcaggaggactactgaggctctgcgaccttcaggagctgagcctgcctctctcctttagatgacagaccttcatctgggaacgtgctgagccagcaccctcagatgatttccctccaaactgctgactaggtcatcctctgtctggtagagacattcacatctttgcttttattctgtgctctctgtacttttgaccaaaaattgaccaaagtaagaaaatgcaagttctaaaaatagactaaggatgcctttgcagaacaccaaagcatcccaaggaactggtagggaagtggcgcctgtctcctggagtggaagaggcctgctccctggctctgggtctgctgggggcacagtaaatcagtcttggcacccacatccagggcagagaggtctgtggttctcagcatcagaaggcagcgcagcccctctcctcttcaggctacagggttgtcacctgctgagtcctcaggttgtttggcctctctggtccatcttgggcattaggttctccagcagagctctggccagctgcctcttctttaactgggaacacaggctctcacaagatcagaacccccactcacccccaagatcttatctagcaagcctgtagtattcagtttctgttgtaggaagagagcgaggcatccctgaattccacgcatctgctggaaacgagccgtgtcagatcgcacatccctgcgcccccatgcccccatgcccctctgagtcacacaggacagaggaggcagagcttctgcccactgttatcttcactttctttgtccagtcttttgtttttaataagcagtgaccctccctactcttctttttaatgatttttgtagttgatttgtctgaactgtggctactgtgcattccttgaataatcacttgtaaaaattgtcagtgcttgaagctgtttcctttactcacattgaagggacttcgttggttttttggagtcttggttgtgactccaagagcagagtgaggaagacccccaagcatagactcgggtactgtgatgatggctgcagtccagttttatgattctgcttttatgtgtcccttgataacagtgacttaacaatatacattcctcataaataaaaaaaaaacaagaatctgaattcttagaaagttttaagtcctggtttcttgggggaggtgaaaatgggaacaaagggacctgtggccctggggtttctgataacagcaccagtggcatctgacatgaacctgtgggggacagggctgtccctcagcctttggaaaggagccatttcaaagaacctccctttgtgggtaaatttgcgtctgggtggggtggggttcatcaggcaccttttgattacgtacccagcagggcccttccccagcagagcccacgattgattgattgattgattgattgattgattgatttagagatggagtatcactctgtctctcaggctggagtgcagtagcgcgatctcggctcactgcaagctccgcctcccgggttcacgccattctcctgcctcagcctcccgagtagctgggactacaggcgcctgtcaccacgcctggctaatttttttgtatttttagtagagatggggtttcaccgtgttagccaggatggtctcaatctcctgacctcgtgagatccacctcagcctcccaaagtgctgggattacaggcgtgagccactgctcccagccagagcccactattaaatatcttgtcccacgggacttgagacgcaagatttcaaggcccagagtaggaaaacatcccttgagagaggatcacctattaggtacataattccagctctccttcaggggtgttttctacctcctccaaaccccactactaccagctgtttgacttccaggaatgtgcatatttggagtaaagttgcagccaggaccaggacaggcttggttgtagttttaggagacagaccattttctttttacatcatagatgacatccaaattatctctccatcttgaatttcagagagaatgtaccttttttcacattgtaatttacatcagaatttctagaagactcatcctggaccctttaataatatcataaccagaggatctaaagtacctaacagtgaggctaagttccaattaaacctgcctcatccattacacagaaggaacaactgaggctagaagggccagtgacatgttgtttgtgggcatatttcttgaggacctgaacaccacaacaccacaggtgtcattcattgcctactgagctacattgctgggtaagctgaagttggttttttgttttgttttgtttgagacgaagtttcgcttttgttgcccaaggtggagggcaatggcacgatcttggctcactgcaacctctgcctcccgggttcaagcgattctgcctcagcctcccgagtagctgggattacaggcatgcaccgccaccatggccagctaatgttttgtataccatgttggccagcccagtctcaaactcctgacctcaggtgatccacctgcctcagcctcccaaagtggtgggattacaggcgtgagccactgcacctggccaacacttttaagtggaaagacagtgaaggctgttgtctctgcctgctgtgatgtaccaggaaccttgagtgcctctgtcctctctgttctcagacagctccggttccacatggacagaaatgtagtgccaggtcttttgaaaagtggacagtttcctcagcctgaggcaagtgcccagccactttgtgtccagagggaacaacactgtcctcccacgacgctccctgagtgggctgggaagtagggctgccctgagggagcgcaagagggattttcttcagctcatttcagttgctgtctacctggcatttcatttagggggctcacaatttaatactgtttccaggatgtaggcccagatctgcaggtctggccttatgcaaactgcagccttgacttcccagagcacgggggctgtgagaggaaacccccgccatccccgcctcaggagagtggtcctcacctccgcccagccctttacaaaggactcccgggggccttttctggactctgcctactccaggcccagtcatttggccatttcttttccatctgagtgggtt

SEQ ID NO: 131 - DNA, 30723 bp, Human
  misc_feature (1)...(30723): n = A,T,C or G
gggcggccccagagtgcggtccgccctgcccacacccacctccgccggtcctcgcggttggtcaggcctcggggggctgctcggtgcccagagggcggcccatcgcccgactcggtggcgctgcccctaccccatcccggcgcgggcccggcgacgcgggcagcgcggggccgagctgcgggcggagcgggcgcgggtctgcggagcccccagggctcgagcgggccacggagtctgtccgggagcagggggcgttgcccggacgctggcctgggtccccggtgcgggaggcagtgcggcggcctccgcccgcccctgcagcgggatgtgaccgtcccggagagccagccgccgccttctgcagcgctggccccgctcgctccgccgcagcccggccgggacgcgcgggcccgccccgcccagccggggttctcgccgccgtcattcccctcccgccccctcactcccgtcctctcggggctcctcccacgaccctcccaatggcgcctccggagcccccatcccttatcccttctctctcccagctgaagcggacgagtcggcgggggcgtggggggtgagacgcgggtgctagggtctccggcacctgggagatccccttcctccccgcgtggaagagccaagttgggaagaggaattccacctccagtgcccgaggggctaacaggagaggggagagagtgagggagataataattgctttaacaatcccttacttgtagactgcgtcagcttttaagtctctttcccattcataatctcatttaattccgttcgctttctcattcattctttcatttattcaccaaatatttattgagcatctcctatgtgtctggcattatattaaaacctggagatacagtgattgttaagagtgttgggcttctcgggagaatcaaagcgcaaagacctatggcttttttaaaaaaattattattcctttcttttctttttttgtttttctaaagctctaccacttacggtgtggttttggagaaactggtttatctgtgcttcaggtttcccacctgtaaagcaaagcgtgtgaaatctcacagggttgttgtgaggctcaaatgagacgggaaagatctttataaatctcacaacactatgtgactggatgatggagattaatttgcaccaatctgttagttacttctttgttcaataacatgtaagcccttacattatatcatgctttggttgagcttgaaatctgaattgagaacctgggtgtgagtcccaatttgtccagctgtgtgatcttaagcaaccaactaaactactctgagcctgtttcatcatctgaaaaatgagggtgtcaatattgaccaacatcttagtgttggtgtatccaatgagatactgtctgtgaaaagtgtgttgttcagtgtaaataaatgttggctaacattgtatttagggcagattctttggtttctaattctcaatgcagtatttctgtttctgtgggatttttcccgctgtaatatccagtacagtgtgtgcacacttggggctcagaagcttctactgccttcctttctgagaggagaggataaaatgggaccagtgggactgactgtgtgtgctgagcatgtgatcaagccatgggccaggtcctctgacttgtgctgacttggtgaccctgatctctggcctcggaggacacttgcccagggattctcactgccgtgggtgttgtcctgcactcccaggctccaggtcctctgtagaagagggcattgtcccggtagggcaagagtcccgagcctcaggtcttcctcttcaggggccaaagcagaggctggcgagtcagggtgcttgcaaagaggaagcccaggagtttccctggggttaccagagggctgggggcctagtgaccaggaaagggtggtgctctgagagcccagggtgcttgggttaatcatcactggggctcagataaggccctgccaactggaagcagagtcattgtgaccagaggggtttgtgtggctgaagaggcaggaggaacagtgtatccacagcgtgggaccatgccaggcacaaaacggtttcaacatgtcattgagaccccggagcctggcaagtgggaggtgagaccccttcttcatgttggctttctgtgctgattcctagaattatttttcatccagtcttccctccccgctggtttctgctcacctcttcttccttcctgatgttctttccctaatatgcccagagcaccaagtgcaggctgagtttctggtgtggtatgtgtgtgcgtgtgtgtaagtccaaactctgtgcctgctgccactcccacctccagctcagcaggcatgaatgaggctttggcttcctgctccatccttgtcccctcttccttctagttgtctgggtacgaggcagctgtgccaatcacggagaagtcaaacccactgacccaggatctagacaaagcagatgctgagaacattgttcgactgctagggcaatgtgatgctgagatcttccaggaggaggggcaagccctgtccacataccaggtaaccaagacccaagacctggaccctggaaataaacatgccaaccccaaccccacctctgctctccctcaccatggctcctaatatcggaaaccctgagaccccctcccccattcatcgtcctccttttcttggcttctcattcctgcatattccctacagagactctacagcgaatccattctgaccaccatggtacaggtggctgggaaagttcaggaagtgctgaaggtactaaccttccttctgttccctgcctaaacttttctgtttccctctttctctttttactgtctctatttctcactttgatagatctcattctcctttctcccttttggagatcctcccttttggatccttattttcatcttattaataaataataatgataacttctctgcttaatactttataattgacaatctactttcacacctattaccctcacaaaagcctgtgaagttgatatgacttctgtttgttttcctcagatgaaaaaacaaagatttagaaaggataatcactgtagcttgctcaaatacactgagctaataattgctggataatgctgcttttattatttacttttatttagatgacaaagctgctttcagttctttctgggagaagtaaggatttgaacaagtagtggagcaagacatgggagtcaaactggtttctctaatccaatgttctttttgctacactacattgcatgtatttgttcaattttgtgatgagaggagggataaggagtctttccaattcctcttgcattactgacaaagaaaagaatattcttctcccaacctgagccaggccctggtaatatatgcctctttccttcttcaggagccagatggggggctggttgtgctgagtggagggggcacctctggccggatggcattcctcatgtcggtgagcaccctggtctccagttttcttccccctccacttctggaggtgaccctcaggaccataaagatcatcataactaagctcccaggtggccccctcactagacctggactccaagcctggctctttctctcttccaaaagctagatgtcaccatgaagtcccatttcttctgagcccatctgagtcccgccagtatgttgccaatgtctctacatcccatgcaccaccgactaatcatctccaagtagcagctttaagtgcgagattccatgtaggactgggttaagcactggtctaagagaatcattatatagtctctgccctctaggagttgaaaatccaagataattgtttcttctctgtcattacctctttacatcctctccctgcttgacaggtgtcctttaatcagctgatgaaaggtctgggacagaaacctctttacacctacctcattgcaggtggtgacaggtaagccaagttagcctatgaatattttgtttgacctaaatagtatttcttagaaattgagttggaatacctttagacagagattgtgtctggcttgtcttagtcctcaccattccttattccctcacacttggcccacttcacatacttatgtcgcctgactggctgttgtaggtatttgagtttttcaactctatggagtgtctatcatgcaccaacaaactgtgggtgctcattcaatgatagttttccctttatgcgcatctcttaatgtagcctgccctaatacgccataggcttctgcttcccagccactgccactgaccttgagtctgtcctcttaggtctgtggtggcctctagggaggggacagaagatagtgccttgcacgggattgaggaactgaagaaggtctgtgcttttcactgacattgaccagagacctctatctgttccttctcatggggacataaaagccccagcattcagccaaagcctatttcctccctcccctgttcctggccctgatatcctcacacagtagatttgtgccctggaatcctcccagttacactaccttgtccatcctcctctcctaggtggctgccgggaagaagagagtgattgtcattggcatttctgtgggactctctgtgagtaaaaagatgggttgagtggatcaattttagagagaggaagtgagtgggaatggaatagcatggaagatagatcaatgagatcggtgctagaaggcaggaagtttgctcaaggaattttggttttagtttcactaacttggatcaagttgtgtgaatgtgggaagatggggaagggattctatttcagaataactgtgtatcaatcaatcaacaaccaagataggtggactagtccaggggtaagcaaaatatactggctggccaatgcagccagctgcctgtttttaaagttttttgttgttgttgtttgtttgtttttgagatggagtctcgctctgtcacccaggctggagtgcaatggcatgatttcggctcactgtaaactccacctcccaggttcaagcgattctcctgcctcagcctcccgaaaagctgggatcacaagcgcccaccacaatgcccggctaatttttgcatttttagtagagacagagtttcaccatgttggccaggctggtctcgaactcctgacatcaggtgctccacctgcctcgctcagcctctcaaagtgctgggattacaggagtgagccactgcacctggccctaaaataaaggttagtttttgtttttgttttggttgtcgttgttgtttttgagagtctccctctgtctcccaggctggagtgcagtggcataatcttggctaactgcagcctcctcctcccaggttcaagcgattctcctgcctcagcctcccgagtaactggaattataggcacatgccaccatgcctggctgattttgtattttcagtagagacagggtttctactaaaaaagaaaactggggaccaggatgctcaccgacatgaggaatgccatgttggccaggctagtcttgaactcctgacctcaagtgatctgcccaccttggcctcccaaattgctgggattacaggcatgagtcaccatgtccagcccctaaaataaagttattggaacacagccatttttgtttacatatggtctaaggcctcttttatgctatagccatagggttgagtagttggacagagaccatagggcccacaaaccctaaagtatttagtatctggccttttacagaaaaatatggcccctggactagtctcttgctacttaaaatgtggtgcctgcaccagcaacatcagtgtcacctgggacttgttagaaatgcaaaatctcaggccccactctggacctactgagcattttaacaagatttccaggtagtttgagaagcactgagccagatgactccaagtttcctctcaattctgcagctctctggctctaagaattcacttcgcagaaactagatcccaccagtgttatatatggaaggaagcacacaaagagaagaggatattgacttcaaagagtttacgattttagttcagtagtattccaactttaccgtgcagaagatttccttggagaacttgttaaaaatgtagtgcccttgaggtacttgttaaaaacgtgctcccccttcaaatttggatccagtagattgtaactgtacctgggaatctgcattttgaacaagcattctgaagggttctgatgcacttgagccttgggcaccactcagagtaatgaccccctcatcatgcccttctctctcttcaccatcaggctccctttgtggcaggccagatggactgctgcatgaacaacacagctgtcttcttgccagtcctggttggcttcaatccagtgagcatggccaggtgagccttctggaatgactgggcagccctggggcaggctggaggggaacatgtcaaagtctacagtacaaccacaagggagagaacagatagtcttgttcaccaaatctcagaatattaaagtaaatatggggtgcccctaagcttataaggttttttgtttgttggttggttgaattattctcttcttgtttcagaaagcattaaaggcagcttataaaggatgcataaaatataagatagcatacattcaaaacagggattgaagaggcaagagaaacaaggaataaaatggaggataaaatggggtcaggaagatgcataccataaagatttgtgctttcatatgggggtgagccccaagcaccttttcaaagtagtagtagtgggtgccagatggcctcctactcctctttgtccagttcccttatttagtgcccattctctctcatcattccaggcacccctttcctcccccgaggatcctcagatctctcactgtcttcccttccctgagagcccctcattaccaaatcacctccctcttattctctatgtcagtggtcactcttatttcagaataaatcaacatattaaaccagtagtgctcagatgtggttctgtgcatgagctgcctggggaatgttacaaaaaaataaagaagattcttagttccttgtgtaagaggtctgattttgtaggtttggagtaaggccctgaaatatctattttttgaaagcaaccctggagattctgatgcacagccaggtttggggaactctgctaaataaaccattggagtgggccacctgacaaagctgagggcttcctgacaccagagggatgcggcaaaggcttgttgattattttagagcagctttttgtatttagcggtggtcttgggaagggggacaagtgggtttttccaaggtgctttttcaccttccagattctaggcggtagtataatttatgcgaaggtgtaaatgaatctgaaatactcctaaccctgatccttttcatggagggctctccttcaccaaaaatgtatctgctgcagtggatgctaatttcaggccctatgactaagtgaaatgaagaatttcaaacaacgtaggcgtggagatcttccagttgttccttaaatcagtggctcccaaacttggctgattttcagagtcatctgggaagcttttttaaaatacagatttttgggctccactccagaactactgaatctgaatcttagggtggacttggtacccagaaatgggtagttattaaaaaacaaaactccccagatgatttggatgcccagctgtgtttaggaatctcgacgttaaaccatacgatatgaaccctctctgctttagtctcctctttcttaggactctaggaagtttcagaaatagtttgaggaagaatgacaggagacattttatacaacgggcatgaaatatgtgaaacttgtctgccctagaagtaatacagaagaaaaaaaatacaaaaatagttcaagaagggagggaacctttgcaggatgggatgataaggtgaaattaggggtgccatgtacagaagtaactaactctttgaggtcctgccacagtgggcgattcacaaattatcccctagcaaagccattagaaatcaactaaagaagatcgtcattctttgagattccgtgatttgtaactaagcagataacaagtctgtagctctcttgcctcatgaacacatttatttgttcccaattaatttactcaaggaatgttcaacaactgtgaggtgctaccttgaagcttggttccctcactgttatccctccctctggtactgagggttcactctttggagggatttccagaatgtattcccacaaatgggaagggcttctgatggaccctaagatggaaaataaggtgacaattttgacatttgaataacaggccttccctaaaggacctgcagagagtgacattagtatagccatggcattggggcttatgcaaggagcaggacacaagatagtttgggtctcaggctgggactttaaacttgagtgttggctttgctctgggcttgaggtgctgcatgttttattaacccctgtccttggggttcggggacacagtgcctctaaaagttccaaagcatatgtctgtatgaagttgttgacctctgacctcaatcccaatgcagtctttgatcatgactcccagctgaggcccttctttgagatcctcatagacaatctccccaccttgtgtctctctggacctcagaaatgaccccattgaagactggagttcaacattccgacaagtagcagagcggatgcagaaaatgcaggagaaacagaaagcttttgtgctcaatcctgccatcggggtagggcctctcctttttctatgttctccacccctccaacacctgggaactgcttgccacttccttggggcctctgattttaggttctattatatcttgtttaaattcctgaggtattgtgagtcagctaaaatgttataaaccaaatcctattttcccatttacattttcaccttaagatatttcgtcttcattccaaccctctctctcaaattggtaagccttaaacacttcagcggtctgggacagtttctatttaaagaagctctttgccatctatgtatagagagcgttgaatagccattgttatgtttcagtctgtctctctcacatatttacattttaaatatgggctttaaaaaatggggtgcagttttgtttcattcttctgcctttctaaatcctctccaaaattgggtggcccttcttaggttgaaagctgttttctcttgttcctttttttctcatctggattgcagatacatttcactagcaccatttctccttacttgggccttacgagggccttagccaaattccagcccgtgcctccctctaccagtggtgggcacaccatctgcgacattctcctccatcttccttttgtgagataagaaggtagaattccatatgacataagaattccacggctttcacctcctaaatgctcatctgtctttcctcctccctgcaaatgttgactttcaatggctttcaatcttcttttctcagtcactacttttttttttttttttgagacgaaatcttgctcttgtcacccaggctggaatgcaatggcctgatcttggctcactgcaacctctgctcccctagttcaagcgattttcctgcctcagtctgcggagtagctgggattacaggtgcctgccaccacatctggctaatttttgtatttttaatagacagcctgttggccaggctggtctcgaactcctgacctcaggtgatccgcccgcctcggcctcccaaagtgctgggattacaggcgtgagccaccgcacccagcctcagtcactactgttatcattctgtttgctgtagcctctttgtctgtctggtgtgctgtgtgccacatctggactgctgcaatcacttcttcattggtctgtccaaagcatatgacatgtggtatttggattgataaactaccacagaaaatggtggaagtgggggagaaatttcttggaaagaaacacactctctggtctgggtgtagtggctcacgcctgtaatcccagcatttgggaggccaaggcgggcagatgacttgaggtcaggagttcaagaccagcttggctaacatggtgaaaccacgtctctaccaaaaatacaaaaattagccgggcgtggtggcaggtgcctgtaatcccagctacttgggaggctgaggcaggagaatcgcttgaatttgggaggtagaggttgcagtgatccaagatcgtgccactgcactccagcctgggtggcagagtgagactccatctcaaaaaaaaaaaaaaaaaaaaaagcactttgggaggccgaggtgggcgaatcacgaggtcaggagatcgagaccatcctggctaacacggtgaaaccccatctctactaaagatacaaaaaattagccgggcatggtggcgggcgcctgtagtcccagctatttgggaggctgaggcaggagaatggcgtgaacccaggaggcagagcttgcagtgagccgagatcctgccactgcactccagcctgggtgacagggtgacagagcaagactccatctcaaaaaaaaaaaaaaaagaaaaaaaaagaaaacaaagaaaagaaaagcactctgaaaaacccttgacccagctgacaagagacccaatcactctgacttcctctccagaaagtcctgagtatacctaggagtgatcagaggaggcccttcccctctttctaatcttcctctcggtcaagcccaccccagcacccttcctcacaagcacactgggggccactggtactatcacatgcatgcccgggggttactaacaagtggtctacggggtcttcatcctctcccaattcctcttgggtgtcttcacctcttcagcccgagggtctcagcggctcctcccggatgaaaggtggaagtgccaccaagattctgctggaaaccctgttattagcagcccataagactgtggaccagggcattgcagcatctcaaaggtagggaggatctggataagagagagctcagagtcaggcgagtgtgagatggtgtggatggagattggcaggtctagatccaaggactgggctggtggcagtaagactgcagcccaccacgcctcccctgggaagggagctgggtagtacatgctgttgctcccacctcatagttgcagagtccgaattgtttccagtggatcctggattcctcaggcccagacctaatccctgagcctgcctggggcctccaaagctagcctggctccctagggtcctttgatttgggggtggtccaggccatgcaggtagagcttatcctactctggacctgcctccctctccagggtctctagcctcactcctaggctgctcatgccccttcccagtggctctcagatcctgctcctcctggtgctttcctgctgcactcgtccctctttctgctcttttgttttctgcccattgaagaagcccttgctgccccttcggaacgcagtctgggcctactctctgcacctctccagggaccagcagaatttagttctaagggagctgtgccttcacctccccgctcagggaggcacctaagctttctgagggggaattgggcccttcttgagagctggtggcttttctcccagatgcctcctggaaatcttgcggacatttgagcgagctcatcaggtgacctacagccaaagccccaagattgccaccctgatgaagagtgtcagcaccaggtgtgtggatatgtgtttagaggtgaggatgtggcccggatggagaatactgagagcagggagactctgtgagacatgttaacacggtatgggcgataggattgcatgttgaagggtcatggtttgttgactcctgtgttcttctgtggacatctctggcctctttgcacggtgatctctcatgtcctgacctctgacccattctcagtctggagaagaaaggccacgtgtacctggttggctggcagaccctgggcatcattgccatcatggatggagtagagtgcatccacacctttggtgctggtgggaccccagtccagatgttcttcctgcttcctcctgatcccaaccattcgggctgctctccaaacactgtcctactcccaacccatgggtgttcctcagtgtcccaccttccctatctaaataggcacttcagtcaaattcttcttccttagaaccccaactcagtccttgatcccttctcagctcccacccctgtgcttaactatggcctcccacaagggctactcctcactctacgccccacttgccacttttcctcccagtcccattttctccccctgaagcctagaaccttcctttcctatatagccaatcactcctctctccttgttcttaaacttcccagatttccgagatgtccgtggctttctcattggtgatcacagtgacatgtttaaccagaaggctgagctcaccaaccaggtcggagaagaacaggacttggggaagctggggagaccactagtgtgctgagggtggaagaaaaggggaaggcggagctaggtgggaagttcattggaatagacggtccagagaagagaatatgggtcagaagtcatgaggctttggcttagcatgggcagtgtggaaagctctagatccagtccccaaacttggccctagtccactgacttgttacataatcttgggcaaaacactgtaccttttgaacttcagctctttcacctgtgcacaaaagtgttagatctcctccacggccccctttagtcctcaagtctgtgctttagagtgttttcatgggagggaccctcccatcttcttctgccccagggtccccagttcaccttctcccaggaggacttcctgacttccatccttccctctctcacggaaatcgatactgtggtcttcattttcaccctggatggtgagagggaagatgggagtggtgaggggtggggagggggaaatagaatggttcagaggagctgttgtttttctgggtcttagggtacctgctcagagggagggacggggtgaatatcctgactggaccccagccaggggagcaggaggaacagctgcacagccagcctttcgactctgatgccctccccttctcctagacaacctcacggaggtgcagactatagtggagcaggtgaaagagaagaccaaccacatccaggccctggcacacagcaccgtgggtcagaccttgctggtgagagtccagccgtgacaaagggacccaggtggcagttgcagccaggccttcctggagatgcctctcctgctcctctttctctctctccagatccctctgaagaagctctttccctccatcatcagcatcacatggccactgcttttctttgaatatgaagggaacttcatccaggtatggggaatgagaaggtcctatctgcagtaaggggctcagagggtgagggattccaagaatcaaaaaacccaaggctgtagggcagaaagtttggagacctctctgaccctcacaaagccagctgggcaaggtcatgggttaccaggttactagtcagaattcccaaggcaatgaactactgggctcagctgtctctaggaatatgcaaaaagttgcgggataggcctccagtcacctgacagatgttcatttgtcctttgggacaggttaattatttttactttgagacagagtctcactctgtcgcccaggctggagtgcagtggtgcaatcttggctcactgcaacctctgcctcttgggttcaagtgattctcgtgcctcaagtagctgggactacaggtgtgcaccaccatgcccggctactgtttgtatttttagtagagatagggtttcctcatgttggccaggctggtctcgaactcctgacctcaagtgatctgcctgcctcgacctcccaaagtactgggattacaggtgtaagccgctgcgcctggctgggacaggttaattcttgataccaaagtcatcatcattatccaaaagcttttaccacaccttttttttttttgcaagtttactatgctgaattcattgcagataactttatgtgcatatagtccctgcttgccaatgaattataatccagcacaaatactgataataattacagaaataataatcagtgtgtgtgctctttgcaatttagagctttgtgtgggcattgggagctctggatgccggtctagctctacagtgtggcccaagaaagcaagcaattttacatctctggttctcagttttctcatacaccacctgcccaccctccatgggcagaatcagggccctgaagggttgctctggagagatgtggtctcttattcgttattcaaaccatgtctgtcagaagtttcctggcttgaccagacacagctgaaacactgacttacctggactcagaactcgtatagaagcggaagtttctctgcccctgaacagggaatccactctccttccaatgtctttcattctttttattttttaaagacaaagtctcactctgtggcccagactaaagtgcagtggtgccatctcagctcactgcaacctccgcctcccctgctcaactgatcctcccacctcagcttctcaagtaggtaggaccacaggcactcaccaccatgactggctaatttttgtattttttttgtagagatcgggtttctccacattgcccaggctgtttgccaactcctagactcaagtgatccacccgccttagcctcccaaagtgctgagattgcaggcgtgagccactacgcctagccaaaacactgtatttttaaagaaaaatgttcattttaacagccatacattttttatagatacattttttatagtaaagacgttacaaattacagaaatgcaaaaaagaaaaaatcactccaaatctaccatcttcaaaaaaaaaaaaaaaacactctaacaaattttggagaatgtccttttaaatttctattatatgcatatataaatatatttgtacaaaagtaagaccatacttgatatgctgttttaaagttgctttatgaacatctttctgtactaatagatcaccatcattttcaaaaattattattattattatttatttttatcatgccgggacatgttctcatctgatagatcactactatcattttttttttttttaagatggagtctcgctctgtcacccagactggagtgcagtggcgcgatctccgctcactgcaagctctgtctcccaggttcacgccattctcctgcctcagcctcctgagcagctgggactacaggtgcccgccaccacgcctggctaattttttgtattttttagtagagacggggtttcaccgtgttagccaggatggtctcgatcttctgaacttgtgatccacccgcctcagcctcccaaagtgctgcgattacaggcgtgagccaccacgcccggccactactatcatttttagtgtcaatgtaatattccactgtatagatgtaccataaattgtttaactccgattatcagacacagagacaacttcaatattatggtttttattaaagtgctgcactgaacatccttataaacacatcttttaggcatttgacttgtttcaccaggataaaccccaaaagcgaaatcactgggtcaaaggggatgtaaaattttgaagctttttgatacatacagccaaactgccctccaaagaggtttataaataaagcgtgaagttgcttgttcccttacacccttatacatactggatagcatccttataaaaaaatctttgctaatcagtaaagcaacaaaagggcattttagtgttattttaatttatatttctttaattattgtgtaggtggactacttaaaaatatatattggccatttgatactttttttttgtctttcatgtactgcttcttgtcttttgggtctatttacccattctttctttggggggtatttttttttcttatttgtaagaaggggtgtgtatagcaaaaacagtagccctttttttcttttctatatttttcccagcttaatattttcttttgtttttacgttttttatgtagagacattttatttaaaatgttacatagtcaaatctatcaatcttttcctttgtgttttttgccttttggttgatgttggttttatttatttgtttatttatttgtgagacagagtctcgctctgtggcccaggctggagtacagtggtgtgatcttggctcattgcaacctctgcctcccgggttcgagcgattctcctgcctcagcctcctgagtagctgggattacaggcacacgcctctatgccctgctacttttttcattttttgtagagacagggtttcaccatgttggccgggctggtctcgaacttcggacctcaggtaatacacctgccttggcctctcgaagtgctgggattacaggagtgagccactgcactcagcctggttttatctttactaaatgaattggaattgtttgaaataaagaggctttgtttgggctggtcaatctttagctatagaaatatttttgacagacgcnnnnnnnnnnnnnnnnnnnnnnnnnnnnnnnnnnnnnnnnnnnnnnnnnnnnnnnnnnnnnnnnnnnnnnnnnnnnnnnnnnnnnnnnnnnnnnnnnnnnnnnnnnnnnnnnnnnnnnnnnnnnnnnnnnnnnnnnnnnnnnnnnnnnnnnnnnnnnnnnnnnnnnnnnnnnnnnnnnnnnnnnnnnnnnnnnnnnnnnnnnnnnnnnnnnnnnnnnnnnnnnnnnnnnnnnnnnnnnnnnnnnnnnnnnnnnnnnnnnnnnnnnnnnnnnnnnnnnnnnnnnnnnnnnnnnnnnnnnnnnnnnnnnnnnnnnnnnnnnnnnnnnnnnnnnnnnnnnnnnnnnnnnnnnnnnnnnnnnnnnnnnnnnnnnnnnnnnnnnnnnnnnnnnnnnnnnnnnnnnnnnnnnnnnnnnnnnnnnnnnnnnnnnnnnnnnnnnnnnnnnnnnnnnnnnnnnnnnnnnnnnnnnnnnnnnnnnnnnnnnnnnnnnnnnnnnnnnnnnnnnncatggtgaaacctggatctctactaaaaatacaaaaattagccaggcgtggtagcttggacctgtaatcacaactactcaggtaggctgaggcagaagaatcgcttgaaacctgggaggcagaggttgcagtgagctgagatcataccactgcactgcagcctgggcgacacaagactccatctcaaaaaaaaaaaaaaaaaaaaaagccgggcgtggtggctcacgcctacaatcccagtactttgggaggctgaggtgggtggatcacaaggtcaagagttcaagaccagcctggccaacatggtgaaacccatctctactaaaaatacaaaaattagccgggcatggtggcacatgctcatagtcccagctactcgggaggctgaggcaggaggatcacttgaacctgggaggtggaggttgcagtgaaccgagatcatgccactgcactccagcctgggtgacagagtgagactccatctcaaaaaaaaaaaaaaaagaagataattggagatgcctgatatgttatactaattactttggtatgtgtcctctaagaacaagggcattcacctacataattacaatatacttttccactcaggaaaatgacaattaatatactattatctattatctagaccatattcaaatttccccaaatattcctgtattgtttttatttcccagatccaggatccaatcaaggataatgcactgcattcagttatcaggtcttttgggttttcctttactccagatgagtttctcagttgttctttatctctttgatgacattgatatcttagaagtaagtccaggtcagttgttttccagaatatgcctcactttggatttgcctgattgtttcgtcatgatattcaggttaaattttttggcaggagtactgcataggggaagttgtgcccttatcagtgtatcacatcgggaggtacctgatgtcagtttgcccctttattggtgatgctacattccatcgtttagctaggatggtgtctgttagatttctctgtatcctattcctcagcaatctttcacccaatggttttagcatccactgatgattcttggttgaattaattattactatggtagtttttcaatggtgattttctatttctatcccttccatctatattcagtagttggcattcttctgtaaagaaaatctctctcatccaggtgcggtggctcacatctgtaatcccagcactttgggaggctgaggcaggtggatcacttgaggccagcagtttgagaccagcctggccagcatagcaaaaccccatctctactaaaatacaaaaattagccgggtgtggtggtgtgcacctgtagtcccagatactcaggaggctgagtcggagaattgtttgaaccaggaggtagaggttgcagtgagctgagatcgtgccattgcactccagcctgggtgatagagcgagactccgtcacaaaaaaaaaaaaaagaaagaaagaaaatctttttcttctctccccgtcctatctaccctatctatctttgtttttttagtgtcaatatggactcatgaattttttgttgttgttaaatgtgttttaatccattcttattattcattatttattttaatgctcaaaatgagagttcattcaagctggttcctgtgtccttgtgacatatccacatcagtatttgaacactctttgttgtgtttctttttgtaaaataataataaccttcttatgcaaaaggtagcatcttttttatatcttgcattttttgcttaagatattctgaaaatcactgcagtgcagtttatagatctcttcctcattattacttattatttgcatttgtgtgtgtgtgtgtgtgtgtgtgtgtgtgtgtgtgtgtaacaatagtttgccctgtcaatctcctatgcaggaacacaaaaccactgacccaggctcacctatactttccctgatccagccctggagtcagtcatttttctgaggagacctgatcttgttagtgggttctagtatttagaaacccaaatgctaggtatgttcactgctactggtgtgtctttgcctctaagccctatcagtagaaagaataagggtgtgtgtatgtgtgtgtttatgtatatatacatgcatacatacatatacatatgtatgtttgtttacatacagatgaatgtgtctgcgtatatatatatatacacacacatacatctatatatacatctatataaatactgtatatatattcccactcttcttcctctttcccttagtgataatgttgatttccaacatcatcaatatatctgccgtctcattccatttccattcatgcctgtagggaattagtttaattagttactggcttatcctcctatgtttctttttggagaaaagtgtgtgtgtacatataagtttgcacttcctatacaaaaggcagtctactatactcttttgtgctttaagaagatattctgaaaatcactccatattggatcatagagctcttcctcattaatttttacctttgtgtgtttccacatatgtaatagtttactcaggcaatctcctatgtaggacatataggtttcccatattttgctatgatcaatcatgatgtaatgaatgtacatgtatttttataatgtcagaagagtatctttgggataaattcctagaagtattagagctgggtcaaacggtacatacatatgccattttgttagatattgcaaaatttccttccatagggtttactattttgctttccataccagcaatatacaagaatgctgctctcctacagcctcttggagagttttgtgaagtttttggattttgtcaacctgatagattagaaatgccacttctgtgtagttttcatttatttattattattttattactattattattattgttttttgagatggagtcttgctctgtcacccaggctggagtgcagtgatgtgatctcagctcactgcaacctctgcctcccaggttcaagcaattcttctgcctcagcctcccaagtagctgggattacaggtgcccagcaccatgcacagttaatttttgcatttatagtggagacagggtttcaccatgttggccaggctggtctcgaactcctgacctcaggtgatctgcccatgtcggcctcccaaagtgctgattacaggcgtgagccaccacgcccagccttattttattatttttttgagacagggtctcattctgtcacctaggctggagtgctgtggtgtgatcatggctcactgcagcctcaacttcctgggctctggtgatcatcccacctcagcctcccgagtgactgggactacaggcgcttgccaccatgcctagctaattttgtttcaccatgttggccaggggtgtcaccatgttggccaggctggtcttaaactcctgacctcaagtgatccactcgcctctgcctcccaaagcactgggattataggcgtggtccagaaagctttttctaacatctaaattgtaaaggaattccatccatgttttctgctagtagagatggtttctttttttcttttttaaacacttagatctttaatttattgggagtttattcttgtgtatggggtaaggcatgaatccaattatttatttttccaagtgattatccaattgttcgtatatatatatatatatatattttttttttttttttgagacagaatctcactctgtcacccacgctggtgtgcagtgatgtgatcagatttcactgcaacctcaaactcctgggctgaagcaatcatcccacctcagcctcccaagtagctgggactacaggcacatgccaccatgcctggctaattaaacaaaatttttttttttttttttgtagagacaggttcttgctatgttgcacacgctggtctcaaatccctggcctcaagcaatcctcctgtcccagcctcccaaagagctggggttactggggtgagccaccgtgcctggctccaatataatttttttaagttcatcttttcctgagtgatttaggatgctatctgtgtcacatactcaatttctatgtgcattggtctatttatggactttctattctgttccactggtttgtctattgatgtgctggtaccatatgttttaattatggaggcgttatggtatgtttggtatccaatagggtttgttcttcattcttggtttttttttttttttttttttttttgagatggagtctcattctgttgcccaagttggagttcaatggtatgatctcggctcactgcaacctccgccccccaggttcaagtgattctcttgcctcagcctcccaagtagctgggattacaggcacgcgccactacaccaggcaaattttcttttgtatttttagtagagatcaggtttcaccctgttggccaggctggtctcaaactcctgacttcaagtgatccactcacctcagcctcccaaagtgctgggattataggcgtgagccactgtgcccagcctattcttctttttaaggattttcctggctatatccaggccgatttttccatgtgtactttaaaatgaatgtgtcgcactccaaattttgtaaaatttaaaatatttttgtgttaatggtgttaatgttaatggtatcaatggttagtggtataacctagatctaattgacctctctcccaaagtgcagtctgacacgcaccctatagcatcagtactgcatacttactggccagtttcatgctgaaatttcatgctgttcttatatttagtgtcgtggacattcacttattaaaatgttttcaatataccctcttccagggttttgtgtgaacagctatttctagagttccagaataaagaggtaaaagtagcagtagcctgtttcctcagcctggctaggaccacgtgtattagtaccttttttttttttttttttaatatggagtctcattctgtcgccaggctggagtgcagtggcgtgatctaggctcactgcaacctctgcctcctgggttcaagtgattctcctgcctcagcctcctaagtagctctgacttacaggtgcttgctaccatgcctggctaatttttgtatttttagtagagacggggtttcaccatgttagccaggatggtctcaatctcctgacctcatgatccgcccaccttggccagtacattttcatactgctctaaagaactgcccgagactgggtgatttataaaggaaagaggtttaattgacccacagttcagcatggctggggaggcctcaggaaacttacaatcatggtggaaggtgaaggggaagtaaggcatcttcttcccaaggtggcagaaaggagaagtgccaagtgaagggggaacagcccccttataaaaccatcagatctcatgagaactcactatcccaagaacagcatgggggaacgccccctgccccccatgattcaattacctccacctggtctctctcttgacacatggggattatggggattacaattcaagatgagatttgggtgaggacacaaagcctaaccatatcaccagttaattaatcccctcaacacctttactgggccccagtttccctgctaatgtgccaataggtgttataagtgccccaaggtggacaagatataagggccaaaaacaaggggcagttttatactcgcgataccacatgtttgaacaattttttagttttcaacatgcctttacataggttctctcattcatccaggagatatttgtggcaaagtaggaaatgccctcatcattgaatcagaagaccgggatttaggtcctcattctccatctcgttatcatatgagcttctccaagttaatttacttctgacctctagtttcctcatatgtagaaatgaggataggtaaacttattctgtagggctgttagaaaaattaaatagaattcatttttcaacaaacatttttttttcccctgagacatagtctcactctgttgcccaggctggagtgcagtggcacaatctaggctcactgcaacctccacctcccgggttcaagtgattcttgtgcctcagccccccgagtagctgggattacaggtgtatgccaccactcctagctaatttttgtgtatttagtagagacagcatttcatcatgttggctaggcttgttgagaactcctgacctcaggtgatcccccaaccttggcctcccaaagtggtgggattacaggagtgagccactgtgcccggcctcaacaaatgtattgatcagcaaatatgtgtcagtcatggtctaaaaaactggggccctggagcagaataagtcaccatctctgccctttcaagaagcctgtggtttagtggaatgaatcccactcctcctgtctgatacccggggagaaaaaggaacaattcagcaggatcaaaattctaatatggaaggactcagagaacatgtctgtctacctaggggtcaaaaacacaaatgggtgaagctaccaggtttgcctgagacaatcctggtttacatctattgccctaacatttaaacgctgggctgctcaaacaaatcatgtttgcattttggtccctggttcttgacagttggtttcctgtctgataacagggccctgttcactctgctgcttttctgtcctctaatttttgacacccccatgtgtctgcccttttcagaagttccagcgtgagctaagcaccaaatgggtgctgaatacagtgagtacaggtgctcatgtgcttcttggtaagatcctacaaaaccacatgttggaccttcggattagcaactccaagctcttctggcgggcgctggccatgctgcaggtagggatatgatggggcagggttgggtgggacctggcctcaatgcttaggctgccagaggagggcattttgtagagatatggaaatgtgcaagggtacaggctgccttttctgtgtgcttctgctcctcctattaggtgcatcttccccttaaggagtgtgtgtgcacacatgggtgtgtttgtgaaattgtaattattaggcaagactctttcagttacaaacgtgatggaaaacgagtttatactggtttaagctaaacaaagaaaatggtggctgatataactgaacaatcttagggcagctgaatctaatgtgttccagaactttccacccttaactctgttttcccctgtgttgctctcattctttttttttttttgagatggggtcttgctctatcgcccaggctggagtatagcggtgctatttcagctcagtgcaacctccgcctctgaggttccattgattctcctgcctcagcctcccgagtagctgggattacaggcaccccccaccatgcccagctaattttatattttttagcagagacagggttttgccatgttggccaggctggtctcgaactcctgacctcaggtgatccacctgcctcagcctcctaaagtgctgggattacaggcgtgagtcactgcacccggccgttgctctcattcttaggcaagttttttccattaggtggcaaactggccaccagtagtgccagcctgacaatttacgtagcaacactagtgggcaaagagcttgcctgtcctgtggttcttgcaaatgcctggttgggggctcttgcttgggacacatgcatgtccctgaagcaatcactgttctccagagcaagggatgctctgcccagtctggatcatgtgctttcccttcaggatggtggtggaagaagggctgggaggtgagcctcaatccaacctcattacctgagcatggggaagcgatagatcctcagaggaaaaccaaggtgctgataccagaaggagtggatgttgagcagacggcacaacagatggtcatgaaaatggggtcgccagattcggcaaataaaaatacaggacgcccagttaaatttgaatttcagataaatatggaataatttttccatcaagtatgccctatgcaatatttgagatatttttgatttttttcattatatatttggatgtcctgtatttttattcacaaaatctggcaaccctatgtgaaaggaatcaatcaatgaacatttagtgagcacccaccaggtccccaaaataaactatggtccttactgaagtccagtggaggtataaagaaggtgggggtcagaatgcattatagcaaaaagaaggcctcatggaaggggtggtattttgagctaggcctggtggttatggcttggataggtggacagaagagcattcctgttaggtcattcaccaagtcccagaagggggactgggcatgatatgtgagggacacaggtctaaccagagtggcaagtcactttagagcgcagtgagggattgtgaagaagtaggaaggggagggatgtgggaggttaaagccaggcaggaatttggactttgccaaatgcagctagacctgcgctgtccaaaacattggccaccagccacatgtggctattgagcacttgaaatgtggctaatgtgactgaggaactgaatttttaattttatgtaaaaaccaaagctgtatactttttaaattaaatgtaactttaatattttggtaggactacatttctctttttagcattgcaaatctagcacccaaattgaggtgggctggctgggcatggtggctcacgcctgtaatcccagcattctgggaggccgaagcaggcagatcacttgaggtcaggagttcgagaccagcctggccaacatggtgaaaccccgtctctactaaaaataaaaaaaataaaaaaatagccgggcatgttggcacaggcctatagtcctgtctactagggaggctgaggcaggagaatagcttgaatctgggaggtggaggtttcagtgagccaagatagtgccactgcactccagcctaggtgacagagtgagactatctctcaaaaaataaaattaaaattaaaaaaagccacaaaaaaacaaattgaggtgtgctctagttgcaaaatacacactggatttcaaaatacaaaatccgaatatagaaaaatattgcaaaatatctgactaataatgtttaatattgtttacattgggttatatattgggttaaataaaatatattattaaaattgatttcaggccaggtgtggtggcttacacctgtaatcccagcactttgggaggccaaagcgggcagatcacaaggtcaggagaaataggtgaaatcacattttttttttttttgagatggagtctcactctgtcacccaggctggagtgcagtggcatgatctcggctcactgcaacctccacctcctgggttcaagtgatcctcctgcctcagcctcctgagtagctgggattacaggcatgcgccaccacacccagctaatttttttttttttttttgtatttttagtagagacgggatttcaccatattggccaggctggtctccaactcctgaccttgtgatccacctgcctcagcctctcaaagtgctgggattacaggtgtgagctgctgtgcctggccaatttcacctatttctttttttaatgcagctactgaaaacttaaacttacatatgtggtttgcattatatttttttctttatttttattttttttagagacagggtctcacgctgttacccaggctggagggcagtgcattggcaccatccggctcactacagcctcaaactcctgagctcaggcaatcctcccacctcagcctcctgagtagctgggacgataggcaggtgccaccatgcccagctaatttgttttattttttgtagagatggggtcttgctgtgttgcctaggctggtctcgaactcctgggctcaagtaatcctcctgttttgacctcccaaagtgctgggattacaggtgtgacccactgtgcccagccttgcattatatttctactggacaatgctgagctagacagagaggagggtagtgacaaaatggaagcagtgtttgcagatgaacagtcttacattagtgtgcaagatggatttggttacagaggaaactagagagagggagtccagattaccaacctacaggattggtgggacacacatgcaaatttgagcaatttgccattaatcctccagtttaacccagccagtcaagcccaccaccaacccctttaacctagtttttctttacacctgggaattacaatttaggattgccaacatggacaaatcatctacagcctctatagccaggcctcgggatcccagcctctcactctcatagtttattcttctcccttgactccattcttagttcctctggcctttagcctgacactgatcttaccacttcttccttagcggttctctggacagtccaaggctcgatgcatcgagagcctcctccgagcgatccactttccccagccactgtcagatgatattcgggctgctcccatctcctgccatgtccaggttgcacatgagaaggaacaggtatcctgcccactgctggtcattcaacaaatactttttgagtactttcagtgtgtcaggaagtttgttcggcactgggtttacaaagctcagtggcactctgctcacaaggacctccacattcatggggtctttggactgggttttgaaggatgaataggagttttcctggtcaaagtgaaggtttctttctgctcttaatccaccttgttaccaccttctaatcttaataacatcctatttgcatctaacctagtggctcctgattcctgtatcaaatgctttaactcctccagggttctgttttttttttttttttgagagagagtcttgctctgtcacccaggctgctggagtgcagtggcgcgatctcggctcactgcaacctctgcccccgggttcaagagattctcttgcttcagcctcccaaatagctgggattacaggtgccagccaccaatgcctggctaatttttgtatttttagtagagatggggtttcgccatattggccaggcttgtctcaaactcctgaacttaagtgatctgcccacctcggcctcccaaagtgctgggattacaggcgtgagccactgcgcccgaccttcctccggggttctttctctgatgacctcattccctcaggcttcagtgcccactgcctcttccccacaggtgatacccatcgccttgctgagcctcctattccggtgctcgatcactgaggctcaggcacacctggctgcagctccttctgtctgtgaggctgtcaggagtgctcttgctgggccaggtcagaagcgcactgcggaccccctcgagatcctagagcctgacgttcagtgaacccatgtttctgggtgggtgaaaggggcccaaccctgcccacttcagcccagcccgcccaaggggacttgtgccagcagaacatgtgggaggaagaagccccgtttccagggcatccgcagcccagggtagggagaaatattctctccactttgggggagagttcttgctctcgacctagtggtttctactctcaccgacttattctgatttcagaaataaaatgaaatgtcttattttggaaagttaacctttcaaagtcagtaaatcaaacagtagatcagaggtgggataggatgggtggcatgggttggtcttaacagcagatttgtttctttaattctgtccccaactccatttcattggtccctaacacaagccttatactggcatccctatattttcattaccaacatgcagccacgtgtgcatgcgtgcacacacactccaatcccacacagacacacaatgagaggtgggaacttttagataattccaggggaagagggaagaagttgtgtacctaacataggaaacccagaaaaagggcagtcttaatcagacatgacaagatctagaatgactgctacatccacgcattagaccatgaaatgagggtcacatcccctgccccgtgtttgtaagaggaacataaggaactctggaggtgctgaaagcccttggtggtgggacccaacaaacactagaaaccccgggctgtacattttagacatcagctaccccatgttttgacaaatcaaagacacccttgttcatcctagattcatgccagctctttagggcctgtgatatatggccctgacagtagagagctggttcctccttgtgcctgagaaatatccaggtaatagatactcaggaacattcctctggggatgaaactctctggaaaggtccctggaacttttaggcaggagggtgactgcaaaggagccagattttggttttatgaggatagagtaatcaacctttttaaggtggccataggcccctctgtgcatctgagggcctgcagcctctatgtgagctctgttttcctgttccacatcttcacactgatgccttggatgatcagtaatccccctttccccagccactactctcacgatgcttcctgagtaccacccctttcatcttccacaaacacctctcccaaattcaagatggctaaagttaggaaaggctcctgcaaagtccctctgcttctcttcacccacaactctctaccacgttctttcatcgggtcagttcatctctcagcatggtgtcatgaacagtgtcaagtctgagaagatacctagcattctgggaccccaaagggcagagcaccccttgatcctgttgatgatgccaactgtacagtagctcccctcccacatttggaggggatagggcacagggttagatttctccagggctggatgcagaagaactctagaagccctgagttcttttagttgccaagtacgtggatggcatgaagacatcaagtgaattcaattcttatgtagttggacacaatattcaggtattatgaatattgtgggacattattgtgggacattatgaatattgtgggatagccttgggggacattagaagctagacacactctggcattgtggcagagatgaagatgactaagatctgatgcctaccccctagaaactcacaagcacatagcaattagaatacaagacagagttgaagtggattaaacagcgggataagtacagagagctgctgaaattacagggtaggccaagagtcaaggaaagttttggaagaaaggaggctggggtggggtaaaggaacagccaaagaaaacgcaagaaggtttgaagattcacactgggatatggatctgatagcagagaatctggtcattgtcaatgggatttgtgctccaggcagagctaaagaagttcaaagatttttttagaactatccagacacaaatgatagggtgacaacttttgcagttatttggagaaagtaaacatctgagggcaaaaacagcaagagaataatccattattaatacaaggcagtaattatgtagaaaggactaaagggcctgggcctgaagactggattagattgtggaagatgaagaaaacaatttcccagcacatatatttgctggatcaaaagcaaaagggggctaggtgtgccatcctagctacttgagaggctgagatgggaggatcacttgagtcca

SEQ ID NO: 132 - DNA, 12219 bp, Human
tgttggctgggctggagtgcagtggcactatcatagctcactgcaaccatagcctactccaggtcttatgctatcatcctgccttcatagttgggattacaggtgtgtgccaccttaccacactttattcaatttttcttttttttgagtcggagtcccactccgttgccaggctggagtgcagtggcgcaatcttggctcactgcaacctccacctcctgggttcaagtgattctcctgtctcggcctcccgagtaggtgggactacaggcgcgcgccaccacgcccagctaatttttgtatttttagaagagacagggtttcactgtgttggtcaggttgggctcaatctctcggcctcgtgatctgcccacctcagcctcccaaagtgctggaattacaggtgtgaaccaccgtgcccagcccttcaatatttttaaagattatataaagaaaagcatagcttccacacacagttcaggagtcagggccctgagtgaaatggagtataaggtgatggaagattgcccctggctttgaggatcatcttgctggatgaccagagtttgtttttcatctggaagaatcatggtccccctcttggagagaacctggagtcctggccacaccttctgagcttctgacattaagattcggtgtggtgtgtgagcagctgggagtaaatgtgagaacagtcctgccaactaccttctctgccccatcaccactcacttcacctccctcaccccgattctcaccccagaaaatcaatattaagcttccctttggaggggcccctcttctttcttttttttttaaccagttttttttttctctgaagcaatatcaaacattagaacaaattcacccacacacaatgatggcctctaaatatttgaagaccatgttggtctccatgagagggcttctttgcttcagactaaaccaaaccaggtccttgtgtgatatttcccaagcctctctttatcctgccaaccctccttggatgtcacacttggaattgtcaagggtcacttaataggcagtgcctggagtcaacactggccctctgttctggccagaaagacacactgtaattctgctgagtctgcaaagaatgttcaaggggtatttgtgtccgtagctgctcgtgcagcatctcagcctgcggtgtcagactcgaacccagagctgtgtcaaaagagtcaggactcccctctgctgcccttgtgcactggcaggggcactaggttactagtgctaggagactctggtcagtgcccatctgtgctgtcacatgcagggccctggcagtgaggtctggagaaggaagagaaggggcagggaaccccacacgttttgctggtcatttcccaccgtggtcctgccacgggaacccccttcttccacctccattccccactttaggcagaaacatctctcatcctttttcttttctccaagaatcttcccccaaaatcttggcatctcctatacacatctgtacctttgctatatctgtgggccttgttctccctgtaggactcctcttggaaagctaactccccctgacattggagaattttatcaaattgctgagtatcctcccttccctctcacagaccccatggcatgctcagatcacagtagaagacatttcctctgctgccaaacccatggcactctgaggctgactgtgtccacctcattccctcagctgtcttctctttgctgctattaccatgttccaagcagactttggagcatctcccccacagcagcatggactttggcagatttcttggggaccagcgatgtcctaacctgtttgcttttccagggctgatgtttgcagggtgtttttttttttcttttgaaccaaagcagaaatcatcctgtatccttatgcaattcttccggcaggctccaacagataaataaagcccaccaccctccatgggtctacctttcccagcagagcacctgggttggtcccgaagcctccaaccacctgcacgcctgccagggcctctctggggcagccatgaagtccctcgtcctgctcctttgtcttgctcagctctggggctgccactcagccccacatggcccagggctgatttatagacaaccgaactgcgatgatccagaaactgaggaagcagctctggtggctatagactacatcaatcaaaaccttccttggggatacaaacacaccttgaaccagattgatgaagtaaaggtgtggcctcaggtaagtggacctgctgtctatgagctgaaataatgtgtacatggagctcaatcaggtgcctcaaaaaatcaccatcacccagtgcaaatgaaaccacagaggagtaaattctctgatttcttcccaggagtgagggaaggggcaggcagagggcaggagaggagacattctgtatggcagtcatgggtgtcaggagggagctgggtggggtgtgaggtggtgtgcaggagaaaaagtgcttcaaatggtagtgtgcagatcacagacagaaagtgtaacttgctggaaaaactaggacccaagagaccagctcctagttgccaagttaccactggctgaaaatcacgtatctgtctttggtttggtttctctctaacaaagactgagaatgaataaaactagcatctggcagatgcctactatatgccaggcccattcacatagattatctcatttactctttcccggtcctgcctcctggtgctgtgtggtacatatattgttcttgtcttacccaagaggagaccaaggctctgttgtgtgtgtgtgtgcagtttttttgttttttgtttttgtctttttttttttggtccaaaatcatataattactaagtcttcaggctgggatttgattccatatctgtgttccttcttctacacaaactgcctcccaaagagagttacccacatcccagagagaagtcttggcataaacacaattcacctcctcacacactagacaggaaaccaacgcagcttgaagccagtgacaagaaaaatcaagctggaaatatgcctcggggatcagtcaagagatttggagaggtggaaagaagctgtctgcctactgcctgttttgaaattagatttatttctgattaaggacaattctttcagcaaatatgtattacaagccttccttggacaagaaccagagatattaggttgaaccatataaaactgccatttttctatatcaaaagcaaccaaatattggccgttttaatggttcaacctaatacagtggtgaaaaaggcacaatatgtgcccacaagagcttacaatctaggttggaaaataaggtcaacaacaggaagcctggaccgactgacgactgccatccgtctcacaaagagacaaaatatttgaaatcaggattgctccggatggattttaagagtgctgcagccatattaaagcacagtggtggttaggaggaaacgctgatcaagtcaggggaaatgaacacgcaacacgcacatctgagggaaaaggtaatcatgaatgggcattgtgacttttactaaaggcagagcttcagagttggttcccttgagaaacccaggtgtacccggttcctgttcgccagagctgtgaacgctttcaggcagtcactctgggcacacctggacatcataaaatgcggaacttctcccaggggaggggatgctgaggcttcaggtactagtgaatcaggcagaaccaatgagaggcaaacagagctgggctgagaggagaaaaggcatacttgtaccttctggatttttcaggcttcgaagacaagatacagaaacaggtgaactcacaagaatatctccaaggattgttgcaagctccctcgtgtctacactagtgacatccagtttcctgtcagagggagacatgcccttccccattatcgccagcagggggaagtagagagcagcatcgttgcatgccggcacctgctgcacaagccaagacaaaggaaaaaccaaggacaacagcagcaaaaacctctaggagggaaaagaaaacggaggaaggaaggaaagcaaataatgaaaaggaagaaagaaagaaggagagggagggatagaggagattaaaaaaagacagtaagatattaccctacaccaccttattttgcagcttgtctgagaaaaatccaaacttgcattttccaaagcactgcttgaagagtgaaatcttaaaaaattaaataaataataaatacaaataagtgttaacacccatttgtagttttcaaatagagctcagagtgagggctgtggctccatcgacttgttcaagcccaggaccccgtctgctttgcgagcatcatctggtgcttccttaatcaacagacgaagaccagacaagccctggtcattgtcctgcccacaggccagttcagagctagacggagttgcagactgacagtaagaatgacatttccctcacctctccaaaagcggggtgctctcaagcccaatgagggcgcataccgtggaccgcaccacaggatcaggggaataggttgctcacggcttcactctttgtctccacagcagccctccggagagctgtttgagattgaaatagacaccctggaaaccacctgccatgtgctggaccccacccctgtggcaagatgcagcgtgaggcagctgaaggagcatgtgagtacccttcttaggatgactgtaggtggcccttcggccagctccaccgattcacccagcgtctcagcctgccttcttggctagccagggtgcagtttctaaaattgccatttgtggccgagcgcagtggctcatgcctataatctcagcactttgggaggctgaggcaagtggatcgcctgaggtcaggagttcaagaccagcctggccagtatggtgaaaccccatctctactaaaaatacaaaaattagctggacgtggtgacgggcacctgtaaatcccagctcctcgggaggctgaggcaggagaatcgcttgaacccgggaggtggaggttgcagtgagccaagatcctgccattgcactccagcctgggcaacaacagtgaatctctatctcgaaataataataataataatcatcatcataaataaaattgccatttgatgccacttgccctggggctgatttttacaagcgtttaactatatcgttgtatccctgaaagcagagagtgccatgtttcagtattacccagcaaaggcgattttgcaagggtcacctttgacagccgtgcctggagggagcctgcccggggtgcgaaggggaagggcagccatcctcacgtgggtttctttctccaggctgtcgaaggagactgtgatttccagctgttgaaactagatggcaagttttccgtggtatacgcaaaatgtgattccagtccaggtacagatgactattcttattctcattttttccttgtagagaaagtggggaagggatctgaataattttcaacttaagtagttctagcagctttgtcggtgaggaaaaggagaagccaaatttcctgggttctgggatttttaaaattgtgttttaagaagctactcttggcctggtgcggtggctcacgcctgtaatccacccacccgaggcaggtggatcacctgaagtcagaagttcgagaccagcctggccaacatagtgaaacccccatctctactaaaaatacaaaaatgtggtggtgctcgcctgtaatcccagctactagggaggctgaggcaggagaatcgcttgaacctgggaggcagaggtggcagtgggccgagatcgcaccactgcactccagcctgagtgacacagagtgagaccctgtctcaaaaaaataagaagttattcttactggaagtgaaaattgcctcgtgatgataagagctcctgcagaaatgtcagcatagcaaaagccttttgaaggtttagtaagaagcagagaaagtgcctgaagctatctggggaatgccttagcccttgctaacgcagcagagctggggccatgccagggagaatggctgcccacatcctggtttcctctctccgagcagactcagccgaggacgtgcgcaaggtgtgccaagactgccccctgctggccccgctgaacgacaccagggtggtgcacgccgcgaaagctgccctggccgccttcaacgctcagaacaacggctccaattttcagctggaggaaatttcccgggctcagcttgtggtaaagactgagattcttttgacaggttgggcagttcggtggcacttcgggaatgtactgtacgtggtggagcgggaggcagggaagaacaggcgcaggggcagcgatgagaaagcaaggagagggttgtttggaaagggaagaaagcatcctaagggggtatgaggctcctgagtgtcatgaggaccccaacaccctcagcgcctcccccatgctgagccactgtaacgtccagcagccacagctgccggcaggtacatccccactccctccgttccagctaaaaccaaagctcagtgtcagctggtagagttgcccacgtcggccagaagcactcactgtaaatttgctgggctccagtaccacccatctccgctgaacatctgccacagactcgtaattaatactcacttgtgctgacaagcttataatggcaagatcttaaaatgcctttcgagtcactggagaaaacatctcattgtactgtgggtggtttagcacattggaattcaacagaattcaaatgtttaagaaaatgtattctggatatcagccatggccatacttggaaatacgctagtatagacggcaattctattaatcagaatatgtgattctcagaacatccccaccccagactacaccaaataacagatattttattgtgtccatatgctccaactactttaaaaaagaaaagctcaagtgatatcttccatactttcatctaaatcttttcatttgagcctgctctatgaaacaggtggaagaggtattaatctcttcactttcccaccctattttggaataacctgaaccttgggtatcaagtgcagcccaagagtgagggctggggggaggcagggttcccactcctatcagtctaaggctggccttctgattccggtttcctatctgcaaactcacctccaccctgaaggaccggtgatggatacttgcccctcctacaaggaagacacaacccctacctctaaagcacaagcacttgagaacacaaccccatagcaactgccctatgtaagccattgagggacatgtcttctgggccgacgcatggtctgcatgaatggtgctccccgaaggaggctacttcccgctctccttctctgcccttttcattgtaagtcatctttcctcaagagcattttcatgtactcttctcagcccctcccaccttctacctatgtggagtttacagtgtctggcactgactgtgttgctaaagaggccacagaggcagccaagtgtaacctgctggcagaaaaggtgagtgggccgggaccttggggtgttaccactcggacagagctgtttgtggaacagaacatccttggatagtttgtatcttggggctgcagacagagaataacagtgcaaatcccctctccctgtggatcacggcaagccttcttttagggtgtcacctcatccctttaagagctgtcatcaaatcatctcacccactggaagcacatgaagttaggagaaagagagaggctatttgctaatgaagccaagtcacgcccacccactgggaatgtgaagtgcacattttctagacatataactctgatacaaaagctttcaagtccttgagccaataatgtacacttctaggattttagtctaaagaagtcatcagtggccaggcatgatggctcatgcctgtaattccagcactttgggaggccaagacgggtggatcgggaggtcaggagatcgagaccatcctggctaacatggtgaaaccccgtctctactaaaaatacaaaaaaattagccaggcttggtggtgagcgcctgtagtcccagctactcgggaggctgaggcaggagaatggtgtgaacccaggaggcagatgttgcagtaaactaagatcgtgccactgcactccagcctgggcaacagaacgagactctgtctcaagaaaaaaagaaaaagaaaaagaattcatcagtgacatttgacagaatatatctataaaaatgatttattatggatataaagagaccaaaaaagagagatctgtatgtccaacaggaaggtgtcattgaataatccatgcacatcagtaaatagaaaattgtgcagacactaaaaattgtgttttcaaggaataatgaatgatatgagaaaatgctattatggcaagtgaaaacacacaggatacaacatcgtatagtcacaatgatctcaatttttaaatcatatttaatagtattttaaaataagaaagaaatgcatcaatgttaacagtccttctttctaggccaccaccagaaagggattatgggtaatctctctcactctcaaagtatttctgtatttccatgttatatatagaatcatatacctcccacaagcagaaactataactttaagaaaaatggtttttcaaactaatttaaggttggcgcgtcaatgaaattgggggggatccatttttgaaattagttaaaataaatcctctttctctgtgggcagcaatatggcttttgtaaggcaacactcagtgagaagcttggtggggcagaggttgcagtgacctgcacggtgttccaaacacaggtaacagctccgtgaatattcttgcctacaccttcagaatacaatgaccccttcacatttatgcagtgcagtagtgatgacaggacatttgctctcccgtgcttctgaatctcacagtatgaaataacactggggtatgcggaatcatcaacaaatggaaggatattttagctatgcctttccctcccacgaactagtgactacagggaagaaccatcttactgtgtagttgacaaagccacctttttatttgtgggaggtgggagtggttttctgagttgcagagaccaggtggccagatctacctgttagctcccagtggctgcagcttcagatgacaaagagggtggcactgctgggcaagggtgagccataggtggggtgcttttactcattggacatatgtgtgtaagtccaccatcacaaagacaatcctagtgaggccggggccaacataggccagtcacccctccttgtaaccttgatgacaatcccttgtacttaggtaggtcctttcttgctagactctttgcaaataaaaatgtataatgtgaggaaattgggtgccagtgccacctgggcctgtgggttgtcttgcctgggaggaggaagcaaactaactgaaggaaatggtcctttttccagcccgtgacctcacagccccaaccagaaggtgccaatgaagcagtccccacccccgtggtggacccagatgcacctccgtcccctccacttggcgcacctggactccctccagctggctcacccccagactcccatgtgttactggcagctcctccaggacaccagttgcaccgggcgcactacgacctgcgccacaccttcatgggtgtggtctcattggggtcaccctcaggagaagtgtcgcacccccggaaaacacgcacagtggtgcagcctagtgttggtgctgctgctgggccagtggttcctccatgtccggggaggatcagacacttcaaggtctaggctagacatggcagagatgaggaggtttggcacagaaaacatagccaccattttgtccaagcctgggcatgggtggggggccttgtctgctggccacgcaagtgtcacatgcgatctacattaatatcaagtcttgactccctacttcccgtcattcctcacaggacagaagcagagtgggtggtggttatgtttgacagaaggcattaggttgacaacttgtcatgattttgacggtaagccaccatgattgtgttctctgcctctggttgaccttacaaaaaccattggaactgtgactttgaaaggtgctcttgctaagcttatatgtgcctgttaatgaaagtgcctgaaagaccttccttaataaagaaggttctaagctgaatgtggtcatgcttattgcgacttcatcccagctcccctcacatgcatagccttttaccccaacaaacacagtgtccctaatcaaaaccaaagtgaaaagagaaccaaaagagaacaaaaacctgctgtattgccagatacaggaaaaagtgagactaggatctttccacaacccataagatgtgaccatttctttttttttttttttctgagacggagtcttactctgtcacccaggctggagcgcagtggcatgatcttggctcactgcaagctccacctcccaaattcaaatgattcccctgcctcagccccctgagtagctgggactacaggtgcgtgccaccacacccagctaattttttttattttagtggagacagggtttcaccatgttggccaggatggtcttgatctcctcaactcatgatccacccacctcggcctcccaaagtgctgggattacaggcgtgagccactgcacctggccaagatatgaccatttctttatgagaaaataattcttctcattttataagagagagaaaatattgctaaaggtgggccaagctcctgaactttgtacagaataaactatccgttgattttctccagtaccgaggtaaggagggattggtaattaaaacaagatcctcactttatatctgttgttaattatgtttaagatatacgttgagtgtactgtatacacttcattttataacacaagattggtcttcctagccaatctattttaaggacccaagttaaagctgtgacttgtagtatcattagataaaggatgcctggacaggtgaatcccgtggacatttgtagacaccgtccaagtgctcagatagcatatgtgaataaaccctccccattttagcatggtccctgggcaatttcaatttttgtccatcagcattaagtttttccgatctacctcagtgatgggccctttcagatggaattttagagggcaggactgacacccagttgagtgacttcactttaaaccaaggagaatgaatcaagtgttgacactcaccttatcacttgtgcctagaggttttgccaatattccagtaaccaaaaggaaaggccagaaaggtaagaaaaccactaggtgtcacggaagccagagaagaagctatgggcagctgtgctaaatgctgtagaaagagcagtaaggacgactgactctgaggtcatggtgaccactggcagatgcagttgctctaggggcatcctggttgtcaagagtttactggtgttgttgctgtagggagactggagagtgggctgtagctgggcaagagtagccacaggatagaaagtcactagagctttctagagaaaagattaacatgagttggtctaaggtggtgggcagtggacatgataaaaagaggttataatttggaggtagaactcccaagacctgctgatgaatttgatatgggagtgagaaagacgtgaaggatgatgattcctggatttgtggctttgtgaactggatagatgtgtgtgtgtgtgtggggggggggcatttactgaggcagtgaattctagtttgtttcatttgcattacctcagtttccctcctctccaacttaaaattcgtgcagatgatttttctatgtctatttttctgtgtctggctaatgcatgccttgatctcatgtctctcaaagaagcagtgaagtcacatagacctgcaaaacctgagccaagctgcttcacctttcacttctttctgcccacattatacaaccagacatagataacagctgatgtactggtgttgggaggattaaatgagatgctacaaatttatgtatgacaccttcttgacacattctaggttctcagtaagtgccctccctttctgctgctgctcctcatcctctgaatttggtggcctcagaagattatgttgttgaccttctcttaaatatgtactctgcttggcaagtttatcctctctcatgattta

SEQ ID NO: 133 - DNA, 39353 bp, Human
accttaacaatagggtataactaataaaatgagggaaggaagagaggaggcataaaaggtagtggtggtatgttgatttcattatctatcaggtcaaaatatatcatttaaggctgataactcaagtagtaggttgtaattatatttaaagatacaaagtcaatcaattagtcaataaatcagtagagctgggggttggaagatggagaaaagtaggaagaaggtggaaatataaatttattacacttattttttacagatgttaataaacattgcctaaaaatatcaatttttaagtaatcaatataaagttaaaaatataaacttgaaacagaaatgtaaactttctagattattgaaagaaacacacatacacagaaacaaaacaagcaaacacaaaaaacccagagaccatatggtaaaagaagctacctaaacagaataatataaaatgtgatgagataagcaagactttcataaacataaataagttaaactcacctattaaaagaaaatattctcacaatagattataaaagaaagcccaactagtctttatatacgagcagcatacctaataaaaataattcaagctgaaaacaaaactatgggcagaggcacatgaggcaaatgcaaacaaaaagtaagcagggcttccagccttaatatcagataagaataaattcagggcaaaatgcaataaagaaaacaaagagggctttgcataatgataaagggagcaatctataatgaagaccttaaaaatatgctttttatacatttcaaaatctaaagtgctaaaaaatactacaatctcatgaaaatcactgataaaaaccataaataaaactattaacaaacagaatctatcagcacatcaaaaaatagtacatcacaatcaagggtggtttattccaggaataaaaggatggttcaatatataaatctgtaatattaattgattatattaattgatcaaaaagaaaaaccataagattaatttccactacattgaaaggagattttgtgaaattctacatccattcttaatttaagaaaaacttttaaataacgtaagtacagatgagtaatttcttttttgtttgttttttttttttgagacagagtcttgttctgtcgctcaggctggagtgtagtggcacgatctcggctcactgcaacctccacctcccaggttcaagtgattcccatgcctcagcctcccaatagctgggattacaggcacccaccaccacacctggctaatttttgtatttttagtagagatggggtttctccatgttcgccaggctggtctcaaactactggccttcagtgatctgcctgccttggcctcccaaagtgctgagattacaggcgtgagccactgcatctggcccagatgagtaatttcttaagatatctgtttgtctgtctatctattcactaccccaaagccaggatcatgcttagtgggaaatactggcacatgctcattaaagtcaagagcaaaacaaagatatcattgattactattctgatttaatatttttctgggtgctttagccaacgtaatggacaaacagaaaaaaataagaggcataaaaattgggaaaagaggccgggcacagtggctcatacctgtaatctcagcactttgggatgccaagaggggaggatcacttgaggccacgagttcaagactagcctggccaacaaggcaaagccccgtctttactaaaaatacaaaaaattagccaggcatagcggcgcacacttgtagtcccagctactcgggaggctgaggtgagagagttgcttgaacccaggaggcagaggttgcagtgagccaagattgctccactgcactccagcctgggtgacaagattaagaccctgtctcaaaaaacaaaacaaacaaaacaaaacaaaacaaaaccccacaggtaaaataagaactaaattttacattatttgaaaaggaaataattacctatgtggcaaatccaggcaaatcaactgaaaaatcattataattagtaagagaatttggtaaaggactggtacaaaattaatataccaaaatcaatagttttcatacacacatacacaacaacaagttggaggaaataatagaagaaaagatctactgaacttaatagcaaaagataaaataaccaggaataacagggaatagtaagatcaatataaagcaaacttgaaaatgcaactgagggacagtaaaagaggcttaaacaaatggtagcataccgtattcttgaacagtaaaacaataacttataggtgcttcttctccttaagttatctgtaaatttaatgtgaaactaatgaaaatatcaagagaaattttggggacctggtcaagttaattctaaagaactcagggagaaaataaacatgttaagtgtaagttttaaaaaagaaagcaaaaataagagtaataaagaggtgtctagcccattcagattttaaaacacactaaagagctacaataataaaaagtgaaaaagctgtcagatcaaaagaacagaccagaaagcccaaaatagatacaaatacacaagaaatgtggtatatgatacagaagggttttaaattagcaggaaagagatgggttatttaataaataaacctgagggaactagatacctgaacaaatagatgcctgaataaataaagctggatccctatctgtaaccccactccaaactaaatactatagataaaaaacttaaatatagaaaatgaaagcaatgggtaaacatggaaatttttttgccgtatgacaaaaacccaggtcataaaatacataaatttgacaacaaaaaatttccacacagaaacaaaaacggcaacaagtttgaacaaattgagcaaaaatatttgaaatgcataattcaaagagccaattttcttcatttatgaagagttcctaaatgaaattttaaaattcccaagaactcaacagaaatcacgcaaaagctaaaagagttcacagataaatacaaatggctcacaaatttatagaaagatgttctcccataataagaaatttaaattaaaactatgaggtgtcatttcacttctcagatattggcaaagtacagaaagttgggaaaacaccctgtgttggtgaggatatgaggaaattggcattttcatacattgctggtaggaatgtaaataagaatcacttctacgcagggcaacatctatcaacattttcagtcaaatatccttttgccagcaaatctaattctaagacattatcccagagaagtattcccatatgtcgaaatgacatatgtgcaaggatatttgttgtacattgtttgcaacaacaaaagattagaaactacctaaatatacattaatggagacttgttgagttataatctatccatacaatggtacactctgtagctgtgaaaaagcaggaagcagctctatttgtgctgatgtaattattaagaaatattgtttgctcaaaaagcaagaggcactcaatattcctttctggaattgcctctcatcaattccttttatttgttcctaaacatccaagtcttcagaatgcatccaagcttgttattctccttcatgattatcacctttctcccaggtggttttctctgaccaaaatgctactttttgcccccaccttcttttttgggggagtacctagtcctcctttaaactcagcacagtgtcattgcctccaggaagcctttcctgacctgtgatttaagatcctcttttgatgctgtggtcctcgttcagacgacatactcagtgtggcttaccacactgcactgtaactgtctggttattggctacctcccccatttgctgtgagctccttgagaaaaggaaccttgtctgccttatgtctgtatgagctacgcccagcaccaggactggcaaagtttagatgctctgtaaatggatagatggatggatgaatgaatgacatagataatctactccccaccatagcgtggatgatcttttagaaatgaaaattgggggccggctgcagtggcttatgcctgtaatcccaacactttgagaagccgaggtgggcagatcacctgaagccaggagtttgagaccaggcaggccagcatatagtgaaaccccatctctactaaaaatacgaaaattagctgggtgttgtggcacatgcctgtagtcccagctacttgggaagctgaggcaggagaattgcttgaacctgggaggcagatcatgctactgcactccagcctgggtgacagagtgagactctgtctctcaaaaaaaaaaaaaaaaaaaaaaaagtaaattggatcatatcactcccttacataaaaacttcaaatgcacataaataaaactcaaactcctaagaaagaaaaagaaagcaagggaaagaatagcgtgtttagaatggtgtcatttgcaggcttgagaaagaacaaacatggcagggtggagggagatgttctcactatacaccccatgtacctcttggcttctaaaatatatgcatagaagtacaacaatattttattccttcctgtatttccaaaatgttctaaaatgagcatgtacttcttgttgtaatcatttagagaaaacctcaaaaataaaggacttaatttccacgtagtctttggagttagctcctcattgttttaaagctatgtttcttcgtctctcgctttggtgttccaaatgaacagtttgaaaaatagcaagcctcattgctccctttaaaaatgcacaccaattttctttgcttggatctaataatcactaaattttcttcctattttaacatttattgtttacgtcagcggctcttaatctttattgtgccagagatcacacctgggaggctgttaaaatgcagattctcaggattctaccctcagacattctgagtcagtgggggccctggaatctgcattttaacattactacaggagattcctatgcaggtgcgtggtctatagaccatacttttcaaaacgttcatccatgacttgttaaggaaagagtatttttcacatagaagtgaaaatcctatatagtatagaatttaggactgcaagtgatctctcccttgaacacacacacacacaccttacacctttataaacattcacattatgtcctgtactttataatacagtttgtgtgcactcatcttgtcttctctctcagatttttgagaatgggatccaagtctttatgtagcctagtgctccaaagttgtgaaataaaattatgtgtgatagaaaccaaagcatatggttcaaaagttactttctttggcttagggagttggttttctctgccaactatgtaaattcttagtcattccacctccccttcccgcaaagcttagctatgtgcaagcaactgtaacactgcctgctaagtctagagaggggctgctgttttatttttaaatacatatataaatcacttctggtagctttctatgcctttcccaggacctctgatgggccctttcctctgtgagttttaaactgaaaaaaacatctgaaaaagcagcacaagcggttgagataaacatcccagagggttttccacattacgtaaattttcaagtgtgatgtgaagggacccgtgaggtatagtggcagctctacgccaccgcctggcggcaacatgcttcatgacatcccaaccccacccctgcatccccgggctcttagggacgctcatcctatgcaggagctcatatgtgtgtgtccccagcagcgccaaatccagggcatctacaaatatttgctggtatgagtggcaggaactaaaaacacacagctcgaattttgatgtcttctgcccaactgagggtcactggttctttcaattctgtaactttctaagattttgcagcacagagctttttgattgacgcacagatcagtcaaaaggcaaatgtgaaagacagcctatactcaaagcataactctaatagcacaaaatacacatgcctaagtcatcactggcaaagctccaaagcttttgagaaagatcattatacccatccacagggccactcacccccacccaaacctgaaacacttagaataggtcagggctagcatgaaagtgattgagtcccagaggtatagctcaatgacttggcctaaagagcagagagaaaagagaactgagtaaaggtttaccagtgtgaaggatgctcacataggcctccagggactccacatccactgagattaggagacaaaataaccccagatggcggggatgggggtggcaaaagttctttcagtaaacataaagaacttcctaggaagtacctggaatcttctttaggggttcactagaaacaaattatctttagttgggaataaatgatggccctgcccaaggttgggggtggggaacacacttgatggtattttggggtcccttccaactttagatgtagagtcttgttgaacagtccctatcaataggcaagatgggataatgtgaataaaagcaaaaaccaagttacttgttagacttggacacaaacgacttcactcgtgtataaagctatcacagtgactgcatctacctctgggatttcaagttccctgatgacagaagaatcctttaatggaagctgcatgctgggttaatggtcaggctgtgagtggaaattctgagatcaataggcctaaattcggaaaatcaaggctgcacctaaaacctaatggtctgatcagagcaccaaatacttattgttctttcttcttctccctgccaggccattaattgattcacacactatttttcctagaagttaatgccatcattacatgcacctttggtaagaggttagaagtgacaaattgttcacagaaaatctcatgcaagatgggtttgaggcaatctagactccacctcaaaaacagctgcatttcaaaaatcactactgaggtccacccataggtcaagtctcatgcgtgcttaagtctttaccccactgggattactaattggatcaaacctaattcagagttacaggcattttgttttaggggaaagtctgaattatatgtttttaaaatacaaattagttctttcctacagcaatgcttactgccctgagcactgcagtaaaacttaagattagggaattactcccttgtatggggcttttatgaaacagaaaagcccaaggaaagtatcaagaaaattaagaaagccctaagaaaataaatcagtcaacaaaattgtatcttaaatacaatcaaaacttcatgtttaatagggattcatctgtttcccatactttttacatgttcagttcagacagaactcatggaagaaaagacttttctgtgagatagaacagaccatctgcttgaccggatggctctgagggacagccaaactcccaatggccaaagggctgtgaggaagggcaacacatatcagaagaattttcagcaagggctgaaacacagtaaggttagccacaaaatggaatgagagaagccctaacccaatgggagtttgcctaattttaatgaacccaaactctaacattgtactggaaaagcagcattaaaatccagcctgattatcacaatttacagaatttctcaccagaggcccacaggtgaaaaagctgcttactctaaagcccttagaaccgtattgtgaactgcgcatgcgagggatctaggttgcgtgctccttatgagactctaatgcctgatgatctgaggtggaagtttcatcctccaccaccaccccgtccatggaaaaactgtgttccacaaaactggtccctggtgccaaaaaggttagggactgctgctttagaatataagaaacaactcaagcagccaacgggtctggagttaacacttccagccctcccctttgtacacactcaacacttcttgctgaactggccgttaataaccacttgtgaaatccctccccacacctgcacttaggcgtttgtctcttcctaccttcctttactgagtagtggcaaaataataggagagtggaagatggtgatgggcaatgaagagggacctatttctgaagaggagatgttttaaagatattttatttttcaataccagtaatgactgaaaattaaagaattaaagcaggaagcaaaacaaaaacaaacaagaaacccaaaacttgcaacctaaactctccgggaaaaaaaaaattgctataaatgttaaaagacttaaagagaacattgacaatgcagccctgatgtacctaatcatacttcaaactgctggatgttttaagctgagaatctccccagtgcctttctagtgctctaaaatcatctcccaaacagatgagaaatgaaacaaacaggtctcccttcttgagtacataatttttataaattgcgtcggacccacagtgaatgtattttagagagtttcaccaaaactatcaaagatcaaatggcagcaaaagatcagggaaagaaggtagaaaaactatgcagtcacagagctaacccgcaagctgcccttagtcctatacacctgaaatcaaatccatagccaatggtgaggaagaccacatcagaggttagctgcatgacagcacagctgggtcctatctccctgccaggggtctcaactgtaactcgcgctccaactgctctgcagtcagggtgccctggatggcttcacagcctggattgaacacagagtaggcgctcttctctccctctttcttctcttcagggcctcgtgtcccgacgtacatccaatagaacaaggacaggacaaaatatgccaggccaaattccagttccacaaacagtcccagcaggaccaaccagagaagaaccttcaagaaggtgatattggtcaggaaagactggtcccagcacgacggcagaggaatggctgtgttccatggtgtctctgatgtgctgccctggggctgagccgcttcctaggatacacaaacaaacaaaagaaagaataaagggtaatggagctgagatgatcaaaactaatctgaaaaggcagttttcattgctctgagaaggctgctggctcattgatttctattctttcatgcaactctctaaaacaatcatctccaaagaacctatgtgctctactccaactgaatcaaaactgatcagcacttagtgagatgtgacctaataaaagccctacgtattcagacagattcttattcgtgggagtcatttcttcagattagtctgctgctaagaagagctaatttgtgccccatacagaaactcctgaataactgataatgcaacagtcatgacaaatgcttcaaatacagagtcaatatacctttgttgattggattagatgacctaaaatattacaagtgacatgattctaaaatagagacaggaaacaaaaatcctttttacgtttaaaaaaaaaaatcagccaggtgcacacctgtaatcccagcactttgggaggctgaggcagacagatcacttgagctcaggagtttgagaccagcctggccaacatggtggaacctcatctctactaaaaatacgaaaattagccagcatggtggcacacgactgtaatcccagctactcaggaggccaaggcatgagaatcgctcaaacctgggaggcggaggctgcagtgagctgagattgcaccaccacactctagcttgggcaacagaccaagacactgtctcaaaaacaaacaaaaaccactgttacagccattactgggcccccttaccttcccatcccgtgattaacctacacaggtcattgtcactcacccaaggcccagccaatgtctcctaactagactccctgcctcctatctcttccctccccaagccatcctatgtacaactgctaaatgaattttcttaaagacctattaccctcctgttcacaaaccttcaaaaactttcactgtctacaggataaaatccaaactccttgggctggaacccaagaccctcaatttgttcaacagattgaaatgccagtagacaggcccctgtgccagatgctaatggcagacacaggtatttagacagctctgtgtccagtccactgttttcggaactcttttgaacatgacctacaataaggaatacattttagactgtaatccagaatacatatatgcaacaaagtttcacaagtcaacacttaccctccctgagacattctcttgtatttcctattctactttaaaaacatttttaatagggaacaagatcttctatattaatttcaccatccactaatgggtcacagtggtctaggaaattccatgacaacacgatccacaatcttttgttccataaatgacccttcttctccagcttaactggtcttattacccaaagatattctcagtcctcatctcaagcctagaattccgtccacttcctctttcttccttaactctttgccttccttccaggcaagcaccgttcatgaactgtcagccctgacctccctgggcatcaggggagggtgccccctctgcctcccccagaactagctctcccgttcattaagcaccaaactattcagcactacagtgtctctcttttactataggtcatgtcatgtatgatgccagattgtttaagtaccaggaagccacgtgtctccagatccaaacatggcatcccatacttaggttctcaattcatagcagaactttcagttcatctcttcagttacatcccctattcttcttcacgtgcatatttaaaaggggatcacaaatactggtcatctgatttatgatgtttcagaagttctattttgtcagaaccttcttttttagcatcaacattgtaattattatcttttcagttagattagaaagtctgattggagaggcccttatattatcagccacatccctgacccctgatactcattaaagaaagaaatgtctgtttcagatttgacatgcatgcacagtatgcgttctggcccaagaagaatgcatctgggcagtgttctgggcaaaggggagagtagcatgagatgacagggctaaggagggagggcatgagggtgggagccagataaagtagggccaggcaggttgcagtgaagattctggaaatgggaaacagctgaaggtctaagcagggaactaaccaaaagcatgaaatccctggtgctaaaaaggttggggaggaggcctagcaagagagagccagacattgaccagggtggtgacagcagtcagatggaaatagtggactgatggacacaaaatacattctgaatatacatgctgagattcacaataaactaaatttatcatttagggagtataaaaagaagaatgttcctatgtcaccatttactgagagccttccaatgtatgaactctggtaatccaggaagcaggcattattattcccaacttactgataagaaaacactgagaggttaagtaatttccctaaagccataaaactagtgataggcagagatgaggtcagtctcggatcctaggatggtctcctccaaaatatattttatttaattaggggcctttatggggggtggcaggagaaaggttagggagctagaggtagatgggtgtgggggtgggggggtaaacaaactgacgaagggaacaaacaagaggagagatacggacattcttctgcctcatttggaacttgtcggagtaccagttcccttctgctgtaaaacctgggtgaagaagtgtttgtgactgttacatcacacacaggcatggcccaaggaaggcactgccattcctcaaatatcaagctgcttcttaccttagggcctctgcacttgtggttccctctgagaggaatgctcccttcccctcatatcacttggttgacccctcctactacaaacggcaaaaatgtcaccgtatgtgcccttggcttagtccccgtttttgccagggtggttccttcttgttaaatgtctcctccttagtgagttctccctgctcagctgatttaaaatagtactctgctcccctcacccctaattcactatcacagtctactggttttatcttttttctttcatagcatttatctggttttgtttattgtcctcctttccctgctgccccaagctcaaatgcaagttgtacaagagtaggacttgtgtgtcttaattacactgtctcccaggatttagaacaaaagctggaacacagcgggcacatgacaagatttttgttgaatgaatgaatgatagtgagggaaaggaagaaattcaagatgactactagattttgcgggggtgaggcacagctgtgcttagccaggcgactccaaaggagagcctttgagcagaaggccagcctgagccaaggcctggaggtcaggagtggtggatgggtatgggaaatgggttctggggcagggtggtgtgctgggggcttgcctgggatatggctggagagggaagcaggaggtttctgtaggaatttttaaaagttaccagcatttttgtcctaatgtggaagaagctcgtcacagaattatttcaggaaactgcttttctccaagcaaaatctggtagtgggaaggaggatgtagatacttcctcatcaatgactgctgaaaagatgcagcggcattgtcagtcacagcgaggcccgggtcggggcagaggcatcattgcagtcagagcttggcccaaatggaggccgcagtggctttgttgctccaaatgacatggtttagttattttgatggccaaagagtattctttgtgcatatacattacagtttcttgatcccttcatctgtagatggacaggagataaagtttttggaatctccatgcctgagattaaaaggtgtgggacttcctctaccaggctcatttccttggacctaatatcctctgggtttcttgggtttctccacatggctgtggatgacaggatttcccaaagctttatggctgaagcatattccatagtgtatctgtatggtggtttctttatcccttcagctgtgggtggacaggacaggtcatttaccatgatgtcctctaggttcaacagtgtggctgcaaatgatgtaatttcattacatttttctggatgaagagtattccatttgtgtatatatactacagtttctttatcccttcatctgcggatgaacaggtttctccacatggctgcaaatgacaggatttcatccacttctgtcgtggaagggtattccattctggatatatatttcagttttgtcatcccttcatcaagggatgaacaggttcaactgtgtggctccaggtgatatgatttcagtatatgtgcacagctgaagggtattccattgtgaatgaatactacagtttctgtatcccttcatctgtggatgaacaggtctctctccacgttgctggaagtggggtgatgtcctaaagtttgatggctgaagagtattccattgtgcaaatatcctggagtttctgtattccttcatctgtggatgaacacgactgctttacatttggcctgtgccaatggccatgtggaagtggtcactctccaggtgaactgaaagtgccagactgacattggtgacaaatgaaacaggatgcctttgatgaaggctgtacattgccaagaagagatttgtgtcatcattctgctagaatgtggcaccaacccagatcttatggatgtctatagcaacaatgcactacactatgctgtgtataatgagaatacactactggcagaaaaactgccctcacaccatgtgaatactgaagtgctgaacaaggatactgaagtgctgaacaaggatgcaaacacaccacttttacttgctatagtttgcaaaacacagcaaaaggtggaattttagtgaagaaacaagcaaatgtacatgctgttgataggttgaaaagaacagctctcatgcctgttgtacattatggcttgtcaggtatagttagcattcttcttcaacaaaatattgtctttactcaagagtatgtatgaacagactgcagattatgctatttctggtggtctgacaagcactcacaacaaattttgcaacattaaaaaaaaaagatacttgaaaatggtcttcaaaatgacaacccagaagaagcatccaagaagaatgcaagtttgaaaacaggaggagcaagtgcaaaagattctgggagttctgaagcatctgcattcagtatttaaaaaaaaactgtgtgttgactcatggcctaaaccagatgatgaagacttgacttttactaccaagcagtgtatccctgagagtgtttcaaagtctttacttggaccttcatataaaaaaggaaaaaatatatagtaaatggaaagggagaagggcctcctgaaaaacatccttccctaaagcctaccatggaaatgaaagattctgttgtgaagaaagcaatagaaaggaagaacgaacaaacatccaaagcagaacaagaagtacaagtgacatcagaggaagaacaggaaaagcttgaaagtgaaaataaacagccacaggttgaagaagctagaaagaagcacgaaagttaaaaaaaaaaagtatcaaaaaaacgtatatgatagtacatctgctgacgatgatgataaattaattcaacaaagaaagagtggaaaaacttaccatcagcgatttcctaggaaggagaacaaagagtatgctaggcctgcaaagaaaatgtcaaatgaaaagaaaaaggtcaaaaagcaaactcatttagagatgaacctgatgacttaactcggccctctgaaacagcttcagaggatcatgagaaaccttaccctcattgtaagaagtttatgatgctcattaagcaatatggaatggattgtaatgattctcgtatcctaatggaagtccagaatgcatttctttcatgtgaaaagtcactggaccttaaaaaaaattatctgtgaacaacttacactagacaataagaaatatgaaaactgagtttagtgtactgaaggagctatccaaaacacaagaaacgaagtcacagttcaatatcaaaaagtagaatggaaacaggaactctacagtttgcagcttagaagaagatgagaagaaatgctaatatgttatatgaaaaaattagggaagagttagaaaggaaagtggagcaacataggaaagaagttgaagtaaaagaacagcttaaactgactatcggatcactagaaatagaattgaaggcttgaagaaatactttaagaaaaaaaaagatctgatgcatgaaaattgcttgttgaagagagatattgcctttattgtgtatgtaagtatacacaataaaaaataggaacctcgaaagggaaaaaggacattgaaattgttaaagaaatgaatgatgaccttcaagagactataaaactgaatggaaaaacattaacaaaaacagtatcccagtatggtcaacagcttaacgacctcaaaactgagaatacaatgctcaagtctaaactggagaaggaaaatcaaaacaaggaaagactggaagctgaagttgagtcattccatgctagactggctgctgctataagtgagtgtgatcaaagtgtgaaaacaaaaagagacctagaacttgctttacagagagcacaagacgtttctttacaagaaagaaaatgagttctgatatttctgaactaaaagataataatgagtttttaactgagcaactttccgaagctcgaattcaataccctaaaaagtaaactccatgacacaagaaattctctcagagaaaaggttttggttttataaagtgtacaaaaggacctaagccaagtaaatcctttggaaagtgggactacgtagaggagagaatatctcaactacaacatgaaaatctgttgcttcaacaactagatggtgctcataagaaaggggataatgaacaaaaggtaattaatatccaaggatgctgtcttgagagtgaaaaggaaggtcttctgctagaagggaaaaataaggaattaatcaatgaatgcaatcatttaaaagactgtttcagtatgaaaaagagaaagcagaaggagaagtaagtatcaaaaaagataaatattttcaaacttccagaaggaaaatttaaaatatttggctacggctacatgttgaacctagttgaatataaaaattaatagacaaaaaatgtgtttaccatactgtataattccatttacatgaaacatccggaaaagacaaatgtatagatagaaagcagactgacatttgtgcggggctggggttggaaatgggtagtaactgctaatgtgcaagaggggtcttcttggagtgatagagacgttctaaagttgcagtgatggttgcatgactcaataaatttactaaaaatctttgaactgtatgttaaaagagataaattctgtagtatgtaaaccttatttcaataaagctgtttcaattaaaaaaacaaaaattaaaaataatttaaaaaaatagaatgctaaagaaatctctgacaggccacagtgtgccatcaaaattgtctgacatgaattgtaaattagactttttcttttctaaactagaggcagaatctgaagaaaaaaaattaaatgagaattttcacaccagagcaaacccagaaatgataagtcaatgaaaatgagcttaaggcagagtcccttatggaaaaacagagcaattaacaagaaactggaggtccagcatttcctctcatccttttgtctggcaatcagcgtttgggttctcaataatggaagtttttctctgaattcagtttctctgggtccacctcaatgatctcattcctttggaaatgagacatacagtcaaaagttcattgcatgggttagacattgttttttaactgcagagagaaaaagaataagggaaatggtttctaaaatcttaagcaagtgttgtacttagaaagttctagtcaacaataaaattatccaaagacaattaacacaaactgcacacaaggaaatggattgtctgaactctgctgcgctcttttcacctttctgcaagtcagctggaatcctgtatatcactgagaatatcaaatcaaaattgagtaataggttcagtaatttttaaaaattccctcaaatcaaatgttgtgcaataatagatgaacttacaggaaataattttaaggtgagcaaggtacacttttcttccagtatattttcattttaaaaggaattttttagttcttattgcacttatgaggaacaaagcactgggcacaaattgttacaaagcactcatcccttgatatgttttgtcttgtatttccacatagacatttcaacctcactgcaagccaccttaccattttactgagttaaaactaaatgaaaacacaaaaggatgcaaattaaattcatctgcaaaacaagagattaccaaaacaattaaatgtgaaaaggttatcatactaaatcacttttttttgtttgtgtcttgaacattcactatggaactggaataagcttctgccactaccggcagttacagctaccacactttggtaaattctgtattcaaacgcatttctaagtcacaggctatctgggctactagctgcatgtgccccaggtgcgaatcaaatgaagttttaattactgctacttgtgatcggtatccaattagaccttttaccctcctccattagcagagggctgtggctcaacttggttgtggagaggtttcccaatgccacagggcgtcacgataactcaattcggagtgaataatttaagagcagaggtgctttctcccaggaccctcgactctcgctggaatcaggacctgcgtgggtcgcgggctggaaagaaaatgtcaaaactggtaacagtgctgacacgtgtggccggagatgagcggtccggccctcgatcaggatggggggccagtagccccgcctccggcagctagggccacacccccggcagctagggccgcgccctcgactgtggctccgaggccaggtcctagggccgaagtttccatcgtctcacctgaactaggccgggctgggcccgggcactcgcgggcctaggtttccataccaggaaccgctttagccagcctggggctgcctttagagtcgctgctgcttccgccttctctcctggggtttgtgcgccctgactggcagcagggggttgggccgccagacccgcccgtttccgcgccgcccgaaactcagctaaccgctgttccatggcgcgcgcctcgcgtccgttggccgataagggagcgcgcgcccgcaggccgcacagcagttgcctccgctcggcccgcgccggccgccgtgcgcctgcgtggcagaagcccctgctgagcatgcgcactggtgtgacccgcgtctcctccgtttgtgaagtctggcgggtcgcgtgtatactcagccgttctctcttcacaggcacgtggacacagtgtcacctcctcaagccaagtctaaagcacagggctgccccattgccctctcccaaaggccgctctgccttgctgcatctcacttaagggctcgaggccccactgatccagcgtcctgtattcgggatctctgttgctgggccccaatgaacagcgccacagtgagaagatggttccaggggttaggagaggcccgtgatctctacgacattccagcgtcagaggaataacaggctacatcttaccctttttctcttatcaaggaaagggtatgccaatcttagtacctggagggtgactttctcactgctcacaaagcaggctgtgcagctccatcattggtcttgccacgttgggaaattatctcgttttgtgtctagatacgtcagaaccttaaaaaaaccaacaacaaaaacttttattggggtgcaacataaaatacacatcttaagaatatgactcagtagatttgctcttatgtatgcacctgtgtaactaccacccagatggagagaaagaacatttctgtactctgggagtttccttgtgccctctcccaatcagtaccctcccaaaaggacacagttcaggttaggggctgttttatacgttcttaaagctgtaagcatctagctaagtgtcacttacataattaagactcaaatatttgttggatctggctgagggtgactcgagaaattagacaaattagaacagagtcatccattcatttaacagacgtttacctagggcctgctctgtctaaagtcacaggcactggggatgctgggatgaaaggaaaaaacaaacaaaaacctgttttcttagagcttacactccaaatggaaatacagacaataaacaaatgtgtatctacatatttcatgtcatatcaggtactgataagtgctgtgaagaaaagtgaagcaaagtaggcaatggtggaggtattagagaagacctccctgaaggtttgtcatttgggcatagacttaaatgagtgaggtatgtagatatctgaacaggagtgtttcagtcagaggaacaagtgcaaaggtcccgaggcctcaaatagcacgcttgacttgttcacagaacatcagggaggctgttatgactggattggaaggagggagagggaggcagggagggagggagggaaggagggaaggagggagagagggggagagagggagggagggagggaggaaagagtgacagaaaataaagatgccaggggcaagatcgtgcatgtaaggccctgtaggccatggtgaagactaagtgtggtgggaagcagttagtggattttgagcaggagatgatatgatatgacatatttttaaaggattacactggctgatggaggtgggaccctggaagattgcaagaatagaagaagggaaactagttaggaataaatatggtagaatgagaaactgtagtagtttgagctagagtggtagtgatggaggtcacgagaattggtcagattctgaatgtattttgaagacctgagccaacatggtgtgagacggattggatgtggaatgtgaggaaaaaaggtatcaaggatgacagggccagccatcgtggctcacgcctataatcccagcactttgggaggccaaggcagggggatcgcttgaacctaggagttcaagaccagcctggggaacatagcaagacctcatcgctattaaaaaaaaaaaaaaaaaaaaaggatgacaggtttcttccattactaccccactcctcctgcccccccatatacatacacacatgccctgagcaaccaggcaaatgatgctggggccctctattgaaatgagggcacactgggaggagagaattacagaataaacactggaagttttgttttggacatacaaagaacttgggatgcctattggatatccaaaaaataggcagttagatagtgaaaatgatttgaggggaaagtcaggaccggaggcacacactgggagtcatcagcatgtgtatatttaaagctgtaagactagataagatcaaacagtgagtgtggataagaagagatttgagggctgagccctgagtggattagagatggtttgtaagagaaaagaatgggattattacaccacaatgtcctctctttgagaaaccacaagaggaaatttcttgcccattttggtgtcaggagtatgtctgcttctcttgagagatgggattctttaaccgattttgtctcccacttgataatgactctaagaccttaggcccgcatcttgcaggtgtatagaattaaggcatacaatttgtgggcggttgcagtcagggtccctgacaggaaacgtggcaccttccaaagggtgaagtaagaagggcttagtgaaggagtaagttacaaaggtgtggcaggatgaaggaagccagcaagggatggttcacaggaagtgctacctgtctctaggcccaaagcatcaggaggacagagcagttatcagaacccagtgagccctgtagctataggagaagcaaggagacacaggagcccttcagggagcatagaacaggtagagaagggtggaaagaggatcagaagaggcaaacagaacatccaggccagagctaatgtggttcctgctctgtcttgctttggaaaccttattttctttttgctttgttttatttattatgaatttacttttacttggtgctttgtaagcctctttaaatcctttttggaagaggttaaaagaatagaaaaaagaaaagatgaaagagaccatcatgaagaacaactcctgccaagccaactttatttcctctttggacgggattatgagactagtaaataagaagggtccccaaaatgtgcttaatgtgtgaatttcattaatttttattatgaaatattttgtaaatgccacattttacatatatataatgtatatgccatatacataacatatataatgtgtatgtgtcatacatataagttataaataaaatacccacatgatatggtttggatctgtgtccctgcccaaatttcatgtcaaattgtaatccccagtgtggaggtgcggcctggtgagattggatcatgagtttttttctaatggtttagcaccatcctcctagtgctgtcttgtgatagagttctcactagatctggttgtgtaaaagtgtgtggcatggctgggtgcagtgtctcacgcctgtaatcccagcactttgggaggccaaggcaggtggatcacttgagacaaggggtttgagaccagcctggccaacatggtgaaaccttgtctctactaaaaacataaaaattagctgggcatggtggcacacgcctgtaatcctagctactcgggagactgaggcatgagaattgggtgaacccaggaggtggaggttgccgtgaggtgagatcgtgccactacactccagcccgggcaacagagcgagaccctgtcttggaaaaaaaaaaaattgtggcactttcctgccccttctctcttcctcctgctccagccatgtaagacctgcatgctttcccttcaccttctgccatgattataagtttcctgaggcctccccagctatgcttcctatatagcctgcagaactgtgaaccaattaaacctctttataaattacccagtctcaggtgtttcttcatagcaatgcaagaatgcactaatacaggccttgttatagaattgagtcattggcccgattctatattcctatctgtatccacgccgtaaaaggcagagtagacttccccattccttgactgtaaactcagccatgcagattgctttggccaaatgggatgatggcagaaactacgtgagcaggaacttgaagtgtgtttgtcctgttaaataaattctcttaatattccacatttccatgagatgaacttgcaacagctagccagctaatccaagaataatgaaagacatctaggttgtggtcacctggctgacccagagacttgcagtttaaagctgagctgcccaactgagcacagcctcaaatagctaacccccagcttaccctaaaatgtatgaaaacaaatgcttattttacataactgaaattttgcagttgcatgttacacagcaaatgctaaccaatacatacatacccaatacccaagaagaacattttaagttccctgtgtccctgtatgctcattcttgattccccactcctttaatctattagtgtggtggggtatagtaatcgattttctgttgttaaatcatcctccattcatggaataaataaaactcaaatcactttataaaacataaaactcaaagctaaattcagtttgagaattttctagaaattttacatcttttgttcattagtgagattttcctataattttcttttcatgtgctgtcctcaattttagatagattttgctagccttatgaaataagctgaagtgtgcctccatcttccacaccccccacccaaattttctagaacagtttgaacaaaataggaattaactgtttctttaatattttggtcggacttagtagtaaaaccatctggacctggtgtttccttgtatcaggtaaataaatgtaatctacaattaactggattcatagctggtcaattcacccttacccaaaaagggtcaagaaatggatcaacattgctctgtcctgtttgatatttttaggagtgtcttgggtgaaaatatgagagagaatttatcgtttattcaggtgacaaaaatttggtagagaagatctgcagttatgcctttagggtaaaaaataaaccaaaatgaatttgattcaatttattacgattaaagcattgtggggatgctcagagggaactgtgcttccttctagatttgcatttatgtttttatattattgtttttgtttcttaatcattggcttgggagcaatttgtttcaataggacttggagcctttccctgaccacagactgggtaggaggagggttatatggggaatgtttcagctgctactatgaatcccattttcaaagtgagagaggatatagtttttttttttttgagacagtctcactctgtcacccaggttggagtacagcggcacgatctcagctcactgcaacctccgcttctcgggttcaagcgattctcgtgtctcagcctcccaagtagctgggactacaggcacgagccgccacacctggctaattttttatattttttgtagagatggggttttgccatgttggccaggctggtcttgaactcctcacctcaggtgatctgccttcctcagcctcccaaagtgctgggattacaggcatgagccactgcacccagcccaaggatgtattcttgatacccccatgtattcatgctctctttggtcctatccttgcaggtaccacataccaagttctgagcactatgctttatatgacaaaccatataaagcagaggggggtagcctggataatgatgtgtctagagcaggatttctcagccttggcacttttgatgttttgggccagaaaatcgttgtgggggttgtcctgtgtctcgtaggattcttagcagcatcctggccaccacccactagttgccggtagcttctcccttagatgtaacaaccaaaaatgtctctagataatgccaaatgcctcctaagaggcaagtttgcccctggttgagaaccactggtctaaagaccacattgtagtaagaatggtaaaggcagtgagtgatttgggccagagagggagattcacggtgaaaacataccagtttgttttagaaactctgttagaagtgctgttgtggccctctgggcgactatcttccagtcttccaacaggctagacaggaaattcgccaggctgctaatcttctcttgcctactccagattcccagccatatgaagacaccctagctggacgatcagttcttgttaagaatctgacccctcaaactctacaacctcgatggaccagaccctccttagtcatccatagtaccccaattgcagtctgcctgcaggaccctccccattgggttcactgttccagaataaaactgtgtccattggacagccaacctgatttctcctcttcctcctggaagtcacaggtactctcccctacttcccttaaactcactcgaatttctgaagaacgtaataaccctcatgagcctaatacatcccttcattctattaagtctattcatccttaccctcctttttgcaacagggctttacgcagtcacccccactacttggactgcgccccaaaaacttgtcatccctactatcttctgtctagtcatactcctattcaccattctcaactgcttataaatgccctgctcttgtttacactgccagtttacactgtttctccaagccatcacagctgatatctcctggtgctatccccaaactgccactcttaactccctcttagagtggatagatgatctttgctggcagggcaccctccaatactttcaccctgataaagtcctattccttagttttatactcttattctcgttcccattcttatgctaccctctacctctccccagctatctccaccatactatcaatctcagtcactctttcctagccgtttctagtccttttttaacaaacaattgctggctttgcatttctctttcctccaggatcgccaaggcctcgacttactcactgctaaaaaaggagactctgtatatttttaaatgaagagtgttgtttttacctaaatcaatctggcctggtatatgacaacataaaaaactcaaggatagagcccaaaaactagccaaccaagcaaataattatgctgaacccccttgggcactctctaattggatgtcctgggtcctcccaattcttagtcctttaatacctgtttttctccttctcttattcggaccttgtgtcttccgcttagtttctcaattcatacaaaaccgcatacaggccatcaccaataattctatataacaaatgctccttctaacaaccccacaatatcaccccttaccccaaaatcttgcttcagtttaatctctcccactctaggttcccatgccgcccctaatcccgcttgaagcagccctgagaaacatcgcccattatccccccaaaattttcaccacctcaacacttcaccaccattttgttttgtttttcttattaatgtaagaagacaggaatgtcaggcctctgagcccaagctaagccatcatatcccctatgacctgcacgtatacatccagatggcccgaagcaactgaagatccacaaaagaagtgaaaatagccttaactgataacattccaccattgtgatttgttcctgccccaccctgatagacatattctcccccgcccttaaggtactttgtaatattctcccctcccctccccccactcttaagaaggtactttgtacacctatcccaaacctgcaagaactaaatgataatcccaccaccctttgctgactcctttttcggactcagcccgcctgcatccaggtgaaataaacagccttgttgcgcacgcacacacacatacacaaaagtgctgttgtggtgaaggagaatcattctgtgggactccaaggggtagaacttagttggaaattacaagatgacaactgtggaatcttaaaaaaaaaaaaaaattggcatctcagttatttcagcaatagaatgtgctgccttgcagaggcaataagttccctgacactagcagtattcaagcagggactgactgtctacttgtcagggtactgtagagggaaattggagagcttcatatttcaatccaagtagactaaactaggaggaaagaatggaagactttggggcatttgagtctagaagtcttagttgtagctatgatgagtagcataaggtaccggtatggctacccatatccccttaatctcactgttgctgtacatgatgatggcttttttcccccacattttttttttctttttagggacagggtcttgctctgttgcccagaccagagtgccctggcgattataattcactgcagtcttgaactcctgggctcaagcaatcctctgtctgaacctctcaagtagctgggactacaggtgtgcatcaccatgcctggctattttttttttttcttgtagagactagtttttgctatgttgtccgggctggtctggaactgttagcctcaagctatcttcccaccttggctcccagagtgctgggattacagccactatgtaagccattgcacccagccctgatggcttctacaagcacctgggggctttctctggctgcaggagtgtgttcaaccagtacatgaggcaaattagtagtggtgggagactattcctctccaaccctgaaagagccttcaaccaattttagatgggagttggtggataaataccctagctccctcactccttatgggggatgattctgatgtgtgttccccagagtctcccaagagtcttcagtaggaatgagcctcagttgcccacagctcattaacacaccctatatcacctttcttccctttcctgtctcacttccctgctgccctatcagtgctccctagaatcactttcccagtaaacttcttacatttgaatctttagctcaggattttctaccaagagaatctaagagctatgcaagacctaagcccatggacttgcctgagaaaagggaagtaaactagagggatggttggtatttcacatttacaaaacctctaccttgatgtttgaagcaagcaaaacaggactttagactgtcaccaaagaggatatttggaaatggtaataaagaagttaagagagaggatgggaagcagagggctatagtgcttcaactgaagcagcctgctttgcactgctgctgctagactgctgctggcaaggctttttagctctcactttatcttgaactctgcagaggtcagagtcctagaataactgatccagtcattctatgagtctgtcctccaaggactttagagaccatttagtcagcaaatattgatggaacacctgttatatgccaggccctggaccaggctttgaggatgcagacatgaataaaatacagtcctactgttaggaattcaaggtatagttagagagacagactcactgatagacagttataacacagaggtctggggaacagaggaggggcactaactcaagctgggagttcttcagattcaaatatggggaaactgaggcccagagagggaaagctgatgagatgatataattcatgggcattgctatagacattaaatatttctggtgatagtttgatgctttataattatcttttgcatgaaaggtaatggttcatgacccttctgcccccacttactcttggctttgtggttacaactgcttttcctgacacttattgctggcttgaactttgcctttttgtaacccccccgtgactgggatcttgtgttctgaaagagctcaacagtctctactatttgtccccatcagtctgcccaatcctattacctgaagcttctccattttcctcctctacatctcaactccctgtaaattccaagatcttaggttttgacaatttcctaaccacctgacttgccttatgtccaagttccattgtgcttagctctgatactcagagaaatgcctcctgtggcctgcagaacagatgacctaaagctcacaggcttgcaacaaaaatgatctatatgtaaatcccatcccaaaactctcccccaaactaactgaaagtagttggagaagaatctctttgcaggttgacaatgcacctgaagaaaaccataggaattgtgtgttttataagagcctgcttcctcatgattttgtatgggaataaagtcagaaggaaggcaagcttttgtcctataaagtccttggaagaaatgggccatttcactaaaatacatgtacatacatccagagaagtatatttcctgactcgaaaaatatcgcctgcttagccacctccttggaagctcctgcttcagccttacatttctcttcaaccattgaccttctagagtcttgactaaacaccagggtttagggcccaaatatatatatatacacacacatatatatatattttaaccttgagaaccagttgagtcattcactattaacaacaaattgggctcctaataatatctggcctttgtggagtgattaatgtgtgccagacactgtgctgaccacttgaaaattattatgtactttaattttctcaacaactcttcaggaaggcatgtgagcagattccatagtttgatgtcacacagcaagcaactagcaggaccaggttttgaacccagggagtctgactccagagcagagcccaggaacccactatcctgtctattctatgtgcagatcagtttcaaggttctgggaagacaaacaggtataagttgtggtcctcgagttccagaaaaacttatgaaatcatggagaagatgaaacaagaatgcaaaatgagaaataatgccagaaactattgctaagtgtcttatcagtgggacagacagagcaggaacttaccaggtagaggaagagatcagtgaggcaggggaggtctaaacgactccacggagaagcatggtatttggccttgaaagattgaaaggacttaggtaagctgagaggaagaagtcaaccaagataagaggactttgcacacatgggttcaagtcccagctctgacgttatctacacaatcataggaaagtcactcattctccttattgttctatttcctttttgtaaagagagaatctcagggaagtggtatggagtaagagagaaagtacaaatttggaacctggcttcagagaggtggggagggaggagttaatgatttggtgagaggggtttacaaagttctagttcttgacctaaatagtggttccatgagtaaaaatcaacatccaggctaggcgcggtggctgacgcctgtaatcccagcactttgggaggctaaggtgggcagataacctgaggtcaggagttcaagacagcctggcaaacatggtgaaaccccatctccactaaaaatacaaaaattagccaggtgtggtggtgcgtgcctgtaatcccagctactcgggaggctgaggcaggagaatcgcttcaacctgggagacagaggtggcagtgagctgagatcatgccactgcactccagcctgggtgacagagtaagactctgtctcaaaaacaaacaaacaaacaaacaaacaagcaaacaaacaaacaaaaaaacaggccaggcacggcggctcatgcctgtaatcccagcactttgggaggccaaggcaggcagatcacctgaggtcaggagttcgagaccagcctggccaacatggcaaaaccccgtctctactaaaaatacaaaaattagctggttgtggtggggggtgcacctgtaatcccagctactcaggaggctgaggcaggagaattgcttgaacctgggaggcggaggttgcagtgagctgagatcataccactgcactccagcctgggcaacaagagtgagactccatctcaaaacaaaaacaaaacaacaacaacaacaacaaccaccaccaaaaaccaacatccataagtgataacccatcaaacagtaaaagtaagtacttaagtagcttctaatttttatttgtctgtttctttatttataaatggggatgatacctcacaagaagactgatagaatgaggtgacctgatggggagtacctagcagtacacaggaagcttaaaaggtatgaaaccggcatagtccaagctcagtagatgaccaaagtcctgggaagacacagcgggaggaaaagaagatcctcctatcccaaaggaattggaatgcatattgagaattggtgccttaataggcttttaaattagggaagacactattcatctgagctagttgaaattgtttccatattaaaaaaaaaacaactgatgggatggcttcctcgcctgctttctcccctgtctcccatcactcttttgggattatttgaaccaaaataaacctctttttccaattatcttaatagggcttgggttaaatatacgcagtcattgatataactttgaaggggtattgagaagcctgtcagccaggctcccacagtctccacagtctataggagacacagggatttctgtctacctcagaagaaatccagctggtcaggacaatggactaagcccctctgtgaatctgagttcttcattaggaagcaaatagtagggggaactagatagcacttatctttggcttcaggctccttcctcacccagagctgctaaagacatggaaggctctgtggtgagggattccatggtggagggccccatggtggaggattccatggttgggggttctatggtagacatttccatggtggagtgttctgtagtgaggggttacatgtggtggggggagtctctgattggaaccttcatcatgccactacacctttccttttcccacacaaaccccactcccaagccccagcctcattacttcccactgaccactaataccccaccctttagcaatgctaaactacagtttctcaaacatcccaacttgtttcccttcctcacatgccaagtgccactcatctcacatacttggcttctacatttccttcttcaggaagctcctcaggccttgttcctgggcctggctttggttctttcagatataatctcccaacacgaagtgcatcctctattgcaacccttatcagctgtattacaatggtcggtttactagttgataggatattgtttcatgtttctgaatagagaccaaaaataataatgaacaaaatagaaatgtgtgtcttcccagcaggcatcacatgagagtgttatggggccatgactcaggcccattcactcttgttgctctgcctccctagggggttgacaacatggtgcaatttggctccaagctacaccagaattccaacctgtcctaattccaaagccagccatccacaagctatgctgcctgtgttagtgaagtgtagctcattgcagattagggaggaagatgcgaagaaaattaggaaagttcaagggatattgggagacacttgagtgcccagtggggggttggtaggagatgcaatcataaaggtcggttcactgtgcaggactcgaatgtcataaatacatttgataatgacagtgcccttgtcttaatccatttgttttgttttaaaggaacacttgaggctgtttaatttataaagaaaagaggtttatttggcacatgattctgttggctggaagactatgcacctggtgaaagcctcagctgcttccactcatggtggaaggtgaaggggattcaacatgtgcagagaccacacagtgagagaggaagcaagagagaggaagggaggtgccaggctctttttaacaaccaatcttgtgggaactaatatagtgagagctcactcactgcccccacttcagggagggaattaatgtatttgtgagggagccagccccatgacccaacacctcccactaggcctcacttcccaacactgtaacactggggatgaaatttcaacatgagatttggaggggtcaaatgtccaaacaatagcaggtcttgatggtcagacagtgtcatctctcaggcatgcactccaaaatcactgcctctgaagtgagaatcagctccaagtgcctctgaagacttttcctaaatctttcttacatcatattggagagatgtgggtcagatctctgcaaagggaagtgagtaaagaagctgattctcaacaaatcacttctacagctggagtccatgggcctgagccatctaccttctgagctgtttctaaacttgactgatcatcagaatcatcttagcactttaataacaaagaaatgagatcctgagcctatctgtgtcccctttaatatccagggttgggctcaggaacctgtatatttttgtaaaattcttccagtgactctgatgaggagctgggtgtgggcacctttgcacctaggagacccatcaccaccctgtgtttactgtaactgaagattcaccaaccgaactccttttttctttcatggtggaagcatttttctctctttggacccatggcaggttgattcttcttagacattctctctgaattctaagtttattgcaaagtccaaaaagttttgggcctcctccaagcctcctcagtgacaaatccattctctagaatattaaatacagagctgagtgattctaaactttggctaaccacaaactccaacctctatacatcttgtaaagaggttcagaaaaatcattagacatcaaaacttcaaatgcacccctgatagagacttcttcttaggtttgaccatccatctcccatgattcccaaaccactaagtccctgggccaagatttctgtcattaggaaatcacccaggcaggaactgagccctggtaatagtagatttatctagtggcttcatgagtcatgtgctttatatacatcattccatgaaaaccaccttgacaagttggggatattagcattatgagtcccaattatagatgaagaatctgaagctcagaggagtagaaatgggtttcaaacctatatctgcacacatgcacacacatggaagagaggaaaaggacaagaaatcgaggtggaggctggacacagtggcttatgcctgtaatcctagcattttgggaggccgagcggggggaggctcacctgaggtcaggagttcaagaccagcctggccaacatggagaaacccagtctctactaaaaatacaaaaattagccacacgtggtgtgggcacctgtagtcccagctacttggaaggctgaagcaggagaatctcttgaacacgggaggtggaggttgcactgaaccaagatcgtgccactgcactccatccagcctgggtgacagggcaagactccatctcaaaaaacaaacaaaccaaaaaaaagaaagacagagagcatttccttgttgaggtctgcttcctattttcctgattctctgtgaaaggtcctttccagagaaagttcccccacacctttcacattctcatgccaatagcagccaatacagaaacagcctttgatgctccaaggaaaactttagcaaacaaagttgagctccttctgcaaaaactagcttctcctttgcatcatttcagagcctccatggacccacaaatattattttcagctaatcacgtatgcgccagacagttatgatatacaataaatgattaacacattcagctgattcgaagacaattcaccaaatttattggaaggcacttttattcaagacaccacacagattccctttccctacatttttttgttcctttgctgattcactctgtattgtggctgaatcatttagcttttctgttgttgttgttccattcctttggcttttataactcaacagagctgaatgggagaaggctgggcacatgattactgctgggaaaatggcagtttgactcatgagaggtatggtgagcacactttgggatcagaagaattctaaatctgaggcacttgaagagaaaatagccatcacatttggtctgtcttcctgtggagattgagttcatcccccacaccccactctacccagtgctattatttgctgataggaggagcgttatactgactatgattggtctgtagcaattagctcaaattctcctctggcaggctggaccctccagagcattaattggttttaatgcagagtggtttaaaataactcactcttccacaggctaattccttgtttctcggagcagattgaattgttcggaaatgaaccattcttctcactcggcccttggtttgtagcatctttctagaaaagagaggctaatgtgggaatggggtcagggagagactggctgttgcctgttctgtgactccaaaatgttttctctagtctggacagtattatccttgtctttcgaaactgattgatgaatgcagaataatgtgcattaagaaaatcattatattcccacaccactcagagtactgaatggctaaaaaataatgtcagccaagtgttgtcatgtgcgtctgtgtgaagagaccaccaaacaggctttgtgtgagcaacaaagctgcttatttcacctgggtgcaggcaggctgagtccgaaaaaggagtcagtgaagggagataggggtggggctgttttataggatttgggtgggtagtggaaaattacagtcaaagggggtttttctcttatgggcaggggcaggggtcacaaggtgctcagtgggggaggttctgagccaggagaaggaatttcacaaggttaattgctcagttgaggtggggcaggaacaaatcacaatggtggaatgtcatcagttaaggcaggaaccagccattttcacttcttttgtgattcttcacttgcttcaggccatctggatgtatacgtgcaggtcacaggggatacggtggcttagcttgggctcagaggcctgacattcctgccttcttatattaataagaaaaataacataaaatagtattgaagtgttggggcagtgaaaattatggggggtggtatggagagataatgggcaatgtttctcagggctgcttcaagtgggattggggtggcatgggaacctagagtgggagagtttaagctgaaggaagattttgtggtaaggttgttagaaggagcatttgtcatatagaatgattggtgatggcctggatgtggttttgtatgaattgaaaaactaaacggaagacacaaggtccaaataagagaaggagaaaaacaggtattaatggactaagaattgggaggacccaggacatccaattagagagtgcccaagggggttcagcataattacttgcttggttggcaagttttcgggctctattcttgacagagaccttttttttaagttggaggctgagcttagtgaggtatgattttaaaagaccattagtccgttttacctttcctgaagattgaggatggtaaggggtatgaagattccactgaacaccaagagcctgagaaactgcttgggtgatttaactaataaaggccagtctgttatgtatagaggtgggaaggccaaatcgaggaattatgtctgacagaagggaagaaatgactgtggtggccttctcagaccctgtgagacccatccagtgaaagtgtctacctagaccaagaggtattttagtttcctgactcagggcatgtgagtaaagtcaatttgccagtcctgggcaggggcaaatccccgagcttgatgtatagggaagggagggggcctgaacaatccccgaggagtagtaaaatagcagatggaacactgagaagtgatttccttgagaatagatttccatgatggaaaggaaatgagaggttctaagagttaggctagcggcttgtaacctacatggaagaggttatgaaatgacaacagaatagaatgggcctgtgaggctggaaggagatattttccttggtctaagaaccatttgccttgtttggggagagattgataggtggaagtttcagtgggagagtaggtgggagtgactgatgaggaggagaaaaactggccatgagggacagaagttggaacactagctgcttctttagctaccttatcagcataagcgttgccctgagcgatgggatctgatgccttttgatggccctcacagtgaataactccagctttctttggaagcaaagcagccttgagacgagtttttattaaagaggcattaatgatggaagaccattgcatagtgaggaaacctgtttcagcccatataacagcaaggtggtgcaggatatggaagacatatttagagtcagtataaatattgactgtagtccctttgcaagagtgagggcctgagttaaggcaatgagttcagcttgctgagaggtagtagagggggcagagcagaagcctcaatgatagatgtggaagatactactatagcatagcctgccttagctggtgagtggcgattaggcctggtggaactgccatcagtaaaccaagtcagggtgaggaacaggaaagaaggaaatatggggaaatggagtgaatgccaggtgtatcagagagatacagtcatgggggtcatgtgtggtatcaggaataatgtggaaggccggattgaagtctgggccagaaacaatggtaattgtgggagactcaacaaagagtgagtatagccaaaggagctggagggcagaaagtatatgcgtcaggtgtgaggaagaaaatagattttggaagttatgggaacgtagagagtgagttgagcatagtttgtgattttgagggcctctaaaagtattaaagctgcagcatctgccacacgcagacatgagggctaggctaaaaaagtaaggtcaagttgtttggacagaaaggctatagggtacggtcccggctcttgggtaagaattctaaccacacagcccttctcttcggctgtgtgtaatggaaaaggttgggatgagttagggagagctagtgtgggagcagcctttagggctgtttttaaggaacggaaagaggattggggaaaggatttaggatctatggggtcagctaggtttatctagagaagaataatgggttgtggagggaggtattgaggataggagagtatcctatgggccaccccataggcatatgtcttgccccataggcaagacaatttggttgataaagcgcagatcctgaactaacctgtaagacttgtctggtttttggacaggtaaaatgggggaattgtaaggagagattataggctttaaaaggccatgctgtaaccggcgagtgataacaggctttaatccttttaaagcatgctgtaggatgggatattggcattgagcgagggaagggtgattaggttttaatgggatggtaaggggtgcatcatctgtcaccaaggagggagtagaggtgtcctatacttgtcaattaaggtggggagatacaaggagaggatgtgaaggaggctttgaactgggggaaaaggtggcaatgagatgtggctgtagcttaggaatagtcagggaagcagataatttagttaaaatgtctccacctaataagggagctgggcaggtggggataactaaaaaagagtgcatgaaagaatgctgtccaaattggcaccagagttggggagttttaagaggtttagaagcctggccgtcaatacccacaacagttatagaggcaagggaaacacacacttgaaaagaagataatgtggagtggatagcctccgtattgattaagaaggggatgaacttaccctccactgtaagagttacccaaagtgtctgtgatggtcctgtaggctcctgaggcgatccggcagtgtcagtcttcagccactaagccgagatcagataaagaaaaaggagctttaatcttggctatgccttcagctccagccacctctttaagaggaaattgttgggcaggtgggggagggctagttgaagaaagaaattataagctggatggggtgtgaggagggggtgataaaaggattacagggtcagggagtggaggctgaggaagaattgggacctggcttggcctggcgaggagcagcctggggaggaggggagaggtcagatgagtctgtaggaaaggaggattcaaaggactcagagcttggggtggagactgaaagaacagacaggagagaaagaagaaagatttgggacgagtctcactgagagcagagactacggagggaccgatgtgtaaaagaatgcctggacgtcaggcacctcagaccctttgcccatttttcgacaaaaattatctagatcttgtaggaaagacaaattgaaagtgccattctctggccacttggaactactgtcgagtttgtattggggccaagcggtattgcagaagaaaataaggcatttaagttttaggtcaggtgtgggttgaagaggttttaagttcttgagaacacaggctaagggagaagaagagggaatggagggccgaagtttgcccatagtgaaggaggtaagtttaaagagaaagctagagacaatggagaagggggtggtaagcagccctgggctgcaatgtgggtgagcagccaaagcaggcatccctgcaactgacttgccaccaagggaatgtgggtgaatgaccaaggcaggcatccccgcggtgatcagacaccaatggagtgtgggtgaataatcaggcaggtgtccctgcagtgattaaacaccaagggaagaatgtcttcccaagtctgtaactggcactggagttttgggtccacggataaaatgagtctcctttgtctctactagaaaggaaaataagtggaattggaaggacagggagattgaaggatagcaagagagggagattgaagggtagcgagaggctggagaagagagtgaaaagaccacttacctgatttgaaattggcgagatgttcctcgggctggttgatctgaggacccaaggtcataggtggatctcctcatggagtgagggcgatgacaggggaccgatctcctgaagcagtcctcctgtcccgggtcttcggcaccaaatgttatgcgcgtccgtgtggagagaccaccaaacaggctttgtgtgagcaacaaagct

SEQ ID NO: 134 - DNA, 207557 bp, Human
  misc_feature (1)...(207557): n = A,T,C or G
ccaaatactaaggtttatcatgtagatttttcttgtgttgtctccaggctgacaggggtctaaaattgtctctggtgattaatctttgtctttcctggtagagcaggaaggaggtacaccttcgtaaacttatatcctgctttttggcaaatagagggagggcagagtgcttttctagtaccgtgtacctatttgcttcttcctaattgccttcagctcaaaataatccttaaaccaaagtggcatacactgccaatgctcttgagtagattgaaggctccaaagtaaaaagtgctgtactgtagtattggatctccaagcatcagcagtgagtcaggtattacaatgctgttttcagtgagtgtgccatccgtctatgaggagaaatgagaggagctagaaaaataaactgacagctagaaaaatactccactgaatcaacaaatagacatttcttgaaacagtaacatgctcaatgtgcaattttgaaaaagtaaactgagcaaggatcatgaaacatgatggtggtgagaatttatacttctcaggtagccaggggaagctaggtttccacagattcctttgtctttcagtccttttgaaaacggagaaaaagcaagagaagagggacggcaccatcaggtagagtggatctcagctagaatgaggggaagtggcccagaatccaacctcctccaaagagctgtgtgacaggcaagtcctatcctttctgcacctctttccttaaatgtaagttgaagcatttggaccagactgtttcaatgatcttctagattgcttttgccaaaacagaactctccattcctgtaagataagtacacaatggctctcagagatctaaaaactggccttggttacctgcaaactttgaggccccaaggcacaaaaataatagctttttttttttatttttttttttaaggttcatgaaagcttcggacacaaaagcttatatggtcttcgtctctataaataaaccagggagtaaagaaaaaccccgctagtttcagtaaagcgttgctattaagcaaagcaaacctatgcaaatatcaagttcttaatgaggagtgtttcctaaggggcctgtcctctggtaccccgcctctcctctgccacagtcatgtgaaggcagacaggcacacactcgcacactagcacgcacttgggagctcagggaacataacactggttagtgagtcggtgtccctctcccatcgattgcaacttttcccctccttccctctcctgcctctccccactttctacatctccgttctcaggaaggctcagggaggatcccccgctgcgtgcactgcgttctgagaggccggggagagactctgggcccgcggtcggggcggagccaaggtcccaacccacattgaacgggcttgaggattacttggagggctcaggatctaggaggagggcccagggcactgggttggggttactctgggaaagctctgtgggaccaggtgggaccttagggctggagatggactctgcgagctgggggcggagttctagactggcaggagcggagttctgggtggcgggggcggggtcgggaccagcagggacggcctctgagagttgggggcggaattctgggccggtgagggctggggcgggaccagcaggggaggcctccgcgagctaggggaggagctctgcattgtctggggcggggcttcgagtagcggtagcgaggtctggagccgcaggcgctgcctccgcgaggtaggggaggagctctgtactgtcaggggcggggctctgagtagcgaggccgggtctgaactatcaggcgcggcctctgcgagctgggggcggggttctgcaccggcgggggcggggttgtgagtggtgggggcggggtctggagcagcaggcgccgcgtttgcgagctaaggtcggagttctgcaccggcgggggcggggctctgcgtggccggggcgggctcggggatccgcggggcgactcccggtctggcttgggcaggctgcccgggccgtggcaggaagccggaagcagccgcggccccagttcgggagacatggcgggcgttaaaggtacatcgcggtccccggctcgcttgtcgtgtggtggggttgccacctccgttccggtcaagcctggggctgcgccttccgcgcgccgttggggaacggcctcaccacccttcccgcctctccggttcgggaggcgatcgaccgctcccttcgtcccttggggtgtgggtggagcggcgtttcgggggagccttggccctttttgcaaggccgctggccttcctgctctccagtggcggcaccagacccctccccagcctgagccctcggcgagagcggcgccctccacctctcctgagtttttaaacaaggtttccacttcttgacgccaccctaacgcctttcttctggttttctgcccctccgcagtttcctatttgccacaaaggaccctttgtctccagcgttcttagcattgggaaacttaatcctctttttcctaatgatttttccaactgggcagagttgaccgcgggcgggtgtcaatggaaagcacccagaaagacggtgtttctcgcagtcgtggagagtagattacgtgtaattttaatactgctttcttcggtgttttctctgtttatggacagagcagaaaccagtgtgtgtgtagtatgtgttttttgcatggggcagttggtaaaaacaccgcgtcccttatctgtatggcttcagagcaatgcgagacggaaaaggttttttgcaaggcttcctgtattttggtaggaaaacattccatttctaatctgtcgaatagagtagcatgacttgtttttatattggcttttatatcatccttgaaatttgcacccaaagatatccccagttaacatctgctataaacatgtagatagtatatatacgagtacgcctctgttcannnnnnnnnnnnnnnnnnnntgccgaaaacagatgaaaagtagtgtctcagtactacacatgatcagaaactaccaaatcatgatcacgtttatgtgtgaatgtgttagaaaattgtgatgtagtgaaaaaaaaggaagtctgaaatggaaacggactaagggaaggaagcattttacagattgttcaacttttattgaggaactactgtatgccagagacttaggatacaaagataaatgagaagttattggtgggtgacagagctggaaataattatattactatgtcagtgtttatgttgggctcagatgcggtgggagaacagatggtgggttggattttgtcctccaaaaagatgtgttcaagctctaattccctggtacctgtgaatgtgatcttatttggaagtagtatctttgcagatataatcaaattaaaatgataactggtttaaggtgggccctaatccaatgactggtgtccttataagaagaggggaatttagacatagagacatacagggagaataccatgggaagacggagacagaaattggagtgatgcagctacaaagtcaggagcaccaaagattgttggcaaccatgctggcaaccactgagtgttaggaagaggcaaggaagggtgcttccctacagccttcagagggagtgtggtggcgctgctgacaccttgatttcagaagtccagcctccagaactgtcagaagataaatttctgttgttctcagccatccagtttgtggtactttgtaacggcagccctaggaagctgatgcaggtgggattgattcccctgctccagagaaaggactgttttcacagaagaggcgatgcttgaactgaatctgaagggatcaatgtggcttcccttggcaaggcatggagtgaaggtggagtatatcccaagtggggaggacagcacgtgacatggcgcagggcttatgaaacaacatgccttcttctcttcaggtacttaagctacattagtaagaccagaacttagtggtgagggttgaagctggctggacaggcagttaggagtgagtcaggcgatggtgagcctccgtgccagaacaacttgtaggctgtggaagcaaccgcaaagggatggcagcggtgatatatatagttgaaagatcactgtctgctgtgtagaggatggattggaagagtcacagaggcaggaataagaggttaagggcctgcaccagggctgtagcagagagtttaagaagtctgggagattgagtcaccttgacctactgattcattggaaggtggaatgcaatcatggtgtcagtcctctaagataggacctttaaagtgtagggatagtggtttggttttacacgtgttacacatgttgaatttgaggttcttgttggcggtcaaggcagagaagtccagactggaggtggaagtacaggcctagttctttaggacctactctgggctggagcatcagttgcggccgggcccttgtggtagtaggagctttgggttgaacataagttttcagcaggagtgcgtggagtgaaaagagagatggggttggatttttggtcaactccaactttaagagattcagaggatgtgattcctgaaaaaagaggaaaaaaaagaccaaaaagaatcaaacagaaagatggttgtgaacgttgagaaactggtatcagaacagaaggaagaggtctgcagtacctagctttgacaggcctcatggaggagggggtactgccgatggtcaggcacagaggagaggagcaaagcctgctgggaaaagatcatctgaatgaaatagtatgtggtatttgctttccatccacacatgggcattttccattaaagagtggaaatgtaaaaagatatgttaaaattgacagtgtttctttgtcccttaacatgtgtatactttcagatgttttttaaaaagcactttggcaccttcctattaaagagtctctctaaatcttctctcaagtaaaaggaagcaatcaaaaatgttcattggcttaattaattagtttaatactaattatgagtattatggacttttttcagaagaaaatttggataagatagtctcctatgcttttgatttctacctttatcaaagaacattgctaaaatgagtagatacctgagtcagtcagcatttatttggctacctccttttgccaagcactttacatagattatctcatttaattcccataagctcaataaggtggcaccattatttccattttacaggtgagaaatcaggttcagaggattagcttctacccaaagtcataagaccagatggtggcagagttaagatttgactcatgtttgtgactcagagctcaagattttgtaacaaccttgatactctgtttctcactcagcagcacaacaagggcaaatacgttcctactcccgcagagactagtgtccaatagatacagggaatacatattttattcagtgcacactagttgggaattgtttcctacaaagacatgaaaacaatcttcaaatacttgcagtactgtggtttggggaggcaaaatgatcaaaggtatatattacagggaggcagttctggatataatttaaagaaggagggctttcaacatttagaagctgttggaattaaatgacttgccttgggaggtagtgagttttccttcactggagttatgtggaccaactggctgccctctggtgacaaatacagagggaattcatccattggataggggttaggtactggaattacttgagacctttgtatactttatgatttttaaggtggcagacatgggtcattgtcttaatcagtttgggctactataagaaatatattttagactgggtggcttaaacaacaaacatttagtttccacagttctgaagactgggaagtccaaaattgtggtgcagtcagatctggtgtctggtgagagccagcttcctggtttgcaggcctgctttctgctctcacattggagaacagagggagagaaacacagagagagtgtgtgctctactttctctcttcttataagggcactcatcccatcgtggagaccccaccctcatgacctcatctgaacctaattatctcccaaaggtccacctcctgatagcatctcacggtgagagggatggagccgggaaggtttcaacatgtgaatttgaaagggacacacataatgcagtctgtaacgggtcaaatgtaacctcaataaaatgagtaaattgctacatttgcttgaatttgggacctttttttctttcttttttattttagtaaatgtttttattgataaatgattcacataccataaaattaacattcttaaagtgtaagatttcatggtttttagtatattcagaaggttatgcagccatcactactatctaattccagaaaatttactcatccgccaaagaaactctggacctattagaagtcactccccatttccccaaaccctctagtgcctgacaacctctactgtgggaactttaacttttggctttatttttcacagctctcgtggcattatccttcagtggggctattggactgacttttcttatgctgggatgtgccttagaggattatgggtaagttatcatttcaaaaagaactattcctctttctgtgtctttgtcactattagtatgggtgttagagagttcggtcaatttagcaccaagttctaaccagtgagttagtggagcccagtttatgaacacagtccctttgtgggtcaggtgtacttttgcagagggctctgttaaaaattgatgtattcattccataagcatttgtttaacacctactctggactagctggggacacacaaatgaagagagagtcctgtcctcaaagaggaggtaaagttctagttgtgagtgagagacaggcaaacggtctagtcagtaatctggcagctgcagtggagatgccagcacagtacgctggagctcggataaagtgcacctgagtttcagtgggacagtcagggaaggctgcatggcagaggttgtatctgagccaagactaggtggatgaataagagtttttcagggtgatgagtcaggggaggacattccaggcagagggaacattctacacattttttcattcaaccattgttggttgaatgcttcccatgtgccagctactgttatgggaactagggattaagacataagaaaacaaaggtcctgctctctcagagtttgtgtttcagtgggggagacggacagtaaacaacaaaagtatgcatactgtcagaggtagaaatggtacaaaagatgaagagcacagaagctgggaagacagtggtcagggagggcctctcagaggaggtaaaaagtgagaagaaatgtcaagaaaatcagcaagcaggccatacagatctctagggaaaaagcactttaggcaccaggaaagctgaatgctaaggcccggagacatgaaagtgtatatagccttttcaggaaaccacacatggtacattatggtacagcataaattgtagtggagtggcaaaagaagggttagtcaagagtgtaaaagtcagcacttagggctctatatgcctgccgtgtagaggaggttccattttatacatcagacaatagaacctgggaaaatatcttgagaatgggtttggaggagggggttatgttaaaatgtcattcttgccataacgtgagactagataggaaagagctgagactgcagtcagggagaatagtaggggactactatcataaatcaagcaaaattgagggctggggcagtaggaatggaaagaaaaggagagtgagttaggaaaccaaaccaaccaacaggttttgttcatcgatgtcaggattcaacaaggagggagagttcttagatgtctcccaggtgattggcttgaacaactagatagaagatgatgtgattaggccaggcaccatggctcacgcctgtaatcccagcactttgggaggctgaggcgggcagatcacgaggtcaagagatcgagaccatcctaggcaacatggtgaaaccccatctctactaaaaatacaaaaaattagctgggcgtggtggcacacgcctgtattcccagctacttaggaggctgaggcaggagaattgcttgaacacaggaggtggaggttgtagtgagccaagatcgtgccactgcactctagcctggcgacagagcaagactttgtctccaaaaaaaaaaaaagatgatgatgatgtggttaagacctattgaagtgagttattatgacagtgatgaattcaaatccatcaccgcagtcctggccaactattacagaaattgtttaaacccaagagggatccagatataagcggtcacttatatttgtttagagccttcacagcaattactttattctagcttttggaatgtaatacggtattattatcctcatttctcgctgggaaaccaaagcccagggtagttaaagacttacccagattgaacagcagtaagtgacagagcccggccgtggtggctcatgcctataatcccagcactttgggaggcaacggtaggaggattgcttgaagccaggagtttgagaccagtctgggcaacaaagtgagaccccattctacaaaaaactaaaataagccaggcatggtgcctgtagcagggttgggaggctgaggtgggaagattggttgagcccaggggttggaggctgcagtgagctgtgatcacaccactgcagtccagcctgggcgacagagtgagactttgtctcttaaataaaaaagtagaaaaaaaattaaaatggcagacatggaaatggagctcatgttctgacgcccttgaccaaacgtttttccactattccacaaccaactgtaaatctaggagttttaattctctgtgatacactgtctttgtaaggtaagaaaatgactcattactgctactacaaataagtttgttttctatctttattttaattttttgttttttagagatgccacaacacccagctgattttttttagaagtttttgtagagaccgagtctctctgtgttgctcaggctggtcttgaactcctggcctcaagtcatcctcctgccttggcctcccaaagctgtatcttgatagtgaaccaggattatcatctatattggaagtcagcaaactgccacatataacctgctacctgtttttgtaataaaggttttattgaaatacagccatgctcatttgtttatgaattatctttggctgcttttgcattgctctgccaattatctttggcagagttgagtagttgagatagtctttatggcttgcagatcctcgttatttactctttggccctttatagaaaaagttggcccacccctggcctatgtatttattgaattgtatatatttaatatttacattttatatataaacaaggtttcttgtacattaatatttctcttagttggatatcggtggcttactatgaatgaaaacatagagtcagattgtttttcacaaaactgtcactgtattccaggaaaaattaagagttcttggctgtggatatgtaaggtgacatatctattccaaaccccttcccctctctgtgtctcctttctcactgttgaaagaagggctttgaagtagagaatgtctaagggctacttcccacaatattgtttggtgattcttgaaacatactatcatccctctagtttaaaatcaggggtccaaatccactgtttccatcctgagtcctcttgaaggacacattcccttcttgccttttggttgcctagatctgtggctggaatgggaggctttcattagtgtggcttcatcccaactcctgcttgtaggtgctgtctgggcgtatctgtgtgattacagtattgtggtgatatgaattattgtagtgtatatataaaaatgagcagagactttttttttcttaagaaatgaagcataagaaatgtctgatggagaaaaaaagattatttttgaagtactgatagagaaaatactgttggaaaccagatggcaattttttttttataattgcaaaatgttgaaatttgggaggaaaacagttttgttttgtttttgcattacactattaattgtgagctcttataatgaagatcaaagtacatctaagcttttcactagtgagcatatttattttcatgccttccgtacttaaaatttatttattattttattcatttaacaagtataaatggagtacatcattctaggccctggagataaatggcgtttgatcaagactaatctatcagatgggaataagtgttgtgcagaaagttcaaagagggtggtatgttcgagggtgacctggggtacattagaatagatgaccagggaaagttctgcttttagaaaggaatctgtcagtttagatcacatggtatgaaggagtcagccaatgagaagatcatggggaaggacattgcaagcagggggcacagctagcgcaaaggccccaggataacagctatgagctcaagagtgttcaagggacagaaaaaaggctggtgtggctacagattaagcaaatgaagggaaaagagtacaaaatgaatggaagaagtagataataccagaccataaaggctttgtaggctagggcaaggaatttagggtttattctaagctcttaaaaggtttcaagcatgcgtgcactcaaaagatctttaccgaactagcttttgcaagacactctactatgttctatagggaaggcagaaatgaccaagttaaaattctgtctttaaagaaattgtggctcagtggtacagaaaacagtaaagtttctagggtatatattatatagtggcttcttaacacaatataagctacctacatagtaattttaaaattatcactacttatctatccctggtagaaatcatcttatgttctaatattcacaattaattaattttttgacctaaacatttaaaatagcaatgattttgaaatagtagtatgtctttcatttaaaatgtaactgttacttttctttttggattttgcctgggtccaactgacagcgtttactggcccttattcgtcctgattttccacgccatctcccccatcccccatttcattgccaaaagagtcacctatgactcagatgcaaccagtagtgcctgtcgggaactggcatatttcttcactactggaattgttgtttctgcctttggatttcctgttattcttgctcgtgtggctgtggtaagttttattttctattgttttgcccaaccgttgctgagtttacttcagaggcctgtgtctgggacctccatttcatgctcattacttaggctttatactcaaggccgtgtgtttttagtttctctgttcctctactttagacctgcctaacagtagttcggccatgccttcagagtgctttctttatttctcttacaacttttagccagacgatatgatttcttactttttctactttaagctattctctggaattgttcttaaattcctgcctcttaaatcttacagtaatccacagatactatgctagcagtacttttctagttgcaagatgaagatatttcaaattcttctcctgcaaatgggatcatggactcaactctcaactcagtataataggtatatgttgagggacaactgtgtagcttccagaaaatgcagtgaataagttgacatcttcacttccaagacaaaaactttctttttgtcttcagagtacacattgtaggtataatttattcaattatttgctattcactgtctttcctactatttgattttattccctccaattacgttctattttaattttatgaaactcttatttgaggcattgaatatcagataagcgcaagtcttgttcattcaataaatatctttgcaacaactgctacttgtaaaacaccagaaataagaaataggtactgtctctgctcctgaggaacacagaaactagcttgctgggtaagtatactataagtgtactaagtgagacggttgaagcatgatcagaatgccataggggcaccaagaagagagaaattccgactggcatttgatatgggcctctaaggataaatagcatttgtattgaggtaggatggctgttgtatggaatgacattcaagtgtaagaatgcagtatatagaataaagaagaatccagtgtggtagagctaaaagaaagttgttgaggttaaggctggaagggttgtgaaacctgattagcaatggtcttgaaccccatgccagtttgatctttgtctagataatggggaaagattgaaggtttttgaatacaacaagattgtcatgactttatttttcttgtgctttagaccagcccttcttaagcgctgcagtaaatatttatattttttcctttcaatactgccatcatattttgtgaagaaactttcattgatgtttctcttgcttaaagtaaaacaaaaaatgcccactagagggtactctcacccccaaatgtgcttctgtaaaaccatctacaaaccatctactaagctggaaagcagttttcagttgtatgaagactattatttaaagtcttttcttgcctagaaaagaaacacacaaatttataactctacaatttttattttccatgaaagaagttgatgtgtgcagaactttcagtacccaatattgtaattgcactatttataatcttaccacttgagttttacttaaggcaatcattgtcaattaaaaacaagtagagaaatatgtctaattgggaacatgttaaggatgataccagacttaattaacaagcatcacagaagtaattagactcattactgaacagttcattgtctcctgttacattattaagccttttagcagctttgtgtaacatttcattggatgtttctaatgcagaaaataatagggattgcaaagagtacaatatgaaggaagtaaggatttaatccttcttttcttgtctttcagatcaaatggggagcctgcggccttgtgttggcaggcaatgcagtcattttccttacaattcaagggtttttccttatatttggaagaggagatgattttagctgggagcagtggtagcactttattctgattacagtgcattgaatttcttagaactcatactatctgtatacatgtgcacatgcggcattttactatgaaatttaatatgctgggttttttaatacctttatatatcatgttcactttaagaaagacttcataagtaggagatgagttttattctcagcaaatagacctgtcaaatttagattatgttactcaaattatgttacttgtttggctgttcatgtagtcacggtgctctcagaaaatatattaacgcagtcttgtaggcagctgccaccttatgcagtgcatcgaaaccttttgcttggggatgtgcttggagaggcagataacgctgaagcaggcctctcatgacccaggaaggccggggtggatccctctttgtgttgtagtccatgctattaaaagtgtggcccacagaccaagagcctcaacatttcctagagccttattagaaatgcagaatctgaagccccactctggacccaggacattttgatgagatccaaaggagttgtatgcacatgaaagtttgagaagcatcatcatagagaagtaaacatcacacccaacttccttatctttccagtggctaaaccacttaacctctctgggtgttacctgctcatttgtttaaaaaaaaaaaaaaagtctcacctgctttcatgctgaggacaagttcagatgttcaagcctataatatttaggcagttcctcaaatttatgaaaagtgttctcagaattgggagacagtcaaagggtacaaagcctcagttaggaggaataagtgtgatttttttttaaagatcacttgcacagcatgctaaatataggaataattgaatgtatatttcaatattgctaagagagtaaatttctaatgttctcataaaaaagttaaatatttgagatcatatgttaattagtgtaatcattccaccttatattcaaaaatcataaaaccgtattgtaccctataaaaatatacaataatttgtcaatatataatcaaaataaaaaacaaaacatactctctcccccaaaaaaacatctcagtggggaacagatgtatcttttcatctgaaagacaatgctgggggaagagctccactgagatgcgggcagggaggctgggctcgagccagcccctgcgttagcaggagggggagaacagataggtaactcttttacatttcctttatgatctggcacttctccccagctccttccctctgccccccacccctactcctcaacagttctggtttgccctgacttctctacggctctggcttcttcccgaagagatataggagccatgtaagcacgcagtgggtgaactgcttaatttcactacatgttgatgtacttgtcttccgtcttgtaggtcttttctatataactttatgccacccttaaatgaatcattgggtatacctgtcatgttggatcctgtaatcacagttttccctgctcacctttttgtctaagatctattgagaaagggaaatatgggaaggagaaccatttgatcagaatacaaccaatagtctttaagcattgttaaagtatgaaactgaaatacattcaaaacacttaatccttgaggcttgtgatctgagtaattagcaggtatgatgctgggactggaaaatagaaagtaataactaaagggttaatgtgcaacgttattttttggccttgttcatgattttatgttttcagtgtcctgtgtacatatagaattgttaaagttgtcatttccaatatttatattagaaaaattatttagatactttataattttaaccggcatttttaataatgacacttgcatttattgtattgtaataaatttcacttttaactttaaaagtttaactttaaaatttttttgtgatgttgccttgcctgaaaagataacaaaaatgagagaatttcttgatgttttaaaatgggcagttttgagcaataatctgtcctaacagaacagtagcaataagttttaggataccatcttgaatgtctagttggtgtgcaatagcttttctttctaagatggcaataatgattcatttctactacattttgcaaaagtgtttttgttgcttatacacattttcaataaccaaggtagccttcatatgtagccttaaagcattacctcttgattgtatctttagattgatataaagtacttgcatatagagtatttgaagtgatagattattagatttgctctatgtctgaaaagagagctattctgcagtgcctaaatatcatttaaacagtaaatattaataggaaatattgctatatctgaatatataatacaaaagtttgatcatggtgacacaaatgttggacatttttttccttataaaaggctctttttttatatattgtacaatatatttggagattcagagcatagtgactatagtcgaaaactgagattgcacttccaaaattggccacaagtaaataatcttatgaagggattctttatcatgtttcaaacaagtgggttacaagcagactttgagacacttttccacagaaacaatactatgaattggtgattgagttcccaggccaagcctccctcaacaggttcaactctaatatacctaacctgtgatactgaaggtgcctgcctgagttttgggtctctgagacagggtagtgtgagtagtttggaggaaggacagtgcaactttccaccccttttcctaagaacaaggtctttctccttttaatttttccactcattttcacctcctaatgcccttgagatccaggtacactcctgggagttttgttcacctctcccaactgagaaccttcccactgggctccatcctccctcctgaggttcttcatattccagagtcacccacccttctcctcccattagtcagttctctaagtacagctgatgtcatgtggtgctgagaagaaagcagatcacacttcatcacagaaagaatgccttgtgattatcttctccacatctgaaattccttttgacacctgcattgggccgactgccattcccatgactgctgcacctgcgtttttagagaatgcctcataacccactgattctcattcacagagaatgggagaacggaatgaagaaagattccagcagcttatagaaggatagcaatattttgggacagggaaaatcctgtcatacctcatctcttcctcaggaggagttctgagctggtcctgcttttcatagttgtttcttttcttccacttaagaactcatagatttttcttactgtcctaaggaagtccttacctctgaggtatctcctcaatgaatactgttttcaaggctgaaatagttcattatgttaataaccttctttatgttctcagggaaatgcttaggtggtgtcacaaaatgtgccttttcttttctttttttttttttttttttgaggcagagtctcgctctgttgcccaggctggagtgcagtggtgcgatcttggctcactgcaagctccgcctcccgggttcacgccattctcctgcctcagcctcccaaggagctgggactacaggctcccgccaccacgcctggctaatttttttgtatttttagtaaagacgggtttcatcgtgttagccaggatggtctcgatctcctgacctcatgatccgcccgcctctgcctcccaaagtgctgggattacaggcctgagccactgtgcccagccaaaatgtgcctttgcaaagtttgcgaaatcagattttgtatcccaatagaaccaaaatatttatgaggatgctagcattttccaagcatagtaattagttcacaactgagaaatattatgtctgtagtagataaatattagttgtgcattttaatttaattctcctttttccattttgtctcatgaagtaccttattgcaaaaatcccactgagtaatagctcataaattataatctttcaaatagccatgctaccagcgtacaacagtgatacatgtaaccccaaatgtgatgtgagaggacgattactttgtaaataaaacttgttattgacattttaacaaaggcttttatgtacattattaaatgaaaaagtttatattttactttgcggtacgttacatttggaaaggagatcagcaagttaattttcccagtgtttttgtctgtataatcttaatgtgaatctgaccagtttgaagcctgtacttgctgtagttgaagagaaacagttcaggaatgttgtgctgactggaaggaatccaggccttaatttctgtggctgacactccccatggtggacatggaagattggaaaagctgtattggaaaagaaaaaaacctgacaccttaagaaaagtgctctacatattttgaagagtctttttgcacactacagaaaagaatgcactaatagaaagtagtctttaaggaataatatgtcctccttatgcacaaaacatttgggaaagatctgatgttttactagtggatttaggcagccagattgtaaagaaatcaagctagttatttctttgcattgccaagctaagtgtaaagttaaacttttaatagaaatagaaataaaaatttgataataccaacataactataaaatggccataagaaaagtcagttcccaaggaaaattaatagatgaccattttgaaacatttatttgtggtcaatacgaggcacataggcaaagtggtcttaatcctgagattgctcatttggagaagagcacacttggagactgcacaatctctcttcacttttgattatatctttatcaaaattgaataattctaagtgtttacacacttcggaatgaatgactagatattaacttaagtgtgtgcattcatttttcccctcagaataattaaataataaaaccatcagttcaactttagctggataatcattgcacttatcaatttaaagcataaatgcctctgcctcaacactttcatttcctctgtggttgagagacaaattatatcaccacactctgtaaagtttcatgatttcttacagccttctcctcaaaattgtatgcttgttcatctgacaaacccagaattctccagtacttccaaccatccctgctgcagccttgccatttgtggttccttgacagtgctgctgttaaaatccacttaaccactgatggaaatgagttacgtgagttctgaacacaggttttaatcggattcctgattaaattaatggcagtgagtcttaggcttgatttattcaagattccatggtgtggaactgacagttgctcagctctttaataaaatcatatatatatgtatatattttgagatggtatctcagtatgttgcccaggctccctgggctcaagctatcctcctgcctcaacctcgtaagtagctagtacttctgctggaaacatgcaaatgtccattaactgatgaatggataatgtgatatatccattcaatggaatgtttttcagacataaaaaggaatgaagtactgaaacattgctacagtgtggatgaatcttgaagacaatatgtgaagtgaaaagagccagtcacaaaaggccataaaaggtcacaaaaggctgaggcaggagaatcctgaacccgaaaggcggaggttgcagtgagccgagatcgcgnnnnnnnnnnnnnnnnnnnnnnnnnnnnnnnnnnnnnnnnnnnnnnnnnnnnnnnnnnnnnnnnnnnnncatgtggattttagggtctccttctgttgcccaggctagtagtgcagtggcaagatatggctcactgcaaccttaacctgagcgcaagggttcctcccacttctacctcctgagtagctgggattacaggcacgggccaccgcagctggctaagttatttattttttgtagagatgaagtttccctacattgaccaggctgctctccaaccctggcctcaagcaatcttcttgcctgtctcagcctcccaaaatgctgggattactggtatgggccatggctcctagccgcctttttttttttttttttttttcaaaaaatattccaactgaggtttggcatttattgcttgagaaataaataatataaataaaatagcttgatttaggaaatgaagttgtgctagctggaacactggccaggttatggccacgataaagaagagaccagccgggcacggtggctcacgcctgtaatcccagcactttgggaggccgaggtgggcagattacgaggtcaagagatcaagaccatcctgaccaacatggtgaaaccccgtctctactaaaaatacaacagttagcagggcgtggtggctcacgcgtgtagtcccagctactcaggaggatgaggcaggagaactgcttgaacctggtaggcggaggttgcagtgagccaagattgcaccactgcactccaacctggcgacagagcgagactctgtctcaaaaaaaaaaaaaaaaaaaaaaaagacagttgagctagagagtaaataaagtggcccctaatacagtgggtatagattcatgaagtggcagtagctgaactgtagctactgttaactttgaggactaattaagacaatgtcaggaaaattttctttttcttttttctttttttctactctgtgtttcttcattatctgaatttatcctcatgcaggttggaaactgctgaaagcagtccatttttatgagctcttttattctaagccaaatcagtcagattacaaaccccattgtattttagataacccaagtgattattcaggtgctcaaaagcttttagagaactgctaaacctcatgtacttctgggcagtatcagcaattaaaagagtttaattttctaggtgaaactgattctggtttggatttctttatttggactgagagatattttaaccaggttaaaatattggtgcaaagccatctctgatgagacttaaaatcataaagctacttccccatgcagttcttgtcaccatttcagggtactgctgggcaataggacatgagttcccattgcttgtgggatcttcagatgtatatccctccagtgaattggactcagtattgttgagacatcaattttccgcaacatgatttatagattgaaagcaatcacagtaaaaatcccggtaagatttttaggagaaattaatatattccctgatttctaacttattacaaagttatacattagacaatgcgatattggagaaaggacacccatataaatcaattgaatagaatcaataattcagaaatagacccaaaaatatatggtcaaatgatttttgatgttaaggaaaaaataaaaacattttaagctgaggagatacaggacaaattatttgccctcatggagcttaccttcaaatgggcaagacaaataatttttaaagtaaaaaataattcaatagtgaaatttgggctgggtgcaatggctcatgcctgtaatcccagcactttggaaggctgaggcaggtggatcatctgaggtcaggagttcaagaccagcctggccaacctggtgaaaccctgtctctactaaaaatacaaaaaattagctgggtgtggtggcagatgcctgtaatcccagctactcaggaggctgaggcaggagaatcacttgaacccaggaatcacttgaaggcagaggttgcagtgagccgagatcatgccattgcactccagcctgggcaacaagagtgaaactccatctcaaaaaaaaaaaaaaaaaaaagctgggcgcagtggcgtgtgcctgtaatcccagctcctagctactcaggaggctgaggcaggagactaacttgaacccggaggcggaggttgcagtgagccaagatcgcaccactgcactccagcctgggcgaggaagagagattctgtctcaaaaaaaaaaaaaaaaaaaaaaaagaaaaagaaaattgacagtagtgaatgctatgaagaaataaatcaggataaaggcatagagaatgacttacagtggtgctatttaaatagggtggatagagacgattggtggctgaatagagctattgaataatgagaaggaatcaacacgatgggacctatttttaggtctactctttcgattctttttaattttaggtctactctttcacttattctttcaagaaatatttgttgagcacctattatgtgctcaacataattatattattctaggtgctggagatagaacagtaaataaaacagacaaaacccccagcccccatggtgcttactttttttttttttggtagggaagcaaaaaataaacttcacaaataagtcaaatggatggtatgttagtggaaatgctaaggcaaaaaaaggaagaaagggatgtagaatatgtgtgagtgtgcgtgtgggcgtgaacgggtgacggtggcttctgtttaagatacagtgcccaagaaaggcttacctagaagatgacgtttgaaggaagtagaggcagttatggaggcggcaatgggcaagatggttcaaaaagagggataagcaagtgcagcggccctgagctggagcgtacctgtgagctggcatgaagccttcagggagagtggagggagataagataatgtgtgtgtaggggtggatggatcctatggggcccagcaggtcattgtaaggcgtcggcattcatttagagatgagacgccactagagatatgagcaggagtggcctgattatgttttattcggattgctctagctgtgttttaattaaaactattttataaagagaggaaaaaacaattttgcttttccaaatcaatcatgtttatgtctttgaaagaggagaacaacaaatcacagaaaacataaataaatgcattttgttcagggacagatggctgaagcaacgagagtgaatcacagagtcacagaatcacagttatgtgcaaagcactcaggaaatagcttggtccctaattaatcattccatgttgttaaactctgtggagataaatttagccagcagtaggtagaatgagatgaattctcatgaaaacatgttttcaatgaagttggcaaagaatgctgtgtaaaccccaaatagctgaaactatgtcctaatagcattgagcttggtgtgccacatccttagcaataaccacttgagtgtctgtccctggggcctgcagatgaggatgttaacatctgatttagcagaaggggtggggagagtgatgggggacaagggagagagtcctgaaacatacaggtggtgaccctaggagctgactttggtgccatttaggcatatttgctttcaggactcacacttccttaggtttaagctatcaataaaaggaaagtggtttctaagtcctagcctttggactgtattcctttaattcatatagtggagcagggggaaagttatcattttaatggctggtagcacaattccgagaagaaaacttttttgtttatttaatcttagataagccatttgagtgttaagagctatggcccacgacagggaagggatttgaaatgttttagataataaagtgaggagaatttgggatttgcatcagaatgacgaaggggaagtgggggaggggtgatacactaacaccagtggagaagaaatccagggaaaaggtgacagaaatcctggccactgaagggctggagcctgaggctaaaacagtgccagggagaccctctggggtgacagcctaagaatttttgataacaaggatattggcagagcagtggtgaaaccctctccccttttcccattgcttctccctcctttgccccagattcccactcaaagcctgtgatacatactgttgttcactgtggtgttcaggtatactgaggggtaggagagtgaagaaaaggagaatggtttgcaagtggggttaatgtgggctgagagagaagaggacagcaaagaggcgtgagacacagggtaaagaaagcattcagagtaaaatggaccaagaggtgagtaggagaataagttaccccaaatgcctcagaaatatttgttgggaggactctgctatatgagacttaagccctttttaaaaaaataaaataaaatgaaaaggtgattcccaaaaggttggtgccttatgaggcttcatctgcataggatccctggtttcacaactccttatcttgaccagactttctattgattccaggtctttagacaataacttaattctttcaaccaactgtcaatcagaaaatctttgaatccacctatgacctatgacccctcccctactccaccccactgatttgagtttgtcctgccttttccaactaaactagtatatatcccacatgtattgattaatatcttttgtctccctaaatgtataaaaaccaagctataacccaaccaccttgggcacatgttctcaggatctcttgagactgtaccttgggccttggtcatttatatttgactcagaataaacctctttaaatattttacagagtctgactcttttcatcaacagctggaatatttgtttcttgatctaatgatgattacacagcagttttaagtttgtgcaagtttatttggttttatacttacaatatatacactcaataaaatatgatatacctcaataaaaataaagcaatgccttccctgcctccaaaaacaaaaccaacctgggaatacaaagatcaaataacagtgcctgcagaagcttagaaaatcggcacagatgtgacatttgactcagttcagcacacattatggagggttactatacaagggagactgcacacagagaccatactcaggagcctgaggatcctgaatcactgacctagagggaagaagtaccagcccctatcttgaggacctcatattacaaggcagtaatagacatgcaaaaattaatagcaacagtctgattctggcaattggctgatatgccaactcttaccacttttcaacattgtgctagatatgtaagtggcagaaagactgaaaaggaataaacagattattatttgcattctatgctcttatttacttagaaaatccaggagaatctatacactattagaaaaaaattacacttataaaacttactagataaaagatcagtatcaaaaaaatcaattgctttcctaaacaccagtactaactaattagaaaatgcactgggcacagtggcttaagccaataatcccagcattttgggaggctgaggtgggaggatcacttgagcccaggagttcgagacctgcctgagcaacatagcaagaccctgtctctgaaaatgcaattttccaaattttcaataggaacaattacataaatgattataatatatatatataattttatatatacacatctatatctgatgttataaagatgtgcaatacttggagaaaaatttcaaaaattttttgctgggtatataagctctaaatatataaaaagatatactatatttaaatactaagggataaagtattaagcattcaatgaatactggaaaaatgattggatgagttcatattggacagagccacatctcggtcttcttttggaatcctttcttcatatagtacctagaatagtgcctgacactgtgggaaaccaaaatatgtcacctcaaaatatacttctttggcgtattttcagttggttattcagagaagtagcagacaggaatagttctgaaaagctgttcttttgggggtagatttgcatctgtagaggaaatctgcattggtgaggtaaagaacagacacagaggctttctctgaggtccacctatctggatcaggaaaaaggaactcaataagaaaaggagactaaagacctgatactttttttttttttttttttttatactctaagttttagggtacatgtgcacattgtgcaggttagttacatatgtatacatgtgccatgctggtgcgctgcacccactaatgtgtcatctagcattaggtatatctgccaaggctatccctcccccctcccccgaccccaccacagtccccagagtgtgatattccccttcctgtgtccatgtgatctcattgttcaattcccacctatgagtgagaatatgcggtgttaagacctgatacttttaaagtttggacagtgaaacttttgctgcatctcttccttctgagggctgctcccagagagacttcatctgcatcacaagacagcctttgctcaccatgcctttcctccccacaccctctcataatgtgttgctacctccctgcaggagcctttaggaccctatttctttctgtagcttaaaatgctattgaagcttcaactatctggcccttctttgattcttcgagtctcgtagtttgtgtggctcctgtgcacatgtgcatgtgataaatgtgtatactttgtctcccatgaatctggctattgtcagtttcttttatagactcagattaacaaactttcagaagggtggaggcgggcggggggtggggtggggagggaaatccctttgctcctacagcaaagtagtagggactcaaaaaatatcgaagagaagaaaacaaaggagaggaaaggaggaagggatgaataactttatttaaatgagaaaagtggcactgagttaaaaattattaaatattttgaattctttatgttattacaatttttacttttgctaacatcctcttgctttattgttgtaataatgtgtgctcatatagtcattaagagtttacaaaactgtgtcaattaggtccatataacaatgaaaaagcagcagcatcactggaaaatctcgaggctcttcaaggttaaggggcttgccttagatgacaaataacctgactgttactcagacccaagttttttgacttcaagggcagcgactttgtactctacagatgccaatctaaatgggctgcaagctagatgtgtaggctatggattgccatcctaattgggacacttttgagagcagaagtaggtgttatccattatgttgggacaataggtgtaaattggtaccatcttgggtacatccaaggtacagtttaccttatctatggctgaaaactgagtttaaattaattcttcttacgggcagcacaagtcaaaaagccctttgccaagctgcacagattgtaaatgctgctcctggctgtgttcaatgtatatttggacaaagtcaataataaataaataaaggtcaactatgaattaaggtaggtttgttagtttgttttttggtaaaaggaatgtcacttgcttagagaggttaatatactgcatgtggggcaaagttgctggtaagtatcattcttccttctgtccttcgaaccccaaatgacacatcttgttcacgtatccactatggtgtaagacatcactgggtgctggctgtaattttatcttccttcttaaagtctttataacgtgaagataatgagtggatctgtgcgaaactcactaccaggatcagccaatacttgtttttctgtggagcttttggtgattactttaactgaatagagttttttttttttaaacagcaaatctttcaatgtattagcaattttaagtaagaatctctaacttgtaacacacactgaacttagagttttgttttttttctacacatgccatttctgcaagtgaacttaagaaatttcaactaatatagaagacttaatcaattctcaattacatgttgtaaattaacctgctaacaggaacaggtgaaactctcttaacattttaaggacataaagtaatcaaatatgcagatttaacacaaaaccattaatattatggggttcttttcaatatttctatgcttaattttaaatcttttttaggataaaattgttttccaactaagaaaagtattgtcatcctattttgtgagataccactaagtcaaatgagattgcgtaatgaccagagatattattagttgaggtgctgactgtatttttatctgatataccaatgagtcttttcacttgggtaaatatgtaggagctggatttctgagttgaatggtaagtctgtttttaactttgtactaaactgggattttgttttccaaagtggctgtacaattttgcattccaaccaacaatgtatgagagtcctagttctgcatgctcatcagtaaatagaattgtcagttgttaaattttagccattctaatagttcctacccttttttagaccatatagggtaatgacattgccatggcatctgtaaactgtcatggcgctagtgggagtgtcttttggtatgctaatacattataattagtgtataatgagcaatgatatcgaacagaggtcactttcattgccatgtgggtttgggtgggttttggccagcttctttactgcaacctgttttatcagcgaggtcccttctgactaatgatgttaagaatcttttaatgtacttatttataatctttctatcttcagtaaaatgtctatagaaattattggtccatttctttattgagttgtgtgatttcttaatactgagttttgaaagatctttatatattctgaactcaaggctttattgtatatctcatttgcaaatatttatccagtgcatggctggtcttttaattttctttttcttttttctttttcctaactgctagatgatgtgggagtcttttcaaatccttagcatctttggaagagcagaagtttaaatttttgataaaatctaatttatcttttttgagacagggtctcactctgtcactcaggctggagtgcagtggcacaatcatggctcactgcagcctcaaccttcagggctcaggtgatcctctcacctcagcctcctgagtagctgggactacaggtgcccaccaccatgcctggctaatttttgtattgtgtgtagagacaggatttcgccatgttgcccaggctggtctcaaactcctgggctcatgtgatccacctgcctcagcctcccaaagtgctaggattaaatttatcatcttttttttttcttggatggatcatagttttggcatcttcttagaaatctttgcctaatgtcgtgatgattttctcctatgttttcttcaaagttttatagtttaaaattttagatttaggtctgtaatacatttgagttaattttttgtaaagggtatgagtgatcaatcaaggccctccctccttcctttccttccttccttgtatattgaaatccaattattccagcaccatctgttgagtcttcctattcatgaacagggactgtctctccatttatttagtttctatttgatttctttcattagagttctatagttttcctcatatagatcttgtacataatttgttggatttataccgaagtagtttggttttgggggtgctggtataaatggtattgtgatttttcttttctttttttttttttttgatacagggtctcaccctctcacccaggctggagtgcaatggtgcaatcttggctcacttgtaactttggcctcctgggctcaggtgatcttcccacctcagccccttgagtacctgggactacaggtgtgcaccaccatacctggctaatttttttgtatttttgttttgcagatatgggtttttgccatgttgcccagactggtctcaagctcctgggccccaagtgatttcattcacctcagcctcctaaagtgctgtattgtgtttttaatttcaaattccacttgttcattgctcatacataggaaagtgattgacttttgtatattaatcttgctctagttacttattagttccaggagtctgttgtttattcttttggattttctacatgaacaactatgtcttctgtgaacaaagacagtaatatatattccttccagatccatgtacctttcatttcatgttcttatcccagtattatctaggatttccaatatgatgttgaaaaggagtggtgagagggaacatccttatcttgctcttgatcttggtgagaaagcctcatgcttcttatcattaagtatgatgttagctgcaggttttttgtagacattctttatgaagttgaggaagatccactccattcctagtttactgacagcttttatcatgaatgtgtgttggagtttgtcaaaagctttttctgcatatattaatatgattatgtgatttttttcctttagcctgttgatgtagtgaattttacattaattgatttttgaatgttaaaccagctttgcatatctgggatgaattccacttgctcatggtgtataattctttttatacattgttagattcaatttgctaatatcttgttgaggattttgcatccgtgttcatgaaagatattggatctgtagtctttttatgtaatgtctttgtctggttttggtaataaggtaatgctggcctcatagaatgagtggggaagtattccctctgcttctgtcttctaaaagagattgtagagagttggtataatttcttccttaaatgtttggtagatattaccagtgaaactatctaggccttgtgctttctgttttggaaggttattatttattaattcaatttctttaataaatattggcctactcagattatttattgattcttgtgtgagttttggcagattatgtctttcaaaaaattggtccatttcatctaggttatcaaattaaatttgtggtcataaagttgttcatagttgtccattattatcccgttagtgtccgtgggatctgtaatgatgttccctctatcctttcttgctttgttgttgttgttgtttttgagatggagtcttggtctgtcgcccaggctggagtgcagtggtgctatcttggctcactgcaacctccacctcccaggttcaaacgactctcttgcctcaacctccccagtagctgggattacaggtgcccaccaccaagcccagctaatttttgtatttttagtagagctagggtttcactatattggtcaggctggtctcgaactcctaacctctagcgatccacctgccttggcctcccaaaggcgtaagccactgcacctggcctcatttctgatattaggaatttgtgtcatctttttgtttttcttggttatcctagctagaggcttagtggttttatttatcttttttttttttttttttgctgaggttttattttggaaaaaaagagcaattgaattgttttgtagctggagagtgcctcaggcagtgaactcctcctggggatgggctgagggcaagggctaagcctcaggtgggtctcctgttccctgtgctcccctgcacagctgcctccctctcggaccctggggcagccgcaggaagggtaggctgggaggggctgccatggctgttcacttgggcaggacatcagaggactcgaacaccagcctcccatcacaggtcttgattttcttcacaactacagccctggtggagctgctgcagctgaaggagctggagcctgtgccagagccaaagctggagcccagcttccctccggcaactacctgtaggtggcaatctccatgtccagggcctatttatcttttttttttttttaaatagcttttagtttcattgattttttttctattgattttctgttttcaatttcattgatttctgctttcatttttattatttcttattctttctttagaattaatttgttcctcttttttctagttttttaaggtgaaagcctagatgattgattttatatctttcttcctttctaatatatacatttaatggcataaatgttcatctaagcactgtttttactgtatcccacaaattttgaaaagtcatgcttttattttcatttagttaaaaataattttaaatttctctgagatttctcttgtgacccatgtgttattttgaagtgtgttgtttaatctccatgtattttggaattgtccggttgtgtttccgttattaaatttttagtttaattctattgtggtttgagagcagatgttgttttaaatttgctaaggtgtgttttatggcccagaatgtggtctatcttgctaaatgttccatgtgaactggagaagaaaatgttttctgcaaaagttggatgaagtagtccatagattttttttttgttccagattaaatgcttttttaaaaaatttattattattatactttaagttatagggtacatgtgcacattgtgcaggttagttacatatgtatacatgtgccatgctggtgcgctgcacccactaactcgtcatctagcattaggtatatctcccaatgctatccctcccccctcccaccaccccacaacagtccccagagtgtgatgttccccttcctgtgtccatgtgttctcattgttcaattcccacctatgagtgagaatatgcagtgtttggttttttgttcttgcgatagtttactgagaatgatgatttccaatttcatccatgtccctacaaaggacatgaactcatcattttttatggctgcatagtattccatggtgtatatgtgccacattttcttaatccagtctatcattgttggacatttgggttggttccaagtctttgctattgtgaataatgccgcaataaacatacgtgtgcatgtgtctttatagcagcatgatttatagtcctttgggtatacacccagtaatgggatggctgggtcaaatgatatttctagttctagatccctgaggaatcgccacactgacttccacaatggttgaactagtttacagtcccaccaacagtgtaaaagcattcctatttctccacatcctctccagcacctgttgtttcctgactttttaatgattgccattctaactggtgtgagatggtatctcattgtggttttgatttgcatttctctgatggccagtgatggtgagcattttttcatgtgttttttggctgcataaatgtcttcttttgagaagtgtctgttcatgtcctttgcccactttttgatggggttgtttgtttttttcttgtaaattactttgagttcattgtagattctggatattagccctttggcagatgagtaggttgcgaaaattttctctcattttgtaggttgcctgttcactctgatggtggtttcttttgctgtgcagaagctctttagtttaattagatcccatttgtcaattttggcttttgttgccattgctcttggtgttttagacatgaagtccttgcccatgcctatgtcctgaatggtaatgcctaggttttcttctagggtttttatggttttaggtctaatgtttaagtctttaatccatcttgaattgatttttgtataaggtgtaaggaagggatccagtttcagctttctacatatggctagccagttttcccagtaccatttattaaatagggaatcctttccccattgcttgtttttctcaggtttgtcaaagatcagatagttgtagatatgcagcattatttctgagggctctgttctgttccactgatctatatctctgttttggtaccagtaccgtgctgttttggttactgtagccttgtagtatagtttgaagtcaggtagagtgatgcctccagctttgttcttttggcttaggattgacttggtgatgcgggctcttttttggttccatatgaactttaaagtagttttttccaattctgtgaagaaagtcattggtagcttgatgggtatggcattgaatctgtaaattaccttgggcggtatggccattttcacaatattgattcttcctacccatgagcatggaatgttcttccatttgtttgtatcctcttttatttccttgagcagtggtttgtagttctccttgaagaggtccttcacatcccttgtaagttggattcctaggtattttattctctttgaagcaattgtgaatgggagttcactcatgatttggctgtgctgtttgtgctgttattggtgtataagaatgcttgtgatttttgtacattgattttgtatcctgagactttgctgaagtnnnnnnnnnnnnnnnnnnnnnnnnnnnnnnnnnnnnnnnnnnnnnnnnnnnnnnnnnnnnnnnnnnnnnnnnnnnnnnnnnnnnnnnnnnnnnnnnnnnnnnnnnnnnnnnnnnnnnnnnnnnnnnnnnnnnnnnnnnnnnnnnnnnnnnnnnnnnnnnnnnnnnnnnnnnnnnnnnnnnnnnnnnnnnnnnnnnnnnnnnnnnnnnnnnnnnnnnnnnnnnnnnnnnnnnnnnnnnnnnnnnnnnnnnnnnnnnnnnnnnnnnnnnnnnnnnnnnnnnnnnnnnnnnnnnnnnnnnnnnnnnnnnnnnnnnnnnnnnnnnnnnnnnnnnnnnnnnnnnnnnnnnnnnnnnnnnnnnnnnnnnnnnnnnnnnnnnnnnnnnnnnnnnnnnnnnnnnnnnnnnnnnnnnnnnnnnnnnnnnnnnnnnnnnnnnnnnnnnnnnnnnnnnnnnnnnnnnnnnnnnnnnnnnnnnnnnnnnnnnnnnnnnnnnnnnnnnnnnnnnnnnnnnnnnnnnnnnnnnnnnnnnnnnnnnnnnnnnnnnnnnnnnnnnnnnnnnnnnnnnnnnnnnnnnnnnnnnnnnnnnnnnnnnnnnnnnnnnnnnnnnnnnnnnnnnnnnnnnnnnnnnnnnnnnnnnnnnnnnnnnnnnnnnnnnnnnnnnnnnnnnnnnnnnnnnnnnnnnnnnnnnnnnnnnnnnnnnnnnnnnnnnnnnnnnnnnnnnnnnnnnnnnnnnnnnnnnnnnnnnnnnnnnnnnnnnnnnnnnnnnnnnnnnnnnnnnnnnnnnnnnnnnnnnnnnnnnnnnnnnnnnnnnnnnnnnnnnnnnnnnnnnnnnnnnnnnnnnnnnnnnnnnnnnnnnnnnnnnnnnnnnnnnnnnnnnnnnnnnnnnnnnnnnnnnnnnnnnnnnnnnnnnnnnnnnnnnnnnnnnnnnnnnnnnnnnnnnnnnnnnnnnnnnnnnnnnnnnnnnnnnnnnnnnnnnnnnnnnnnnnnnnnnnnnnnnnnnnnnnnnnnnnnnnnnnnnnnnnnnnnnnnnnnnnnnnnnnnnnnnnnnnnnnnnnnnnnnnnnnnnnnnnnnnnnnnnnnnnnnnnnnnnnnnnnnnnnnnnnnnnnnnnnnnnnnnnnnnnnnnnnnnnnnnnnnnnnnnnnnnnnnnnnnnnnnnnnnnnnnnnnnnnnnnnnnnnnnnnnnnnnnnnnnnnnnnnnnnnnnnnnnnnnnnnnnnnnnnnnnnnnnnnnnnnnnnnnnnnnnnnnnnnnnnnnnnnnnnnnnnnnnnnnnnnnnnnnnnnnnnnnnnnnnnnnnnnnnnnnnnnnnnnnnnnnnnnnnnnnnnnnnnnnnnnnnnnnnnnnnnnnnnnnnnnnnnnnnnnnnnnnnnnnnnnnnnnnnnnnnnnnnnnnnnnnnnnnnnnnnnnnnnnnnnnnnnnnnnnnnnnnnnnnnnnnnnnnnnnnnnnnnnnnnnnnnnnnnnnnnnnnnnnnnnnnnnnnnnnnnnnnnnnnnnnnnnnnnnnnnnnnnnnnnnnnnnnnnnnnnnnnnnnnnnnnnnnnnnnnnnnnnnnnnnnnnnnnnnnnnnnnnnnnnnnnnnnnnnnnnnnnnnnnnnnnnnnnnnnnnnnnnnnnnnnnnnnnnnnnnnnnnnnnnnnnnnnnnnnnnnnnnnnnnnnnnnnnnnnnnnnnnnnnnnnnnnnnnnnnnnnnnnnnnnnnnnnnnnnnnnnnnnnnnnnnnnnnnnnnnnnnnnnnnnnnnnnnnnnnnnnnnnnnnnnnnnnnnnnnnnnnnnnnnnnnnnnnnnnnnnnnnnnnnnnnnnnnnnnnnnnnnnnnnnnnnnnnnnnnnnnnnnnnnnnnnnnnnnnnnnnnnnnnnnnnnnnnnnnnnnnnnnnnnnnnnnnnnnnnnnnnnnnnnnnnnnnnnnnnnnnnnnnnnnnnnnnnnnnnnnnnnnnnnnnnnnnnnnnnnnnnnnnnnnnnnnnnnnnnnnnnnnnnnnnnnnnnnnnnnnnnnnnnnnnnnnnnnnnnnnnnnnnnnnnnnnnnnnnnnnnnnnnnnnnnnnnnnnnnnnnnnnnnnnnnnnnnnnnnnnnnnnnnnnnnnnnnnnnnnnnnnnnnnnnnnnnnnnnnnnnnnnnnnnnnnnnnnnnnnnnnnnnnnnnnnnnnnnnnnnnnnnnnnnnnnnnnnnnnnnnnnnnnnnnnnnnnnnnnnnnnnnnnnnnnnnnnnnnnnnnnnnnnnnnnnnnnnnnnnnnnnnnnnnnnnnnnnnnnnnnnnnnnnnnnnnnnnnnnnnnnnnnnnnnnnnnnnnnnnnnntctcttctggcttgtagggtttctgccgatataccactgttagtctgatgggcttccctttgtgggtaacccaacctttctctctggctgcccttaacattttttccttcatttcaactttggtgaatctgacaattatgtgtcttggagttgctcttctcgaggagtatctttgtggcgttctctgtatttcctgaatctgaatgttagcctgccttgctagattggggaagttctcctggatgatatcctgcagagtgttttccaacttggttccattctccccgtcactttcaggtacaccaatcagacgtagatttggtcttttcacatagttccatatttcttggaggctttgctcgtttctttttattcttttttctctaaacttcccttctcacttcatttcattcacttcatcttccatcgctgataccctttcttccagttgatcgcatcggctcctgaggcttctgccttcttcacgtagttctcaagccttggttttcagctccatcagctcctttaagcacttctctgtattggttattctagttatgcattcttctaaacttttttcaaagttttcaacttctttgcctttggtttgaatttcctcccgtagctcgtagtaatttgatcgtctgaagccttcttctctcagctcgtcgaagtcattctctgtccagctttgttccgttgctggtgaagaactgcattcctttggaggaggagaggtgctctgctgtttagagttcccagtttttctgctctgtttttccccatctttgtggttttatgtacttttggtctttgatgatggtgatgtacagatgggtttttggtgtggatgtcctttctgtttgttagttttccttctaacagacaggaccctcagctgcaggtctgttggagtacccggccatgtgaggtgtcagtctgcccctgctggggggtgcctcccagttaggctgctcgggggtcaggggtcagggacccacttgaggaggcagtctgtccgttctcagatctccagctgcgtgctgggagaaccactgctctcttcaaagctgtcagacagggacatttaagtctgcagaggttactgctgtctttttgtttgtctgtgccctgcccccagaggtggagcctacagaggcaggcaggcctctttgagctgtggtgggctccacccagttcgagcttcctggctgctttgtttacctaatcaagcctggacaatggtgggcgcccctcccccagccttgctgccgccttgcagtttgatctcagactgctgtgctagcaatcagtgagactccgtgggcataggaccctccgagccaggtgcagggtataatctcctggtgcgccattttttaagcccgtcggaaaagcacagtattcgggtgggagtgacccgattttccaggtgccatctgtcacccctttctttgactaggaaaggaaactccctgaccccttgcgcttcccgagtgaggcaatgcctcgcccagcttcggctcgtgcacggtgcgcgcacccattgacctgcgcccactgtctggcactccctagtgagatgaacctggtacctcagatggaaatgcagaaatcacccgtcttctgcgtggctcacgctgggagctgtagaccagagctgttcctattcggccatcttggctcctccccccatagatgttaattatatccagttaattgatggtgttgttgagttcaactttgtccttactggttttatgcctgctggatctgtccatttctgacagaggagtattcaggtctccaactacaatcatggattcatctatttctctttgcagttctgatgtttttgcctctcattttaatgtatgtggttaggcacatacatattaaggattgtatatcttcttagagaacagacctctttattgctatgtaatgcccctctttgtccctgataactatttttgctttgaagtctgctcttaatgaaattaatagaggtactcttgttttcttttgattagtgttagtatggtatatctttatccatttgtttttaatctatactgtctatttttaaagctggttaattgtagacaacatatacttgggtctggtttcttcatccactccaacagtctctgtctttgattggtgcattagaccactgacatgcaaagtgattattgatatagtgggattaatacctactctatttgttagatttttatttgttgcccttgttctttgaccctgtttttgtcttccactctttttctgtcttttgtatttttaattaaatactttacatggttccattttctctgttatacttttttccatatctattgtatctgtttatttaaacattttttagtgtttgccctaaaatatgcagtatacatttgcaagaatccaatccttcaaataacactatactgcttcatgggtagtgtttttagtaacaaagtaacccaattctttcctcctatcccttgtgtcaatgctgttattcattttacttatatgtaagcatacataagcatatagatacacataagatatatacataagcatatataacctaatacgttattgctattactattttgaaaactgttacatcttagatcagttaagaataagaaaaatagaagtttttaatttttccttcactttcttctccttctgtattcatattatgcatatgtttatattttgtagttgtttcacagttcttgaatatgctgtcctgctttttctagtctttattctctttgcttttcagttttggaggtttctactgatagatccccagtctcagaaattctttcctcagccacgttcactctactaataagccatcaaagccattcttcatgtctattacatggttcaaaaaaattgtttatatagatgtatggggtacaggtgcaattttgttacacgcatactggtcaagtcagggcttttatggtatttatcaccagaataacatacattgtacctattaagtaatttctcctcacctgccctctcacctcttcccctttctgagtcttcattgtctataattccactctttagctccatgtgtccaccttttttctcagcatccacttacagtgtttacagtgttctcatgtttctttgtttcttttctttttaaatttcgagacaggctacaacagaatccaaatccataggtaaagcaaactactcatgtaatttcaaagctgaagttgatagtatatttgtacccaatatgaatggttcacctgcatgagttttgagttctcaaaggccagtagcctcctttcccttttatgcatcttgagtacacttgagttagcctatgatacatgaatacctacaaagttgaggcctataaaacttacatggcaagcaatttgaaatgtgccaacaatgtgatactggagcaaccatagtgctgagaacagctttgactactgcaggaaatccacaaacctcaaatttagatgaaaacatttttgaacttaattcatactgagggacaaattatggtaatagtggagggaaagtctttttatgtgagatacaggaggctcctttagctctttcacctcctagagtcaccatagtggtaccttcatttattccttctcaaatattcctcccatcttcatttagatctgagtttcaggcctatattattttccctctttctgaagaactcttgacatttctttcaaggcatgtttactgacaacaaagtccctcaattttcatttgagaaaatctttgtttcccttttgaatgaaaattttgctggatacagaattctaaattggtgatttatttctttcaacactttattttactctaccttattcttgtttgagtcgtttttgaagagaattccaacgtaatacttatccttgttcctccagtaggtaaggggtttttgttttgtttttgtttttttgccttcctatagcttctttaaggattttcttttgtctttgattttctgcagtttatgtatgatattcctgggtgtagatatttcttggtatttttcctgcttggcattgtgtgagcttcctgaatctttggtttggtgtctgctattaattttggaaaattctcagccaatgtttctttattttttctgttcctttttttctcctccttttgttagtcccattatacctttattatccttctgtaagtgttccacagttcttggatatttgcaccatttcttttcagtctttcttctctttgctttgcaatttggcagtttctattaacatatttgcaaactcaacaattcttatctcagccatatccagtctactgctgagtccatcaaaggcactcttcatttctgtgagacagacataatctataggtgaaaggaactgatgtaaatacacctttagtgtgagattttatgcttatctggctaagagctctgcatgtattcctgtctgtctcccaaagtgtagaaagattttttttgttgttcagtttctcttaggacaacaggtcgttgtccacagtatgtgactcagcacccttggatgatgaagttggctaagatgttggcaggcagagaatcacccatggtgttgccagtggtagttaccgagaagccagctggggtgctactgaattctctggggagctgacctctgagagttgcccttcagggtgctggaaagactagctgggaagtgtacctgtgaggacaatcctgaaactcacttggaagctgccctatggtatgctggccaaactcactagaaagccacccttaggagtgccagcaaagctcactggggaggcatcttctacctatctcacatgccactggcagctatgtgcagcaagaacaaaccaaaaaagcactcaaatcaggaagtggagctccttcttccctcagcatctttctaatgccctctactggcaaagcttaccattgtccaactaacaaagggaaatgttcacaggatccagctctgccatcccaacccaggacaaagaagcgtgaatttataactcaaatgtaataaattaataactggcagaactgcccattacacataggatatattccaattctttgccagcacctataatgatttactctctacctatttcttcaacattattggaggtccaccctgcctactttccaccattttagccattctctgttatttgcacactccaagctcatcttacctcagaacctttgcccttgctatactccatgcttggaacaagtttcccctatatctttatataactagctctctattaatatttgggtctttgttaaatgtgacctcatttgaataatctaaaatgagcccacatgcctataataccttctgttgttttgctgtttagttttcttcacggtacttatcactaaattatccttttttttttttttactatgttcttatccacatagtaataagccaagtaagagccagaccataatctatattacatatcagcaataagaagagtacccggcaagtagtaagtgctcataaaaaatactatatagttgttgaatgaatgagtgatctctgttttatagctgaggactgaagctcagagagagaaagtaactttcccaaagaacacagctagcaagtgccagagtcaggagtcacctcaggtcctcctgatcacagtgctctgattgtcatggctctgtaccaccacctccctgagtgctggaaagagtgtagctgaggtacatgttacagtggagtctctaaaataattgagcttttgttatctcattacccatttttttctttctatggatctggctctctactgtgtgtgcatagatacagatccatgtactcgtgccccctactcagaataataatgtgttaaatatctttcaaagaaagaattattagacaaagtcatggaactcttcaccaaaaagatgaccttcaagaggggccatgcgcgatggctcacgcttggaatcctggcagtttgggaggccgttcgagaccagcctggccaacatggtgaaaccccgtctctactaaaaatacaaaaattagccgggcttggtggtgtgcacctgtagtcccaactacaggagaatcgctttcacccgggagactgaggttgcagtgagccaagactgtgccactgcactctggtctgggtgacagagtgacactctgtctcaaaacaaaaacaaaaacagaaacaaaaacaaaacctttgaaatactttgtaaaattagaaattgggtattgagaaaaataaaaatacatcaaatggaagacaggaacctagatcccatttttttcttttctttcttttctttttttttttttttgatggagtctaactctgttgcccaggccagagtgcaatggtggaatcttggctcactgcaacctccgtctcctgggttcaagcaattctcctgtctcagcctcccgagtaagtgggattacaggcgcccgccaccatgcctgccaaattttgtatttttagtaaagatggggttttaccatgttggccaggccagtctccaactcctggcctcaagatatccgcctgcctcggcctcccaaagtgctgggattacaggcgtgagccaccatgcctggccccagatccagttgtctaataccattcttcagtaaaataaaccagggctcttaggagaagtggtcaattctagcactggggcaggaaatacaaacataggcctaaggtaccagggcataaggaagtgttcagaaaacaaaaaaatcacacaacgatggggatatgttaaaaggaactgtagccagagaagggttcctaatggctgaagacagaaaaacttgagcaacaaagtcaacaaaatagtattggattataaagtataaataaatatccacgagtctgtccatactgatacaaataaatgattgaataaataaacaagtagtggagaataggtggatctcccatacagaagaatcccaaaaaatttatgtagatactctgtcctcaaggaggtagagcataattccacattcaagtgtgggttgcgcatactgacttccttcaaaataatacagttatggagagaggaaaaactaacttcatagtggaaaaatctgacaaaccccacctcagccaggggatcaaggtcagcatcaatggtatatatttttgatatgatgtgataagaaaggcatattatttccatagtcttcctcagcaaaccccaaacatcagcctaatcgtgaaaaaatcatcaggcatctcccagttgaagggccttctataaaatacctggccaatactccccaaatctgttaaggtcttagaaactgttttttaaaattattattatacattaagttctagggtacacgtgcacaatgtgcaggtttgttacgtaggtatacatgtgccatgttgttttgctgcacccatcaactcgtcatttacattaggcattactaattagggttactaatgctatccctctcccatccccccacccgccaacaggccccaatgtgtgatgttccctgccctgtgtccatgtgttcttgttcaactcccacctatgagtgagaacatgcggtgtttggttttctgtccttgtggtggtttgcttaaaatgatggtttccagcttcatccatgtccctgcaaacgacacgaactcatcctttttatggctgcatagtattctatgatgtgtatatgtgctacattttcttaatccgttctatcattgatagacatttgggttggttccaagtctttgctattgtgaatagtgctgcaataaacatacatgtgcatgtgtctttgtagtagcaagatttataatcctttgggtatatacccagtaatgggaccactgggtcaaatggtatttctagttctagatccttgaggaatcgccacactgtcttccacaatggttgaactaatttacactcccaccaacagtgtaaaagcattcctatttctccacatccttccagcatctgttgcttcctgactttttaatgatcaccattctaactggcatgagatgttatctcattgtggttttgatttgcatttctctgatgaccagtgatgatgagcattttttcatatgtctgttggctgcataaatgtcttcttttgagaaatgtctgtttatatcctttgcccactttttgatggggttgtttgtttttttcttataaatttaagttctttgtagattccagatattagccttttgtcagatgggtagattgcaaagattttctcccattctatatgttgcctgttcactctgatgatagtttcttttgctgtacagaagctctttagtttaattagataccatttgtcaattttggcttttgttgctattgcttttggtgttttagtcatgaaatctttgcccatgcctatgtcctgaatggtagtacctaggttttcttctagggtttttatggtgttaggtcttacatttaagtctttaatccatcttgagttaatttttgtatatggtgtaaggaaggaatccagtttcagctttctacatatggctagccagttttcccagcaccatttattaaatagggaatcctttccctatttggttgtttgtgtcaggtttccccattgcttgtttgtgtcaggtttgtcaaagatcagatggttgtagatgtgtggtattatttctgaggcctctgttctgttccattgatctatatctctgttttggtaccagtaccatgctgttttggttagtgtagccttgtagtatagtttgaagtcagatagcatgatgcctccagctttgttctttttgcttaggattgtcttggctatgtgggctcttttttggttccatacgaactttacagtagttttttccaattctgtgaagaaagtcagtggtagcttgatggggatggcactgaatccataaattaccttgggcagtatagccattttcatgatattgattcttcctttccatgaacatggaatgttcttccatttgtttgtgtcctcttttatttcattgagcagtgatttgtagttctccttgaagaggtccttcacatcccttgtaagttggattcctaggtattttatcctctttgtattaattgtgaatgggagttcattcatgatttggctctctgtgtgtctattattggtgtgtaggagttcttgtgattttttgcacattgattttatatcctgagactttgttgaagttgcttatcagcttaaggagattttgggctgagatgatggggttttctaaatatacaatcatgtcatctgcaaacagagacaatttgacttcctcttttcctaattcaataccttttatttctttctctcgcttgattgccctagccagaacttccaatactatgttgaataggagtggtgagagagggcatccttgtcttgtgctggttttcaaagggaatgcttccagtttttgcccattcagtatgatactggctgtgggtttgtcataaatggctcttattatttttagatacgttccatcaatacctagtttattgcgagtttttagcatgaagggcggttgaattttatcaaaggccttttctgcatctattgagataatcatgtggattttgtctttggtcctgttgatgtgatggattacgtttattgatttgcatatgttgaaccagccttgcatcccagggatgaagccaacttgattgtggtggataagctttttgatgtgctgctggattcagtttgccagtattttattgaggatttttgcattgatgttcatgagggatattggcctaaaattctctttttttattgtgtctctaccaggctttgctatcaggataatgctagcctcataaaatgagttagggaggatatcctctttttctattgattgaaatnnnnnnnnnnnnnnnnnnnnnnnnnnnnnnnnnnnnnnnnnnnnnnnnnnnnnnnnnnnnnnnnnnnnnnnnnnnnnnnnnnnnnnnnnnnnnnnnnnnnnnnnnnnnnnnnnnnnnnnnnnnnnnnnnnnnnnnnnnnnnnnnnnnnnnnnnnnnnnnnnnnnnnnnnnnnnnnnnnnnnnnnnnnnnnnnnnnnnnnnnnnnnnnnnnnnnnnnnnnnnnnnnnnnnnnnnnnnnnnnnnnnnnnnnnnnnnnnnnnnnnnnnnnnnnnnnnnnnnnnnnnnnnnnnnnnnnnnnnnnnnnnnnnnnnnnnnnnnnnnnnnnnnnnnnnnnnnnnnnnnnnnnnnnnnnnnnnnnnnnnnnnnnnnnnnnnnnnnnnnnnnnnnnnnnnnnnnnnnnnnnnnnnnnnnnnnnnnnnnnnnnnnnnnnnnnnnnnnnnnnnnnnnnnnnnnnnnnnnnnnnnnnnnnnnnnctttaaagtgtcccatagattctggtacattgtgtctatgttctcactggtttcaaagaacatcttcatttctgcctttattttgtaatttaccctgtagtcattcaggagcaagttgttcagtttccatgtagttgtgtggttttgagtgagtttcttaatcctgagttctaattttattgcactgtggtctgagagacagtttgttgtgatttctgttcttttacatttgctgaggagtgttttactaccaattatgtgatcaattttagaataagtgtgatgtggtgctgggaggaatgtatattctgttgatttggggtggagaattctgtagatgtctattaggtccacttggtccagagctgagttcaagttctggttatccttggtaaccttctttctcgttgatctgtctaatattgacagtgaggtgttaaagtctcccattattattgtgtgggagtctaagtctctttgtaggtctctaaggacttgctttatgaatctgggtgctcctgtgttgggtacatacatatttaggatagttaggtcttcttgttgaattgatccctttaccattacgtagtggccttctttgcctcttttgttctttgttggtttaaagtctgttttatcggagactaggattgcaatccctgcttttttttgctttccatttgcttggtagatcttcctccatccctttattttgagcctatgtgtgtctttgcacatgagataggtctcctgaatacagcacactgatgggtcttgactctttatccaatttgccagcctgtgtcttttaattggggcatttagcccatttacatttaaggttaatattgttatatttgaatttgatcctatcattatgatgttagctggttattttgcccattaattgatgcagtttcttcatagtgtccttggtctttaccatttggcatgttttcatagtggctggtaccggttgttccattccatgtttagtgcttccttcaagagctcttgtaaggcaggcctagagtgacaaaatctctcagcatttgcttgtctgtaaaggattttatttctccttcacttaggaagcttagtttggctgcatatgagattctgggttgaaaatgcttttctttaagaaggttgaatattggcccccactctcttttggcttgtagggtttctgccgagagatccgctgttagtctgatgggcttctctttgtgggtagcctgacctttctgtctggctgcccttaacattttttccttcatttcgaccttggtgaatctgacaattaatgtgtcttggggttgctcttgttgaggagtatctttatggtgtcctctgtatttcctgaatttgaatattggcctgccttgctaggttggggaagttctcctagataatatcctgaagagtgttttccaacttggttccattctccccgtcacttttggtacaccaatcagatgtagatttggtcttttcacatagtcccatatttcttggaggctttgttcatttctttttactcttttttctctaatcttgtcttctttctttatttcattaatttgatcttcaatcactgacatcctttcttccacttgattgaattggctattgaaccttgtgcatgcatcacgaagttcttgtgccatggttttcagctccatcaggtcatttaaggtcttctctacattgtttattctagttagccattcattcttctcaccttttttcaaggtttttagcttccttgggatgagttagaacatgctgctttagctcggggaagtttgttattaccgaccttctgaagcctacttctgtcaactggtcaaactcattctcgtccagttcgtttccttgctggcaaggagttatgttcctttggaggagaagaggcgctctattttttggaattttcagcttttctgctctcatttctccccatctttgtggttttatctacctttggtctttgatgttattgacctactgatgggattttggtgtagctgtcctttttgttgatgttgatgctattcctttctgtttgttagttttgcttctaacagtcagacccctcagctgcaggtctgttggagtttgctggaggtccactccagaccctgtttgcctgggtatcaccagtggaggctgcagaacagcaaatattgttgcttaatacttcctctggaagctttgtcccagaggggcacctgcctgtttgaggtgtctgttggcccctactggaaggtgtttcccagtaaggctacacgggggtcagggacccacttgaggaggcagtctgtccattctcagagcttgaacacaatgctgacagaaccactgctcgcttcagagctgtcagatagggacgtttaagtctgcagaagccgtctgctaccttttgttctactataccctgcccccagaggtggaatctatagaggcagtgagccttgccgtgctgcggtgggctccacccagttcgtgcttcttggcctctttgtttacactgtgagctactcaaggctcagcaatggcagatgctcctcccccagtcaagctgcagtgtcacaggtcagactgctgcactagcagtgagcaaggctccatgggtgtgggacctgctgagccaggcacaggagggaatctcctggtctactggttgctaagactgtgggaaaagcacagtatttggtcaggagtgtactttttctccaggtacagtctgtcatggtttcccttggctaggaaagggaaatcccctgaccccttgcgcttcccgggtgaggtgatgccctgccctgcttcagctcaccctctgtgggctgcacccactgtccaaccagtcccaatgagatgaaccaggtacctcagttggaaatgcagaaatcacctgtcttctgcattgatctcgctggagctgcggactggagctgttcctatttggccatcttggaagcaactgcccatcttagaaactcttacagccaagaggagactaaggagacatgctgactcaatgtaatgtggtgtcctggatggatctgaggaagggaaagaggatatttggttaggaaactctgaacaactaaagaaatctgagtaaagtatggatgttagttaatattcatgtattagaattggtttacagtggttacaaattatagaggacactgggtatgtggtatagttatacgagaacaatctgtactctcttagcaactcttctgtgattctaaaaccattctaaaataaaaagcttccttaaaaaaaattgatggcagagcaggagtaagtatttttgttttgtaaccttggaaaaaagagagttgaggcaaaatccacagaggactagaacctgtattcctatctggtgtgggaggagagagatgacatttggttgggagaaggctggagccaagttatggtgttcagtttgtttctgctctgctgtcatagggctcttccttggaggagctatagctctatggaaccgtatgaatgggagagtaaggttcaacagttcgttggtgtgacctgggtgtatgtgcacatgcggatgcattgtgtacatgcaaactcaaatccccatagcatccagctaggaagtctaaatgagcaaagcaagttgggtataagaaataagaaagtgctgggagctatgcttaataggagacacaagcctcaaatagcagaacagctgctgctctgttcagtgccgggtgatttttgctgtgcgggaaggtgaactgagatgcattttctggtatttcaaaagaagctgaaaatctagatttactttttgaatgtggaaaattctgctttttaaatgttggcaactatttcagaaagtttttattaatcatcatgtatgcccaatctgtgttgaaggaaatgtgtctgtggactgcacacagtccataccaccaggttgcaattatttctgtcaacctgagctatgctgagtccggtgggctaatacagatgaggcagggctgtgtctgtgtggtgtagagcatggagtcagtctgtgtcctgagctgtgatgagatcattctgtgagagtaaataactgagcttgtacttgaaagttgaggacaatgtggagaacaaagagctaagagcacaagcaaaggtccagaactagaacatcacagggtgtgttttggagactggatgatttgagtaaagaatcatgaagagcagaagtagttatcaggctagaaagttaggctggagccagataaggatgggcctgagtatttggaatatatactgttggcaacagatgactaaatactcgggttctcttgaaggagtacagggcagaaatcaggagatagaatgagaaatttgacatttacaccagaactttccagccacaaagagcaaggtagagtcaattaatgcactgagtctagttagaatgattgggttaaggtgagagtggccattcctaacacttagcaaaacagtgtgtatgcatatgcctgtgtgcagttatttgattatacatacactttccagctgggctaggctggcctatctgggcccagtcaactgctgtggacactgagctttaacaccaataagtgcgtgccgtattcatcctcattctcatttctttctcagtgcctcttgaccctccaaggattattgcactgatccagaactgctaaaatggagaaagccaggcctgacctgtgcgcacagcacacagcattgatatttgatgtgagattaggtcagagtcagccgggaagccttctaaagcgtggcatacagccaacaaaatgaaaaggctttattctggggggaaatgtttccctctctgcctggcttgctttccttatcctcccttagacatcctttcccctaaattctagttcattattttcatttgaaactctcaaattccactgggccactagctgaccacattcctccctaaacaatagcattctattttaaacacttattgtgccaatgttgacattttaatagcccaagaggggctgaaataactactcctacctcaccaccatcaccaaggagatcaagtatcatttctaggatttatggtaagcccctcacggtgaaagcacaaaaatcagaggccaggaaattggcagctacgtattttaaataggatttcggtaatctttggctggtctttcctaacaatgttgaagttgatattttgtaacttaacattggttctagttctgcctggtgagtagctctaatctcattttcattatgtgagaaaacacttattaattagtagaaactattggcaaacttgatatagttgtgaatgaataatgtaaatccctagtggggcccttcccaaacccttgctccccttcctaaataagcaaacagagggaaatttctgattttagtgggatgatgtaccactgattacccaacattgcttatgactttaccattaagatttataatgaaaactcttttatctatatgtaacaggaattaaactttatgcaacaagttaaataacaaactttctcgatatccaaatgagtgctttctttatccaagttcatcagtgtaggggaaagtcctaaccttatttcaaaaatgtgcaaaatattttgtaataactaggtaattctaaaaacatataaggaattatctgaagttaagtgtggtgagtgaagtggatgattgatagtcatttgggagcagtaaagtgggtaagagtaaaaattaatgagacagtcttcttcacgtggttcaaaaaacagcttctgaaggcagtttccctggaagagctccagaagtgttcttgtatgtggcagtaaagaaagacaatactcctgatgactggtaaccaagtaatgctggcttaaacagttacttatgtgataatcaaacttcccttgctgatataaaagtttttatgtattcttggtttgatcactcctaatttgtctgcatgcaaggagaaccagacttaaggtaggatccactcatttactgactgattgcttattgaatgccttctctgtgctggacagtaggagtaagatgaggagcactgtggactttgtccctgccctcatacatttatgataaggggttgtggggtcagggcatggaaaaaacaaaaggcaaatctttaagacaaactgattggaaacgactgctattggttaaatacacccacatgttgagataatttgtactttcccaaaacattatcttgataacattatagtcccagaaagcgttagggaatgtagtaatgaaactttggcaggtcttgtgcctctacaatgtttgtgttgctcatgacctttgtacatgaatgcttttgcccatgtggccagtcaaaaaatgacctggttgacctgtttttccaaaagacctttgaccaaatctttgatggacaaacagagaatcatgttttcaagaaggatctacttgcaagcaaagttctatagtgtagtcagggaaggctctatgaagtaatgaactcttctggcaaagatctgaaggatgagtagaaaatagtctggtcatgagctaggggaagtgatttacaggcaggagtaacatgtggaatacagaataatttgactttaataaatttcaaatggtaaaaattttccaaagttcaaaatagaaacataacatcccgtgatattagaaaatctcattactttactttagtctggccagaaatgtgtcaagaggaagacttcaaagaggtagatttcatctctctggcctgtaaacaaaatgcccaaaacacttccccaaggcttaaagtcagtttgtaattactcttttcatcacctcagaagaatttccaaactttagtaacgtagtaaaattttttttggcctttgtgaataaatactatgaaatttggttcaaaagataaagcaaagagcaactgaggtcttcaaaacatcatgtatctagaaggtattaccaaacatccgttttttttaaaaaagcataaggcataaaatcaattcactaatgtcatgctagagtgaggtagtaaaatgaggcaactcagaccagatggtgtaattcataaacagggctgtcatttgggaaaacgggtggagtggatggagaaattaacttgcagtctttccccttccatttcttcccaatccaactaaccttattcctctgggtcatttagctgtggctaaaacacacacacacacacacacacacacacacacacgtgtgtatatatataatatatatataatatactttttacttatagccataggtaaatggtgaatgaagtagatgattgacctgtgtgcatagcacacagcattgctatttgatgtttgatgaaatatcaatgctctcagaataaataattaaatgagtgtatatatatagacacacacacacacacacacacacacacacacatatatttcttttttaaaagagtgtaattgatgccaaagccactttctcttcagagctgcttaactacatgaagagtgtgcaccaacctggggttgcaaagagttctctaccttgtccggcttctggaaaggatgtgcgctttgctcaatggggaatggataagatgaggatgtcccactgctggttggttagtacatttttgtagatgaagcaaagcacatctgttcttatacagaatctcatctttaaaagggacctcagatagcatctaattcaaaaactcatctaatgcagtgcagtattcctctaagatacatacataaatgctggctaaatgcccccagggatggaagtttactgcctcacaaggcagccaattatctttctgacaggtgccattcttcctaatactgaggtaaagtccattgttctttagcttccacaaaaagcagtgataatactcttgacggcttgccctgtgccagggtctgtgccaaggagcttcatatgcattgtttgtaacacttgcaacattagtggcaggcagggatcatcctgcacattttacaggtgagggaactggcacaaggtcacacagctaagagagaaggatctagtctggctaaatccaatgcctaggccaatttcttgacaccatgcataattcctgtttcaaatttctatatgtgaaggcaccttttagactcttctgttttctcattgatttctcatatggcatgccttccaatgctttcagaatatgctatgacagtatctctataaaaatataaatcaatacaaaagttattgacccctagaaaatgacaatcacatacttcaattaaaatgagtagtacaaagagacttccttgaatcttttaataatggcatttatttttacataataacagcagcatattggttaagacatggatttaggtagatttgacacctggtttcaacattcattagctgtcagattcggggcattttatctaacttctcaaattatcagtttctcacttacaatgtggggatgatgatgatgcctatgttttagaattgtgagacttgacatagtacatataaagcacttagtatgatgctggcactatcttcaataaatggtattattatttctttatttgcagcaaaccaaaacccgtatgattgttgtcaagtaagacttcccctacatcatgtttgtaaattagaatgttagctataattataagaaattgaaaaattcatgttgtctaatcaatattacattttagccagtagtttcagccaggatcttggttctctcattaaatatactggtaatctttttcaattttgtgtcacctgcaattgttaaacatattttcagtatctttatccaagttgttgctaaaagtgattgaacagggaaatcaatgtttgttcccatctgtgggtgctgttaacagcttcgtatgtgtgttttacagtcacatatgtaattttccctgtgcttttctgtctatatcatacacttgttgtatcccctagtgatctctgaagttttaagctgtctttgacctatgattctgtacatctcctgatattgacatagctgaatctattaactaacttctaaaatggaaaccaggacacctggggctcagcactagcctttccccagtgtacttaagccctctgtggctccatttttcatacttttaaaactgagcaaatatttgccctctccttcctttcaatgatatggtgaaaatgaatttaaagcaattataaaaaggacatgtgttcttataattggtagcatatcatttacagagaaattcctcatctggtcactatctaagtagctaaacaactaaacattagcaagagaagtctttgagcagtcaatgtaaatgacaccaagtctatgcatttatcatgtgctttactcatagactcatacttattcacagtcccattacatacacacatctaacaagcttgtttatttcatttcccagtccacagccaaatagaggaagaaagtggatggagactgcccaaagtgggtaaattgaaagtagcaagaaaaggccaggtgcggtggctcatgcctgtaatcccagcactttgggaggccgaggcgggcagatcacgaggtcaggagtttgagaccagcctgaccaacatagtgaaaccctgtctctattaaaaatacaaaaaattagacaggcgtagtggcgtgcacctgtaatcccagctacttgggaggctgaggcaggagaattgcttgaacctgggaggtggaggttgaactgagccgagatcgcaccattgtactccagtctgggcgacagtgcgagactccatctcaaaaaaaaaaaaaaaaaaaaaaagtagcaagaaaataatcattttgaaaggtgaaaaaaaaaaagacaagagaattataaaaattagaaactcaaaaagtaaagaagcctgagaccactaattaaaggggaaagatagccttaaacatcagttttcaagaacattactgaattacaagttaatactataattgatgttcaaaatgattattcattattgtgttggacttccgtgttttcacatgctcagcattcattctgctctcctctggaggcagcactatgatttttcttcagaaaattacccttcccaatttgtattctgttccaaaggaaccatcatgtaaggagctttcccatctcctgaacaaggctgagcttatggtccaagacaagtcagtcacctttttgcaggaatttggatgttgagcagagccaacacaaagctactgggctggctcatccttatggtggtatcctgaattcttcccttccacgtagaaccctggagctgcatggtccctgaccttttcaagactggttgtccaattttcttttaatttggaagactactttaaaacattctaataaaatatgttagtcaaaggtggtctttggctgctcacagcttgtgtttcataactgacacagattcattaaagggatcaattttgttctatatgcagtgttcaaaaagccacagatatttgtaataaaaattaaaaataggccaggcatggtggctaacacctgtaatcccagcactttgggaggcagaggcaggaggatcacttgagcccaccattacgaaaccagcttagacaacatagtgaaaccccatctgtacaaaaatacaaacatttagctgggcatggtggtgtgtgcctgtaatccctgctgctcgggaggcttgaggtgggaggattgcctgagcccaggaggttgagtctgcagtgagccatgatcacgccactgcactccagcctgggtgacagaacgagaccctgtgttaaaacaaacaaaacaaaaaaccccccaaattaaaaatatttccatccaacttggttaaaatagaattgaaaacctttagcattaaagggatgtttccattataaataagttactaatttcctaaccatactagatgaatgagttgttattgcatacaaatccaaaaattattacattttattgtagcttgaatatatcttggtgaactcattttcttagagtggctctggttagctctttattaaaatgacaactgatgtcacagaagctgcctgaggacacatctaaaatgaacatgcttttagtggtggttaaaatactttgaacagtcaacaaatatttacagctctttttgtgtaacgtgctgtactaagtgctgggataaagcagtgaacggggtggacatagcctcagaactcccggagcttgtggtccaatagctcagtaaaggtctactgaatgaaagggagacttccctttgctcacaatgaggtcattcctcatgtttttgccaatgtatttttcctgcctggataatccaccctctgacctttatccacatcctttacccatttctttttcaaggtccagatcaaacagcaagttctccactaagcctctaacaataataacactgatggcagctaaacatttattgagcctgatgctaacctctttacatggattacataactcatttctcacaatgcactatgagatatttacatataattcttcagtaacccaattgaggggaattgcagggcaattaaaaaatacgtataacttaaaatgttgaactcagcatgcccagaactactagaatctttttgagcatagaacttaaaatgtaaggtgcgaagaaaacaattttatattttactgtgcctcagaattgcttggtggggtcttttaagaaataaagatgccagagtacattgtcaaaatttccaactaattaaaaacacacaagcacacatatgcagaacacagtacagaaaattgccgcaaatatcttctaaagataaccacaaattgcactttatgtgtttccattcagtttttcttctttttttgtagctataatcttttagacataattttaggataggtatcaccttatcagtgagatctttccttacccacctccattccctgtcctcattactgcttaagttttctccaaagaatttcttaccttctatttattaattactttttaatttactttgcttcctcagagtaacttatctccccacctccccgtggccccacttccacatacatactagaatgtcagctccataagggcagagatttttgtctactttgctcacttcagtatctacagtcgttaacagagtgcctggcatggagaggtagcttagtatctctttgtccaatgatggatacctgaatgaatacaactgtcaaagtgcccttcagaaatgctgtactatttccacttctacacgaagggtaaggcagtgccatgtggaaggtatatttttaatgggtgggaccttgagtcatcccttgaatgccacctgggatctctgtggcaggcacttgcaacaccaaaggagtgtacactgtgcctggggccaagggcaggtgccatacacaagtgcaaggccatactgaagaggccacctgccctcaaatgggttcaacaggaatgctttttaaagcaatgccccaaaattggttttagcacttgattgtataacctgaccacattatgagttctggaatttgttcagggctgtgtcctgtttcctttagatcacatctttctctcacccagattgcctaatttttgaacttttaaagagcagagtactgctttcagtgctatttagtcatttcccacagctcttcatccctttagagtagcttttatagttacttgggccattttgggtagtggacattggattactatttttgttcaaccaaataaatggaaggcttcttagtattattaatgctcaaaacatgcaacccacactcctattatgcaattgaatattgttttgaagtcatcctgtaattacaagatttccttccaaatcagacaataggtctgaaagtagtaattttgacctaaatatgtgcaagagcttgaagggcttcttataaaaactaagaggaagaccaagtttagtggaaaaacacccaggctaggatttgggagacctgggtcccactgacatctctgccaattattggctctccaagtccccctttggttgggtaatggggccgtccatcctaactcactctattatgtggaatataaatatgggaatcacaatgaaaactgtaaaattatattacatctaaaaggctgccatgttttcttaaacactggttaattatggtaggtagaaagaggtcttttgaaggcttttagagctcattttcccaaattgttttgtgtggacctctgcttcagggagatgtatttagtcagcttttgctgcatgccaacttcaatatcaaagtggctcatattccatacacattcctatgcttgctcgtctgcagttcagttagagttcagtcctgaagtttaagttgaaaggaagaaacttgatcttagtgggtacttaatctgttcagctcactaaaaacaaaaacaaaaacagctcagttgtatggaaggagcatgttaaccacaaaaagtaggggtagaccagaaagaagtaagctagaaggtgggttttggaatgagatcagcgccagtgaatctacccttcagttctagatttgagaaaagtagtcaaccaccataccaatgggcaacaagtaggaccaatggaaactgtactcaccccacctgttgaaaacctggagtttgagtaggtcttgccttgtgtaagaaggagtggagaagaaaaaaatcacaccctacatttggtcagggccaaacaagattgaggacaaatagaactttgtgttaaaatacttgtcccaggtccagtttcgttttgcaggattcagaaagagttgtgtttgtttaatacagtcttataaagaatttccaatcccagaggattcatgaagcaaagtgatgctacagcttccacggtgtgtatgtcagagcaggcaggattttggagattgtatatcccaacactgtaattttacaaatggaaaaaggcacagggaggaaaataaagctcaggattattcagttggaggagatagaaatgcacctaagtcccatagctcttagtacaggacatatttttttttacaatagcagcagcagcagcattattaaataatgatcatggaacatttatgaatctaggcatagttctaagtattctatatggattatgacttttatgccttataatagcccatagaggtacacttcccctttgtacaggtgaggaaaccgagagaggcagagaggttaataaacttgtccccagagtaacatgtaagaaaatgatagagataggacatatcatgaagcaatttccaaagcgtatctggcatataccagcttcgcttccagagacatctacctgaccagaggtagagcagtagtttacacttcttcacttgttcagacaataaagaaaatgggttttgaggaagccctgtatgcctttctaaaagtgctttctaagacagagtacatatttcctgatcttctgtatatccgtcatcaaactcaactgtcatcttcttaatgccaggtagatactaaaccacaaatcctccaaaacaactgggcagaaagtagaagacaatcagcagcattcactgctttctaagaaggcaattcccaggaatacagtcctgaaggtttaagttgaaaaagaaacttgatcttagtaggtatgtaatcagtttagctcactaaaaacaaaacaaaacaagacaaaaaacaaacaaacaaacaaacaaaaaaacaactctgtcaggtggaaggaacgtgaaacgtgttaacccatgaaaaacagaagcaggccagaaggaagccagctagaatctagggtttagaatgcgagcagtgcctgtcaatctacccttcagttctagatttgagaaaagtagtcaaccaccacaccaatggacaatgagcaggaccaacagaaactccatccacctacctattgaaaacctggagctttaataggtcttgccttgttcaagaagtagagaagaaaaataaaacaattcctatggtagaaaaaaaaaagatactgtgcaacaaagaaaaaccgtatcgagatggtttttgaggaagaatacacatgtgaaaaccagctagtctgggatccagaaaaatatttaagaaatagtctggcatcctcagaaaagtacaagaagatatggtgtctatgaaccaggagctgcatggagacagatgtatccagtaaggactagagtgaagctaagatataatggaagggagacaaaacactccctatctctggaaacaaaataaaatggaatacagggtgccagttaacccttgcagtaaatgataatttaaaaggaaaatacaaaatacccacaggtgaatgataacgaaagtatctcatatcaaaatttactggaagtcgctaaggcagaggaaatttataggtttgagtagattttctgtttttcctatttatttatatattaaagatatatacatgaggatatttatccccattttacaaaagaggaaaaagaagctaagagaagttgagtagcttgtcaaagttcacactaccagtaatagcagagccaggatctgaaccaggaggtctggttcactcttaataagacagaaaaatctctagcaaggttaagaaaaaaagaaaagatatgaataagcaaaatacatgataaagagagaaagaaaaaaatgttttgaacaactagcttacactccaataaatacgtatatattagtttcctagagctcttataacaaaataccatagactgagtggcttaagcaacagaaatgcattttctcacagctttggaggctagaagtctaagatcaaggtgttggtaggtttggtttcccctgaggcctctctccttggcttgcagatgactgactgccttcctactgtatcctcacgtggtctttcttctgtgtgcaggcatgcctgctgtcacatgtatctccttataacaacagcaggcaggttagatttgggcccaccctaacagcctcattttaacataatcacctctctgaaggccctatctctaaatacagtcacaattcgaggaattgaggattaagactttatatgaattttctaggaatatgattcagcccataacagtctagaaaagtgggtttcggggaaaaaaaacccacaacttcccagcataaatgtgaaatagaaaattaaatacaccaataatataacatgattattaatcctttccttttactaccacattcctagtagatagagactgtggttgttttacaggtgagtccaaacacactttccaaggaacagaaaatccctatattactttagttgtatcagaaaataaaagataagaaaaagttgcccaactcatttcattctaaaagtggattgaataggtataataaataaaagtaaattatagaccaatgtttaagacataggtacaaaaatcccagactttatattatttaaaagtaattacagcaatatgtataggaattaatacatcattatcaagttcaatttattccaggtatgtaaatatacttcaactttggtacaagtttggtacaacttcagacacattatctttcaggtaatttgctaatgttactaaaaaaaaaaaaacaccccagaagaaaagttaaaaccctaaacaaaaacaagaaaaagaagagtataagaattagaagaaaaaagaggaaattagcattttagaaattttatatgatgatttaatatggaacacctacaacaagctacagatacattactaaaattgattaaaaagtttagataagttgttggataaaaatcaatatacaaatacattgtatttctatacaacagcaacaaagctctaaaagagctgaaattaaaagttacaatttaatttacaatggcaattttacacatacacacacacacacacacacaccagggaatgagctgaaaaaataaagaccttaatggagacaattattaaatttattaaaagatattaaaaataccagaattaatagaagatatatcatatgtatgaatttgtagacaaaatattttgagatgctgtatctactcaaatggaacaatatattcaatgggattaaaatatgtatctgaaggcaatctgtgttgtactaaaaagcttgaaatgacaaagcttgaaagctggttctaaaatttatatagatgacttgagggtctgagaatgacccaaattgtcctgaaaaagatgaagcaaattttattattaagcttattaaataagaagtgagtgagtgactggtatgaggactaagggaccaagggagcaatggaacataacaaacttggtatgtgacagaggtggcattgctgaaaaccagtgaaatgagggaattggtcaacatatggggttgaaataattggttacttacatggaagaagtggaattggatgttcactttaccatgaacatagatatcaattccatgtctattaaaaatgtaaatgtgaggctgggtgcgatggctcaagcctgtaatcccagcactttgggaggccaaggcaggcgtatcacaaggtcaggagttcgagaccagcttggccaatatggtgaaaccctgtctctactaaagatacaaaaaaattagccaggcgtggtggcacacacctgtaatcccaactacttgggaggctgaggcaggagaattacttgaacctgggaggtggaggttgcagtgagccgagattgtgccactacactccagcctgggtgacagagtgagactctgtctcaaaaaaaaaaaaaaaaagtaaatgtggaaggtaaaagtctacaaagggagtatctgtgacttggggcagggaaatattgcttagacaaaacacaaagcgcacaaaccataaagagaaagattggtaaatttgagcacattaagaacctctgttcatcaggagacactgtaaggacagcagaaagcagacttggagaatgttgtgtgtgtgtgcgtgtgtgtatctagcaaataattagtattcagatatacaaatcaatattgatttttctacaaatcaataagaaaaagacaataccatggacatgttctcaaactccttagtaatcttggaaatgaaaattaaaacgacaatgtatcaccatttcctacctatcagattggaaaaatacaacctgatattacaaaaaactgttgatgtaggacaatgagaaccttagacaatgatagattcagcatggaattaacctaaaggaataaggcctgtctcctaagtttttgagggagttacgatatcacaacaaccttaggcttgtgtggcatcagcctgtgaatattaacttatatcaaggccaccgctataaaatcaaagtccttaaaatgccctaccaggacttggtatgtatgatctggttctcccttgcttctctaatctcacttgttactactttcccatcactcttgccatcctcagtccttggaagtatttctcgattattcttttatatttgccattccctcttaccggaatatccatcctccagatatccacatggctctgtctcttcattcattctagtgcctgctgaaaggtcatctttttaagatgatttctctgataattttatctgaaaagtgaccacccatcctacttgtcactatcttcttccttgtttttttttctttataaccttcatcatgactttacattttaaatttttaattttttcccttctctccttttttttttgagataaagtcttgctctgttgtctaggctggagtgcagtggcacagtcatagatcactgcagggtaattttaaattttttgtagaggtagggtcttgttacattgcccaggctggtctcgaacccctagcttcaagagatcctcttgcctcggccttccaaagtgctgggattaaaagcaccagtcactgtgcctggcctttacacttttttattgtgtgtttgtatccgtccactaggctactattgcgatacccctagttcccagattacttggcccatagtaggagcttaatatttgtgtaatcaggggacatgaaattccttataagctcttatttaatagaattaacaaaatattttacttctagattttaaaatctaatttactaacatcatttgggaattttgttacatatacatgcctcccacacttttttttttaaaaaagagttcgtttatcacacacttgttttttaaactaatgatttgctttcaagtcagtgttgtcacacgtccaaggttttcctacattctggtcaatatttattctattgtggactgtacaaagagagcgtcatcagttgttcttttaacactgagacttgtcaatatgaactaggaaagaatgatgataaagaacaccgaaggtacaggaggactctgggtgaggcatagtgccatcagatcagaatcctgagtatttcatgcaactgaaaagcctctggcttcaataataactcatggggaaggaaagttgttccacacccaaagagatcatattttgtaacaagccaatgagatcaagatttgtttaggtcaatttcagagcaaacataggttatcagatgcatccttcaatatggtttactagaatctgaaaattgcatgcttcttttgaagaaaaggatggttaaaggatactgctatgatttttattctgaaattcatcacaatactgtatatgtttataaggaaatctgctatctggtcagtgaaaggaactatctttcagacaactaaattcatgtttgtttcatatgaccaaaaatgcagacagaagccggatagtaaagatgccaggcagagagaatacacttgaagtagttggaaactacttgggtttaaattattggttgaaatctactggggttcaaattccatccatgccactcactgtttgacattgatcaatttagctaactcctctaagtctcaatcttttcatccataaagcatttcttcatctataaaacagggaagagtaatgagaaaattcagataaagcagtcaacacacgttcataattatgttaatttacaactaacgtatcttgaatgcttaccatgggccaggcactgactgggctaagtgccttatgtatatttttttcttttttaatcattatgtgcagtaggtgttgtgattatatcctttttacaaatgaaataaaaggcaaagatgagggagccaggacccaaaccctctgccctgtggtgggccccaaagtctgcatttgaaattcttggctttcttgcatctttctgttgccatagagagcatcaccatcaccttttagataggaggtggggttcagatgatcttcaaggttgcttacataaatcttttcttgttgtcacatgcagacacacaaactctctctctctctctttctgagaggtcagcccattttcctgtctgctacaagttgtgccattttcagtattgttctaaaatcagattagtcacaatagatcctatagtgcttccattaccaatttgtacagtcagtctacaatattgcttataaaaatgttcttttggagccattgtgggtctctttgaacatttctgcaatgttgtctgtacagacagtacatccaagaagaatgaggatggggaatgacgtaattaagcctgttgggaagctctctctctaaggtgaactggagtgtcagatggagttacggtgcttctgaacaccattccccaaagctccattttggaatcttagatttaaaaggcactttagcaaatactgtaaaccttttctctcatgctgaattactttggtaatattcttcatagttatctccacttgctgtagttggagagggaagcacaatcttctgggaattttaactttatttctggaatctactaacagatagttcattcagccgtttttctttatgcaactttcattctctgatgtgagttctgcctttgaaagcagaacagaatagatatatattttattcatgaaaaactttaaaatttgaaggtaacagtcaaatttcactcatgaggcagggattgggtctcattttgtgctccattataaccatagcacctagcgctgtgtaggaaatatagttggtactcattaaatttcttgatgaatgactaaatgagttctctcttttctccactagagtgactgaaagaaagtattatatttctttgacatgtgaagcataaaatgtgaccattaactcttctcaaatgtgagctccatgtggtgaaggaccacatatcatatgtaagcaggtaaattcatgattgagtgaataaatcctgaatgctgctctagtagtggttgtaacgttttaccctgccacacttggccatgacttgttggagaaaaggtaaatatctgatttaatctgggccaatcaaattcctctcctgggtatttggaattaagacctatctctggggagatgagctgaaagttccaacactaaggctgaaagtgaggactagttaaagcctcatggaggctaacatttctaggagaaccaagagtaacaaagatgagagacacgtgacctcagggagaacatgaggtgggccatatggctgtccagatacctgatggctttccagcccgtggctccagtttccatgatggtcagctgttcttcatttctttgagatctctgaatccttacaataatcaccgtcccaccctgacagaaaaacagagaaacacacacatgtgctgttattgaaggttgcctatgttagttctgttcctaccactctataaaacagtttattcaatctaatataacactaattcttgactcatattctgcacacagataactaaaacacccagatcttttcacacaaactgcagtttaaccaattgtataatagaatttttggaaagtttgctcattcacccattcattcaacaacaatatattaagcaactactgtatgtgaatggactttttatagtttttactatttgtctgtcagttgtcactttttgctgctgcgaaggatgttgtcttttctttccatttacttattagcagtggaattgagtaatgatgagtaaaataaaagctcgtaagctctgaatgtgggcactacatgatgtttgtcatatctattttgagtgtggaaagaacattttgcctactgtctgtttccctcttagattctgggttgttgtaggtatagtaagtaaatattggatacttgaattgttatgtgtggttttatatatacatttatatgcatatatcttatataaatttaaatctaaatatatatacatagctaggaaaaaacaaagtaaggttgtaccagagtaaagaaaagttgaccatatttaaataaataaatgtgattacatttacagaccagcagatgtacttgggactgtcacctctgtgtatcttgaataaaactgaaggttaaacttgtcccttcattgggctttaaattaaaaaatttttttttaaaattatcttaggtacataataggtatatatatatttatgggcacatgtgatattttgatacaggctacaatgtgtaacacctcagggtaattggggtatgcatcacttcaagcatgtattatttctttgtgttaggaacattccaattccactctttttctttctttctttctttccttttctttctttcttttttcgtctttcttttctgtttttcttttgctctccttccttcctttctttctctctttctttccttctctctttctttcatctttctttcttctccttccttccttcctttctctttctttctttgtttctttctttcctctttctttccctccctctctccctccctctctcttcctttctttccttctttctttctctttctttctttctttctttccctccctccctctccttccttccttccttcctttctttctttctttctttctttctttctttctttctttctttctttctttctctctctctctctctctttctttctttctttctttctttctttcttttctttctctttcctctttctttccctccctctctctctctctctttctctttctctttttttctttcttcttcttcttcttttttttaacaggatctcattccatcaccctggctggagtacagtggcatgattatggctcactacagcattgaatcaacctcctgggctggagcaatcctcccatctcagcctcccaagtagctgggactacaggtgcacaccactgtacctggctaatttttgtattttttgagacagggttttcttatgttgcccaggttggtgtcaaactcctgagctcaagcggtctgcttgcctcagcctcccaaagtgctaggattacaggtgtgagccaccatgcccagcctagttattaaaaaatatacaattaattattgttgactatagtcaccctgttgtgctaccaaatactagatcttattcattctatctaagtttatttttgcacctattactcatttccccaccccctaccactcccaccctgctatccttcccagcctctgctaatcatccttctactctctatctcaatgggttcaattgctttaacttttagctcccacatgtgagtgagaacatgagaagtttgtctttctgtgcctggcttatttcaccgaatataatgtcttccagtttcatctatgttgttgcaaatgacaggattttgttcttttttattgctgaataatacttcattatgtatatgtaccacattttctttatttgttcatctgttgatggacacttaggttgataccaaatcttggctactatgaatagtgctgcaataagcatgtgagtgcagatatctcttcaacatactgatttcctttcttttggatatttacctagcagtaggattgctagatcatgtagtagttctatagttttccaaggaactttcatattgtttgccatagtggctgtactaattgacattcccatcaacagtgtatagggactccccttttgccacatcctcaccagcatttgttactgtctgtcttttggataaaaacctttttaactacagtggaatggtatctcattgcacttttgatttgcattactctgatgatcaatgttgttgagtatttttttatatacctgttggccatctgtatgtcttcatttgggaaatttttattacagatgttttgcccatttgtaaattggattatttgattttcctcctatagagttgtttgagttacttatatatttgggtattaatcccttgtcagatggatagtttgcaaatattttctcccattctgtgggttgtcacttcactttgttgtttctcttgccacatagaagctttttagcttgatgtgatctcatttttccattttcactttggttgcctgatcttttgaggtattactcaagaaatagttgccaagaccaatgtcctggagaatttccccacattcattgggcttttagttaatctcctccatcccactctttacttcaaccaaatcaaccaacatttaaacactcattttcaagctgcttttctgtaattccaatttgttgggatttccctggcccctatcacttgtgagttcagttttatgggtgagaggggacttgataaagaaggcacaatttttttttcataccccaaatgccagggcaataagccaagtttatacttgatgcgtcctccattttcattagcaatagaaacagtatagtgctactaaggtcaggggtttgaaccctggctctgctacctttcaggtatgcaatctttcggaaattctcttaatttctttgagcttcagtttcttatttctaaaagataattaatactaccagattatagtgattactgtgagggctaaaagacttaatgactacaaaatactcagcacagtccctggcacctagtaaatatccaataggtcatcgcttccagtgttgtttttattactgggggatgctgctgtccacgtaccaaaagagaactgtaaaaaacagcttgcaaagtaagagaaggaagggaagtgttttaatgtgtaatggcacattacattttctggtaatcccaatgttactttaaaaaatcttaaaaatttgacagtggtagcacagtttatttagagccttgtcttggggataatatgaatttttctgggaggattatacataccaggcttcttttcctgtgagagcaaattcccttggacttcttaaatttctgttttcttggtgtagagactgttttctctaattcactgtgggttttctgaacttttccccgttcaatcctagtggtttcaatctgggctgttgtaagaatggcttttagaggaaagagatattagaaatgacagcttttcaagatgaaaaaggtgccttaagactccaaataattctgttataatttttcatttcttcttaagcattttacggaaaatggcccatcttgagtatttttatccttgggcctaaaaacaagttcttgttagccagcggctaggcctttgaagctgcagtgcttgtattttggtctccaccctcttggatgacttgtggaagtatcttccaagctccttcctgattgcgtttccccagtttcaactgagaaggagaaagaactgtgactatatcgatgatttcagaagtgtaaacaacttatcatgtttgtggaacactggataaccctcacaggggatgctgaggaatctggatgcccatggatttttaataatgggagagaatgctatttggaaatcagaggattgaatggatcttggattggatcttgaacacaagactccaactccaaaataaaaactgtgggctgaacaatatgcaattatatatgtggttgtataatgtgcttccatttccttactacaccctaacaaagtctttgttgctggcagggagatcagcctggccttaagaatctgcttctgctagttcagatgggaagtgattagtgtttgtcatatgcttaaaatcctttatgataaatggcacaggcagttattttcgtatgtacacagaatacatcacgaagatcaaagaactctaaccagaggccccatttccagctaacaggtctgagtctatttgggtttagattgtaaaacttcaggaaaatctaacgagcttatgttaccctgaacaagaaatgagatttcttagtaatacccactattgctaagtgactattaaggtagccaaatatcattctttacctatgctttagtttaaaatttcaaagagaggtatggtcagatttatccatgtgttcaatatctaagattttgtcttttaagggaaagcgctttctcctctgattttctgcctaggggaacctcaaggtatctatggcgtaaaagccaaacgtctgttttagcaaatagccagacattacagtggggagtatgtagatcatcttgattattttaccaaccatcagggcagagatggaaacattgtgagctgggaacattgagtttcatttttaccagtatccttgccttttagaaggtatctgttaggagtacttaaagtaaaatggattgtttctaaaattgtgagatgagctatagggcagcttttctacttaattagcttttgtcgttttgtgtttctgttgagaaaagctgagtgggacccaagctatccattcactgcagcatccaagttgcttagaatacttttagaatttagctaagaatactgtttctacccattccaaaaagtatagctagataatttgtaaattcaatttcatgttaattataaacaatttcttgtgctcctttctgtactgtgggtatttaccgagttcaaccatagcttatacctcatatgagaaagattaacaataaaaaatcttttctgtgcacaagtgggggtaaaagactcattatcttctctactttacccccagtgcacccaggctccaaactccagaatcatatattctttctccacttccaatctaatattaaatcatgttgatttttgtctcaacaatattttttgtttgtttttaatttttcattaccgttgtcattatcttagcttaggctctcttctttcatgaattaagcttttccttattatgcgtgaagttattaattgaacaaacacttattattcacctactaggtactaggtattagtaggtgggaataacagcaataatcaagataaaaccttatgttgggtacaatcttcttactcaagtcactgaaaagcctttaaataggtcctttatgtattttctctctctactccaaaacattaaaaacataattgcaaaactagttttatgtaatgcttcattatggcctgagatatcctaatagtgtggccatagtcttctttctagggttacttcatattattttcttaattttcccacattttagataaatgcatgtgttaggtatacgttaccatgattcctggcctttcgtatagcttcagtggttatgttattcttgttgtatgggaatgctttcctctccatctcatatgttaaaattcatccatcttttttttttttccaaaaaagtgaatatttatttatttattttaaatttaatttaattttaagttctgggatacatgtgcaggacgtgcagttttgttatataggtaaatctgtgccgcggtggtttgctgcccctatcaacccatcagctaggtattaatcgtccatcttttaaagctcactttaacttccacttttccatgaagcttttcctgatcttcctcctccttccatcctggaaaatccttgcagtttgttctgcagcatcacacctagtgtctagccatccctactttgtccctacactttttgaattgcttaccaacaacttagagagggagctagagattgttgctggccattgctccttgttttttctcttatttcaggtacttttttgtattttgtcgattcttcccggacgctgccagttttttgcccatctctgttctatttttactgcaactccacaccagttctggttctttggttttcctacttgttctcttagcatttgataattgattctccacaatagattttgaaataacttcttggatttttttctaaattaggtattacagggtaaggtcttgcttttgctccatattccagaatccaatcttgcctggggccaaacccatgccaggctttccctcttttttctcccaaggggatggggtggtcagtcaattatctttatagatatttttttcattaaaattaaaaaattcttaattgtggcaaaagacccataacataaaatttaccatcttaaccatatagttcaatagtgttaagtatattcacattgttgtacaaccaatctgcagaacttttttcatcttgagatctttctttacatttttaagcagtcatttatttacttgttttctcttgtatatcggaccaaaattttcttgaggacaaggctgtgttactgacttgtgtatcttttagtcaaactacctggtataatcaattaataattgtttcatgaatttgaattgaccctggcttccctgatgttctaatctaatgtgcactccacaggaaccctattctgtcaacagacctggattctgatatcaatgaaatagtgcacatcttgaaaacatttccactaatgtaaacaagaaagatgaaagtcaacagagtaagaagttggcacaaggagttgattccgtctgctttggaggttttgctttttggcttaactgttacatggtgctattgtttttgttctgggaggtgggacagtgctgctttatttattttaagaaggcagcaagccaggaacacataattgaaaggaaatttctgtactggcgtattattttttcaactaagatggcaataaataacttgcaacttccttttgtttgaagtggttgatatgaactagagtttaatcttatacactcataaaattgcacatggcaaatactttcacaattgctatttaaaaataggcctatatacttacacactactaataatgtgtccctttacatcatagccttacagcattaggggaaagtcattatctcccctcctcctatatctccaaatgttctctgagggcttacgtctcttatagtcacctcttgttctgacttctggattctcaaagttattttcctcacctgcattttgcttcttttggctgttctctctcctccactagcatgtaccccaaagcatcaatttttctttggtttctcaaaatatcacttaaggcagttgtctgtatgagatatttaacagagaaaaagctatcacaaaggtttactttatatcataatgctacagaaaaatttaaattggacttaggcacaagttcttaaactttcttagccactgtaaatattttatagactgacttctctcttcaatttctagggtctcctgccatatcactgatttctttccattcccttattgctaatctttggcgcctaatctcctgctaggtggttctggaaatatcacaacccttccaaacttaatatttctctagtctctatctatcatgacctggggctatgattccatagtcataatggcatttttttcactaaaaagataattatctcaaaatgagtcaaagacttaaatgtaagatctgaaactatgaagctatgagaagaaaacataagggaaatgctttaggatgttggtctgggcaaagattttatcaataagaccttaaaaaaacaagtagtaaaagcaaaaacagacaaattggagggttatatcaagtgaaaaagtttctgtacagcaaaggaaacaatcaacacagtgaagagacaatctacagaataggagaaaatgtttgcaacctatacatccgataaggggtcaatatccaaaatatacaaggagctgaaacaactcaatagcaaaaaaagccaataacccaaaagacctaaatagacatttctgaaaagaagatgtacagatggccaacagatggaagaaaaatgctaatatctctaatcatcagggaaatgcaaatcaaaaccatgataacatattacctcactcctgttagaatgactgttgtcaaaaagacaaaaggcaacaaggtttggtaactatgtgaagaaatgggaacccttaacacactgttggcaggaatttaaattagtgcagccattatagaaaacagtagggaggtgtcctaaaatattaaaactggaactatcatatgatccagcaatctcactactggatatttatccaaaggaaaggaaattagtatgttgaaaatatatctgcactcccatgtttattgcagtgctattcacaatagacaagatatggaatcaacctaagtgtccatcaacagatgaattgataaagaaaatgtggtatatgtatacatgagggactattattcaaccataaaaaagaaagaaatcctgtcatttgtggcaacatgaatgagcttggaggatatatgttaagtggaataagccaagcacagaacgacacacaccacaagatctcactcatatatggtagctaaaaaagttgatctcatagaattagagagtagaatagtggttatcagagcttgggatgggtaggggagtggaggatagggagacattggttaacaagtacagaattatggttaattaggaagaataagttcaagtgttctatagcacagtatgaagactatagttaacaacaatttattgtgtatttcaaaacagttagaagagagaattttgaatgttccaaatataaagaaatgataaatgagatgatggatatcacaattaccctgatatgatcattacacattgtatatacttgtatcaaaatatcagatgtatctcataaatatatacaattattatgtgtcaatcaattttttttaaaaagccacaataaagaaaatactttaccccaaagataattatctccttaagagaaaatttgttttaataaaaacttttattttagggccaggtatggtggcacatgcttataatcccaggactttgggaggccaaggcggtgggatggcttgagctgaggagttcgagaccagcctgggcaagttggcgaaaccctgtctctacaaaagaaaaccaaaaacaatagccaggtgtggttgcacgtgcctgtagtccctgccagttgggaggctgaggttggaggatggcttgagcttgggaggttgaggctgtagtgatcaaaccactgcattccagccttggccacagagtaagaccctctctcagaaaacaaaaacaaaaacaaaaaacacttttactttagaattgttttagatctaaagaaaaattacaaagattacaagaaagttcatgtgtactgtacactcagttttccctattattaacaatcttatatcctttctatcacattcctgacaaatagtaacatctgcttaaatacttccagtgactggcaacccagtatgtcttaatgagccccattgccagataactctagagcagtgtgacttgagatgtagtcctaggaccagcagcagcatccatacaacctgggagctgcttagaaatgaagagtctcagatctcattccagacctgaattagaatctacattcaacaggatctccaggtgattcatgtgcacatccaaatttgaaaagtattgctctagtgttcatatacatatatatatatatacacacacacacatatatgtatttttcccaaaagatggcaaccaaggtcttgcaatcacattgccccattcattaatttatctgtgtattcacaaaacatttcttaagagcatattatgtgatttaatttgaattttttttagaaaaaattatccctaccctaaaaattttcacattccagtcctgtcatgcaaaaggtagttgaatgaacagggtaatttttattcagaaaagagaggactaagtttgaagagctgaccctgaaagaaaagcaaattcagaaaaattcaggaaaagcttattctttataatatccattctttggtctcaactgggtttcttttaactttgtgtgcatctagtctgtttcttattccacatgacagctgttcagataatcgaaggcagaatccaagtttttacttggctggactcttcctagattgttcaaggctagacacccttcctgtcttgagctgtccaatagtaactttgtcctgcaggattgcttttacatgaatgtcagggtctgcaactgaaagattgatgaaagggaaggcaggctacctcatccctttgccctaatcgtaggtggaatgggaatgagagagaaagaacattatgagtgggttgtttatacactcaagcctcaggacatataaacaggatgaaaccacttatctcacccttactgactgttttctacagattgtggcattttcctgtatttgctcttctctcaggcacagctcttcaaacttagtcttctcttttctgaacaaaaattaccctgttcattcaactgccttttgcatggcaggactggaatgtgaaatttttgagagtagggataaggtcttatttaaaaaaaattcaagttaaatcagtgcttagcaatcatatgttcttaagaaatgttttgtgaatacacagatgaataaatgaatggggcaatgtgattgcaagaccttgcttgacatcttttgaaaacatcttagtgcgttactgtcccctgtccctgataaaatgtggcatcatgaattgagcagaatactccatatggtgtatgaatattgtaggatagtggtataattaatttccctaatttagaatttactttttgatgagttcagcctaataaagatgaaagagaatatgacccccatcattatggcggtctgtgtttagaaggccaaaatagacccctacaacgttgacttagcttatcagtaaggtagaatttgctttaaatggcaattttgagatttttcttgaggagctgaaaggctttacaagattaggaaggtcccccactggctaaataactgctgagggctttcccccttttctttccatcattctttgcttccttctttctctaactgcattgcaagccacttccctcacctgaaattactttttttttctgtaaatactattacaaaaaaaactgtaaaagagagtggtaaatgcagagtagatggataaacataatgacccaagaatgacgatggcgaaatatgacattttctggtgttgggtataataatgggtagagacggaggaatggaaaaaatagactagctcttttgccatggcaacaataagtgcatttattatataaacagaagaaggaaaggcatttatttggtccttgttccttttccctcctaattctcagtttctcctgttttttgtttagtttagattctcaaaagctggaagccagttaccttgcaaagacattgatcatttctttaaatacccaggtatatgcttgactccataatattttactgtttaaaaataaataaatgaatgttttctttaaaagctgattgaagaatagctcaagtcctcttttatcaaacatagaagaatgctctctttaaaagtttgcatctttatcttgagtcaataaccttacaagcaggaatcaaggcacagttttctttccaattgagtatcattagaacattgtctggttcattcatgtatgtctcaagggtaaatggccatcagcgagtctctgacagagaaatactaagtgatcctagtctaaaaggaaagccaatgtgcacttgagtagcagcattcactttacagagagttcaaagggcactttactatgtctaaatgccctttatgttctctggtgccagcaggaaaaggaaagctattaaatgcttataagagtgagacactgtattttaggacataggaaagatggggggaaatagatggcaaactaattgtaagtcaagaatatagcgagtttcccaaagagaattcctgcattttcaaaatattcttcttttttaagggtgtgtggggtgggtggcgtaaaatggaaaaatatgtaaagcctcatttaatatgttttctgaataatccaaaattttcaacatgagctgtaggttgggttgggttggggcaaatcgatgaggcaggagcctaaaattataccaaatttctggatataaatatcagccccaccattattagatatgtgaattccgggaagatacttaatgtctttgagtcccagccttcacgagtatacaattaggaggataaattccaccacggagaaatgttgtcaggtttagtgtagtaacatatataatgcagtcagtagggggcctggcatgtgttagggcttcaaaaataagaaccacatttccattcccactgtcccttaggatcaaatctgcagacatcttctttaggcatttaatacctcccagtattccttgtctacagctcatcgatgtttgtttaccccaagtatttgtataaaattttacacacaaccttcctaacttacatttaagactgtgccatttctgattttctagaaaagagttcagattccttatcacagcatttaaggacatccatgttctgaccctgacctagttgggctgtgtccccctccaactctcatgttaaattgtaatccccacatgtcaggggagggagcttgtgggaagtgattgggtcatggggttggatttcctgcatgctgctctcataatagtgaatgagttctcatgagatctgatggcttaaaaatatggcacttcctccattgctctccctttcctggtgccatgtaagatgcgccttgcttccccttcaccttctgccatgattgtaagtttcctgaggcctcctcagccatgtggaactgtgagtccattacacctcttttctttataaataacccagtctcaggtagttatttataacagtgtgaaaacagactaatacagacccccccaacaaataacatctcctttataaagaccctatgttatattggccagttcctcaatatgttctgaaatatttttcctccataatttcattcacttttcccctgactataatacagttgacccttaaacaacatgagtttgaacagtgcagtttcacttatacacagattttcctctgcatctgtcaccctgagagggtaagattaagcctaccttttcctcttccccctcagcctactcaacatgaagacagtgaggataagacctttatgatgatccatttccacttaatgaatagtaaatatattttgtctaacttacgattttctgaataacattttcttttctctagtttaacttactgtaagaatatagtatataatacatgtagcatacaaaatatgtgttaattgacaacattatttgtaaggcttttggttaacagtgggtaattagtaattaagtgcttggggagtcaaaagttatatgcaagtttctactgcacgaggtgttggcacccttaacccccacgttgttcaactataccttccatttctgcactttgaaaggttattctttaaattccagcatcaatgtcatgccctctatgaagtcttcctgaatactttggacagaagtgatttctgttcttctggaattgcctagtaattcctcataatattaataataaagttctatacattcgtataatgctcaaatcagtggacacttcctgatttagatatgatttaacctgcatagagtagttgacaatacaagtgactttccatccattttcctcctctgacttctgaaacattctggttttcttactacctatatggcttctctttctcagtcttctcagtgaatttattcatttcctaggactgcctttaaaacatactacaaactgggtggcttaaaacaacatgaatttattatctcagaattctggaggctagaagttcaaaatcaaggtgttgggagggccatactccctctgaagcctttaggggagaatatcccttgcctcttttagcttttggtagcctcaggcattccttgttctgtggcagcataactctaatctctgcctccattttcatgtggctgtcttccctctgtcactggtgtccttaaaagaagagaaacagacacaaggaggaaaaccttgtgtctgtttctcttcttataaggacactggtcatattggattaggtctcatcctaatcaacaatgacctctcatcctaatttgattacatctgcatagagcctattttcaaataaggtcacattcacaggtactaggggttaggacttgaacacatcttttggggggatacaattcaacccaaaacagtagcgttcccatttcttgcctctcccttaaatattaggtttcttcagagtgatttcttaggctcccttctctcagcaattatttaaataatgaggaaaactaaaatttggcagtgtcaaatatgtgaatcataaaacaggtgtaacacaagggtccaaggaggatattcgagatacagtgttctgatgcgtcctccttgaatgtgactatattcccttagcttttcctttagaaccacacttgaggtggtggagcctttaaaaatatttaacaaatgttacttttgaagaagagagtaagagtatttaataaggtaacattggcaatgtgaaagttatatgagatacataatcagtggtcctcatctttgtctccttcttaaagaaaacaagaggaaatgattgaccactggaagggtaatttttgtgggctgaattgtacattccccaaatttctatgttgaaaccccaacgcccagtacatcagaaggtaactgtatttggaggtagggccttgaaagagacaattaaattgaaatgaggctattaaggtgaaccctaatgtaatatgtcttatgaagtcatcataagacagggaaatttggacataccaagagactccaggtatgtgtgcacccagaggaaagaccatttgagaaaatgaccatctgtaaaccaaggagagaggttttaggagaaaccaagcctgctggcaccttgatcttggactttcagcccagaactgtaaaaaaacacatttctgatgtttaagccacccagactggcattttttttttatggcagcttagcaaacgaatacagcaatttttagttactgatttagtgactagtgtggtccagatgctattctgggtgctgacgatatagcttccctgtggagctgatgttctagcggatggagaaagggaataacaataaataagtaaaatatatgtcagatcagactaagtgctacagagaaaagaagtcagagaaatcatcatatagaaagttgcaattttatagttatgaagccttcattgtgaggctgaaattttaacaaatatctgaataagatgaggaagaggcagaggatcccaggtttaggaagtagcaagttcaaagaccctgatttgggattgtgtctgacatgttcaagagacaacatcaagaagccagtggggctgaaatgtatagagcctggggggagagtaacatgtcagagagaatgggggtgggggagctatggagctactggggactaacttgtagagaaaaccagtccccagaatgaagttaatacaaaaagaagggtgagcaggcaaaatgggggagggtatggatgagggagggagagagaaagagagagaaagagacagagagacaaagagaaagatgccagtctgaaaaggctacacactgtatgatttcattatttataggacattctggaaaggcaaaactatggaggcaacaaataaatcagacattactggggtttggggagagaggaaggttgaacaggtgaagcacaaaggatactctttgtaagtgatgaaaccattctgcatgataccataatggtgggtactcaacgccatgcatttatcaaaacccatagaactttacagtacagagtgaaacttaatgtatgaaaattgtaaaaaaaattatttctgaggtcagagggtcacagggtggaatatagaacatgactaaacaattaacaatgctacaaacatatgataaaacctcactgaagggactggcagaaaaagttgctagcctgaataactttagaaatgagcagagattgtaagactaaagggaaaaataattgtatgtaagcacggtaatctagttgataaagtctcccatgggggaacaggttaacaattctgaaaccatcatacatctaatctggaactgaagaattaagtaaatggaatgtggatagcaggaagcacgagccaggtttctcactgttgaagtgggagcttacaggaaagcatggggagaaggcaagaatgattcatatggttatggattagagttagagacatcagtatgaactcatgcttacattattataggtacagacgtttacatatagaaatatttatagatacgtatatatactgaagttagctacacacacacacacacacacacacacacacacacattttgctctgtcagctgaagaggtcaagatacaaggatacacctaacaagtcagatctttgtttctaatactatttgttccaataaaaggaaccagggatccttagagagacggctgattctcaggaagcatacaatataagtctggagcatgttgtagtttcttaaaagaaagaagtacttaatacccacaatgatggagcacatcaaagggagactagagccaatgtaagcagttcctaatggcctacgctgggacgatttgagcaataagataaataaggtagcaatggattatgattcaggtatatatacaataaatattcctgtctacactgacataaataaacagtcgagtaagtaaacaaatagggaacaagatacatctcctgtgcaggagaatttcaaatagtttgtgaagctcttccatcctcaaggaggtagaacataactcctactctgtaagcatggatcgtgcatagtgatttccttccaaagagtaccatatggaaagcttagaaaagagtaactttaaagggtgaaacctgataaacactacctcagccaggtgatcaaggtcaatattaaagtggtaggtcatgttgatagtatgtactcttgtatgatgcaatggaaatgacacttaacttctgtggtcttcctctgcatgtaacaaacatcacactgcaatcctgagaaaagcattaagcaaatcacaattgaggggcattgtacaaaatatcagtacttcttaaaactgtcaaggccatcaaaaacaagaaaagtctgagaagttgtcatagccaagagcagtctacggtggcatgcgactgcaagtaatgcagcaccctggttgggatactggaacagaaaaatagtgtgaggttaataactactaaaatatgaataaagtatggacattaattaaaaattatgtaccaatattggttcattggttatgaccaatgcacctcacttatataggatagaaataataggggagattgggtgtgaagtatatgggaattctactatctttatcacttttctgagcatctaaatcttttaaaataaataaaaagtttattttaaaaaatctcattccaagttttaccccattccaattaaatcagaatttctagggtgtgagaagggatcagtattttttaaacatctcaagtgctgtcaacgtgcagcactggaaacctctgtagtagaagtccctgagctgtggtagctgttatattttggtactccttaattcatacaaaatgtcctgagctaaatgaaaatgttgtgtgttgcctccattttgtacctatgtgaagtcaaaattttaattatgagtatgataaaaataaagtactggaacatgttgcccatttgagcaccacttgatgttacactattggatattgagctcctaactgacaaatgtatcaagcatataattacaagcaatattacatcttaaaatgtctcgtaattttcctccaattgaaatgaaaaaaagaaaaaaggatatgacatgcatactctttcctctgtctgatccctatgctgtctgatcccacattaatatgctttggtggattccaccacgattccatttttctgccgttttttgaccttgtttgtactccaggaggctgactctatggactgcaatcctcaggcctccttgctctctgatttccagttaggtttaggcaagatggaggagacaggtatcatcgttttaacccaagtctttcccttcttcatcatggttctggcagtggctgcgtttgttgcaactccagctcccaccccctctggctcacacttggctctggaaacacagttgccttttctcaccccttcaaactaagagggagtaatggtttcctgctgttgctagtctctaggtaactcaccatccctttttttttttttaactttactaatatctctgtaaattgtctctttactgaaatattttaactttttgagggtgtcatctgtttcctgataggctttctgactgatgcaattagtctatcattgtcaattctctggaaatgatgactctttctcccccacctctttttaagccaagataacgtcttgcctacttttctggccttaaaaatgttctttgttttgtgaaacaatgttgataatagcgaacattattttccctaaggccttatttggcaaaagtaagagctggcaaacatgctggttccccacatatttttgaaatttcattttcaaaactggagtctgggaaccattgacctaagtgagaattcaactttgaaacattaaggggattcagctatcattcactttaccacaagaatcttacaaatctgatgaaagttgccaatggctgtcacagtagacactcaagttaccgggattcagttgtttgcataacatattgtcccactcctggtaaagagggaagtagtatctgggaaaagtaggaggatcgataaaaattgaagtggttatttttgtatccactgacacagaaggagattttacagcacactatgttttgagtctcaaaaacacacgtattgcatttcactggagatctgatgggggaagggatggagaagaggaaaagagtgcatctgaaagttttagcaagaagttgcaaggactcttcaattaagtatggatgcagtgtgacagtgacttagaacttccatgttcacagatccagcgctgttaactttatactagtctaagtcttttttcttataaataattacaaaagctcattaagcaatacagactgggaactttttttttcctccaaattctagtttatttttaattgacaaatagtaattttataaatttatgggggtacaatatgatattctgatacatgtatactctgtgggatgatcaaatcaggctaattagcattatcagtcatttcaaatatttatcatttctttgtggtgagaacacttaaaatcctctcttagagattttgaaatatgcaatacattattattgcagtcagtatgctgtccaatagaacaccagaacttattcctaactgaaacttcgtatcagctgaacaatatctctcctttccctgtccacactctcacccactgccagcctttggttaccacctttttactctctgtttctatgagtttgactttttaagattccacataaaagtggggtatttgtctagccacgcctggcttatttcattttttttgagaccaagtcttgctctatcgcccaggctggagtgcagtggcgcaatcttggctcactgcaacctctgcctcctgggttcaaacgatcctcctgcttcagcctcccaagtagctgggattacaggcacccgccaccacgcctggttaatttttgtacttttagtagagacgggatttcaccatcttggccagggtagtctcgaactgctgaagtcaagtgatctgtctgcctcagcctcccaaagtgctgggatgataggtgtgagccaccatgcccaactgcttatttcacttaacataatgccctctaggttcattcatattgtcccaaatgacagagttttttaaaatgctgaatagtattccattgtgtgtgtgtgtgtgtgtgtgtatatatatatatacacatatatatgtatatatgtgtgtgtatatatatatacatatatatgtgtatatatatgtgtgtatatatatatatacacacacacacaacattaaaaaaaatccattcatttgttgatgaacacttaggttgtttccatatcttggctactgtgaataatgctgcaatgagcataggagtgcagacatctctttgacatatgatttcaattcttttgcatatacccagaggtagaatttctagatcataaggtaaatctatttttagttttcatatttttaaaacttcatactgtttttcaaaattgttttcaaaattgctgcacttaattgtaataccaccaacagtgtacaagggttccttctccacatacttgctaatacttatctttcgaaatagctgatctaacaggcatgaggtgatatcccattgtagttttaatatgcatttctctgataattagaaatgttgagcattttggtaaatgtatgtcttggccatttgtatgtcttctcctgagaaatgtctatggaaattctttgccagttttttcattgggttatttgttttcttgttattgagtagtttgagtttcttgtgtattttagatattagcctcttatccaatgtataacttaaaatactttttcccagtttatgggttgtttctttactcttttgagattttcctttattgtgcagagtttttagtttgacgcaatcccatctgtctatttttgcttttattgcctgtggttttggcattatagccaagaaatcattccccagaccaatgtcgtgaaacttttccctaggttttcttctagtagttttatagtttcaggtcctatgtttaagtctttaatccattttgagttgaatcttctataagggataaggtaatggtacattttgattattcttcatgtggatatccagttttcacaatatgatttattgaagagatgtcctttccccattgtgtgtgcttggtatctttgtcaaaaatcaattgactgtagatgtataggtttattcctgagctctctgtgctattctgttggtctatgtgtctgtttttatgccagtaccatgttgttttgattactataatttagtaatatattttgacatctgatagtgtgatgaccctggctttgacttttctttctggtcaagattgctttggctatttggggtcttttggacttcatacaaattttagaattttaaaaaatttctgtgaagaatgacattagcattttggtagggattgcaatgactctgtagattgctttgagtaatatggatgtttaaaaaatataaattcttccactccatgagcgcacaatatctttccatttatttgtataattttcaatttatttcatcaatgttttatagtttttggtatacagatcttccacttcctcggttaaattactcctaagtattttattttttttgatactaatgtaaatgggattgttttcctcgtttctttttcagttagtttatggtttgtctataggaatgctactgatttttgtaggttaattttgtatcctgcaactttactgagttagtttatgagttttattaatttttttggttaggtcttcaggattttccatctataagagcatgtcatcagcaaaaagagataattttacttctttctttccaatttggatgccttttacttcttttctcttgcctaattgctctggctaggacttcccgtactatgttgcataggagcggtgagagtggatatccttgccctgtttctgatcttagagaaaaatcttcagcgttcacaattgattgtgacattagctatgggtttggtgtgtatggcctttattgtgttgaggaacattctttctactctgaatttgttgagcgtttttatcatgaaaggatgtttaattctgtcaaacccttttctgcatctattatgatgatcatatgttttttgtccttcattctgtgggcatttttgtttattgatgttttcaattgaatgtgttttataatgtcaagtacatcaaatttagaacagaaagaaaaattttacagtatcttatgcttggatagggtacaagaaacagggcgtatgtttatcacagtttagtctccttgactttaaaattcttctgtgttgggaatatgaggtccttctttgttatgttatgttatatttaatattgagtgaaaaggaattaacacacaattgttttttaaatttttatctgtttaaaaacttcctttgtttttattctcattactttctgttttctgactttaccttaagaaaaacacagagcaatcttttccaattcatttttttcctttgtatacatttaaaagggagttttaaaagggctggatagcttggtcataaagaggagtttttctttaccattacaatccaaacacaagctgtcgtccacatggcatggaataattagagaactcaagaattttctttctcttgacatttctactacttaaacaaaataatggaaactgatttatttcttcctttatctggtgatggaaaccaccctatggaaaacctgggaatggtcagcactatgttttccactatgtggagagagttggtcagtaacaggaaatgaaactgactcatatggagaagcagagacaagagataggattactggtgattttagggttcccgaagaccatctacatatctcccattcctgttgcctgactgttgaaatttttctgattccatgaaataaaaattctcctttttggctaagctattattttgggtgggattctatagggtgcaagtggcaaaaatgtagctacaattagcttaagtaaaaagagggaattgaggagagatccttaggtaactcacagaattaaaggaagactggatcaattgagctttagcaaggcagaagcaagcactttagaagggactcagaacctagggccaagacttaggtaatgcagcagcacacttccctcacgtggcctttgctccttctttctggacactgtgctctctgtggaggaatactttgattaccttatgtgtttccaccagtactttatttaccccataaccctcatctattcattggcatttttatgtgcattgccacagaaggagacgttacagcacactgtgtttttgaatctcaaaagcgcagactaggattgaattcaggctctgaagattaagagagctatcccacgttagcgggaaaaggaaagccaaaagggaaagaaagacagctgagttggtaccactgggaaaggggccctgcacctagtagatgatactgtcactaggcaacacacagggggcatttgtgtttattgttttaaattgaatatgttttataatgtcaagtacagccaatctgtaattgaaacaaaaactttgaagtactctgtgaaattcatctctgaggactgaaccctctgggggaggagcaatagacactcccactgcaccccaccctgggtgacagagtgagaccctgtctcacaaaaaaaacaaaacaaaacacttattttagaattgttttagagctaaagaaaaattgcaaagatagtacagaaagttctcgtgtactgtacacccagtttcccctattattaacaatcttacattctttctgtcacatttctgacaaacagtaacatctgcttaaatacttccagtgactggcaacccagtgtgtcctaaagagccccattgtcagatgattctagagcagtgtgactagagatgtggttctaggaccaccaacatccacacaacctggaatctggttagaaatgaagagtctcagaccccaatccagacctgaatcagaatctacattcaataggatctccaggtaattcatgtggacatccaaatttgaaaagtattgctctagtgttcatatatatatgtatacacacacacacacacacacacacacacacacacacacgtgtatttttcccaaaagatggcaaccaaggtcttgcaatcacattgccccattcattaattcatctgtgtattcacaaaacattttttaagagcatatgtgctaagaactgatttaacttgaaactttttttagaagtaagatcttattcctacactaaaaaatttcacattccaattctgccatgcaagaggtagttgaatgaacagggtaatttttgttcagaaaagagaggactaagtttgaagagttgtccctgagagactagcaaatgcaggaaaatgccacaatctgtagaaaactatcacaacagctgagagaataacagagtagaaagagctactcccctttattccagatagagctaggggtggagagaaaacccctctgcaactcgggttagtgtattagtctgctctctaattgctgtaaagaaatacctgagactgggtaatttatagagaaaagaggttaaattgactcatggttctgcagactgtacaggaagcgtagtgacttctgcttctggggacgcctcaggaagcttccaatcatggcagaaggcaaacggggagcaagctgtttcacatggtgggagcaggaacaagagggtgaagggggagatgctacacacttttaaaccagcagatgttgtgagaactcactcattacagcgaggacagcaaagacccatgagagatttgcccccatgacccagacacctcccactcactaccacaagaacagcaccaaggggatggtgctaaactattcaatagaaactgcccccatgatccaatcacctccctccaggccccacctccaacactggggattacaactggacatgagatttgggcggggacacaaatctaaaccctatcaggtagcatggggcagtatgtaggaatagctgcgtgatgaaggtcctcagatctgaagcagcctcatggagttccaacttgcctcagcaaggtgtaggagcagtagactaattcctgagcctagcatagtcatgttgctgcgccttcacccaggtgcccagatcccagaatggtgctggagaacacttttcaatgcacttcagcagggcatcaggggccaggaaggagagtcattgatcctgaagtgacctttggcatggatccatgtagatcaacacttgaaaaacagacaggatgaggagggagatgccaaattcaacaaatgaccaaatatcagaacgtttgcttattctggccctgccttccttctgtcccgtgtcccttgcttaaaattagatgtgaactgaaggaaaagaaatgggagcctgaattcattgaggctgagtttctatcatctagtaaaacaggatctcattgaagaaattaagttcagttgcatgaaaaaattaagccacgctttctgatcatctgcttatgtgacctgaaatttaaattttgtcttctacttcagactgtgttcttatatgcggcagagaacctggctactagcagctgcagcttgcaactgcatatattcaccatctggaaggaaaaagctcttcacctccttgactcttacagcatggtgccctcatccaagctcctgtttgaaaagcttcagagaacaatcttgactggcctttttctagtcatgttctcatcctatttaccaattacagagttaggaatgtgagatactatgatggttccagcttggagctcttgctatgtggcctctgaagccagcatgctgtaactggtagctctgcctagatccatgtgcttggtgttagggaaggaacagtttctctgccaaaagggaataaatactttgatcagaggtagaggaggaggggaacaggctgataaaaacactgaactgcattatctaccttgtgtgcctatactaataaaggtttccttaatgtcacattgatatgatcaaagcaagaaactaaaattatgaacaagatactgactatgtcttttatgactcattagttcagaattagaacctgggctctggaaaaaaaataacacagccatttcattgtaaatttgtaaactttgcagcagtttaaccatgagagttggcatataggtcagggaataggcctggtgggttttgctgtcaaatcccattatactcctgcagagaataaagtgctttgtgcttcgtgaaaattggtttgtagtatgtgtgtaccaattatcaggattgtcagaaatgttggccaatttcctttcaggttcatagggacttaaatctgaaatacttctctacaaaaactttacttagctgcataattctgaaatagctttattctggccaactgcttatttataacagccttttcaggtaatattctaggagttatttctcaagatttattccctttatttttcttgatattctttcaggtgcaaggaaataaaaaataatttggcttatgtatacaatttggataattttgtagtttttcttacactgtgttgctcatttatgagaaataggcaaatagataaagaaaattcggttactgcatgaagtactgaaaaaatgtaaaaaaaattccttggggaagtcatattttagtccacgttctgttgttaattttaatcttggggttaagtaatttttgctcttggtatgagattataaacaaacaatccaattgacttgcctttcaactctgaacagtttcttgatcacagtgtaaatagctgcttgaatttcactgctgttacatagcttttcagatagtcaaggaaatatgattctgccatattcatgccagcagattccaaagggcaaggaaagatgtttcaacagatcaggagtctaaatgagttacacgttgagcaattggccagtgaagagccaccaacagtaactgggcagccccaggcctgtaggagcatctgaatggttctagttcccaggaagagcttccaaagaacacatggtcttacatagatattttcaaatagctgttttcctcccaattattttagtaaacctatgattgttgtagataaattagaaaagtaaatataaacaggaaaataaacttatgcattattccataatctgaagatgcctttgataacattttggtgtatagctcatcattttttcttatgcatatatattttaaaatccatttagattatgctgaatatataattcctataatatatgttctgtggtaatttagaataaaaatcccttcggtatgtgaatttaaaacaaattataggcatataatcattgtgaagtatctattcttcaaatcacttttttgttctttttagttatacaaatgggaaacagtaaaatttgccttttatacttgagtccaatatatattatttgagcaatttctaaatctaagatactgtcataaatactttaggaaatagcgaaacaacattaataagacataacatttgccctcagggcatttatatagggatacgcataagcaatcattagatgaatcagataatgtttcatgataaaatggaaaccaaataaatttataaacgatcatagaccttagatagcatggtcccaatctgggagattacaaggaatattttgttggatcttgacgtattggccaggatctcagccagcagatgatggtggtgggtgatggttgagggagggatgctgtggaatgaaggaataacattcaggatggcatagcatgaacaaaaccaggaagtgaaaataaatgcaaagatgctcttaagtcactgtgagttctctgctgaagcggaagaaaacactggtaaattaagttgacaatactctgagaacgaatttcagttccagacttagtttaaactttatcctgtaggcagtgcagagacacagatgcttttgagcaagtccgtaaaatggtcaaggctgtaccttaagaatatctcatggaaacttaaattcctagaaggaatgacaaaaccattttttgtgtaggtaagtgttcatataactgttctctaaacatctcatatttattttttaatataagttatagatacagttttatttttacttttgtaccccaagaataccttcttagaacttcttagaaaagcataaggatatcctgaagtattttaatgtctaaactttcttgttattagtatttgtttttctcaatttatggcttgacaatagagtgttcgtttgttctgtatgtatttgttcctcttgtctttctttcatagaatgcccctttcattcaaaaagcattaatggagcaactatatgagtagactatcgtattgtataatgagcactataaaaactgtgtgtcctggagaatttgggttaaattatctggctgggcctggagatagcactttagtaagatacattttgaatatcatgaaatttaaagaaaaaattgctagcacttaagatagtcaacttggttagttgatatcaattatcctgttaattaaggattttgaaactcagattctcctgatttgttgttcaatttcctttctaaaattttaaagtacttttcttttattgcttattagctatttggtttaactttaaattgctaaaactttttgaagaatgaaatgtattttacagttaccatttgcatttaatgtgtaaaattgattttaggctttcattaagtcaacttttatactcaaggtttagaattttccttgattacaggtggctcacacctgtaatctcagcactttgggaggctgaggcaggcggatcacaaggtcaggagattgagaccatcctggctaacatggtgaaaccctgtctctactaaaaatacaaaaaaattagccggattagcccggcgtggtggcacacacctgtaatcccagctacttgggaggctgaggcaggagaatcacttgaacccaggaggtggaggttgcagtgagccgagatcactccactgcactccagcctgggcgaaagagcgagactccgtctcaaaaaaaaacaaaccaaaccaaaccaaaccaaaaaaaactactttccattgctaaatgtgtttccggctcaagcagagatactggttgccatttactcaaataagcaagcctactaattatctgcaaatggcatgtcaagtgacccccaaaattaaacatctttatgtaaaaggttttctcttctaatgtttactttggtctcagaatccattatttaattaaacagttatattgtttatccagctaatgcaactcagtgcgtaagaaggcatttacttaaatctaagaatatacttgaatttttattgctattaattgtattggtgaattcttttgtaccatagcacctttcaagtttgaaaatgcagctcttttgctgttagatgtaagtgcctctgtacccatttcataaagactcatcacctattctgagaccttgattttgccaccccatcacccttttcccttccaaaggcaaggacaaaccagagcaattgtagcaacatgaaatcgcaaaagaaagacaaagcttcatggttctctttacaccataataaccgagcagtctcaaatctctcattaaattttagtgtttcgagtaatctcccatggtttttagatggtaatagtaatgtccttttacctctaccagtttgttccagacttctttgatattacaaatgggatacggtgtataaagctggtcaaagtcaagaaaactttggtaaatactcctgtaactatagatactggtggttcctgcagggtattggtattccagacctgaaagactcatacacaatcaatctgaaagtcagagcagagcaaatgcaccataagctgtgaagttacttagtggttctttgactgcttaactgagctggtgaaagtcagggcctgtgtatatatgtttaagtgataatctgcatcagttaattttcctgtttcagatttgccagttcaccctgaccatcttgaaaataagttatctctgatctctgtctgtatgttacttctctcccctcaccaacggagaacaaatgtgggcaaagtaagtaaagcaatcaccacctttggagggaagaattggtcatgttctatggatggtggatcaactctattgcggatactcagtaacatttttactctctaactcatcatttacacctcaaatcttttttatttaaatgctctgaagttgtagctttgaataatagtcttcgatgtggtaggggccttaatcaccatcattctagtctaactcgtctcccatcaaatcccatcctatgacattcctgatgaacataatttagcctctatttaaaaatatctatgatgaagagtgcattgtcttaccagaaagcccattccacttccaattgttgtgagagttagaaagttattcctcagttttggtttaaacctggctccctcttcattccacacattgacattagttcagtttacaggagctacatagaatagtctaccatattttcctcatgactgtctttccaatatgtgaagtgaactataattcttgccttcctcctaaatgtagttttctccaatttcatttggtatgcctattaaaatgcagagtcctgtttctccagaggtttttgttgattaggtttctggtaggcctaggatttctgtctgttttgtagtgtgatctgtgtttacatccgagtagttttatcaggctgtttcttgtctgtggaattttggaggtccaatagctttcttttgtcttgtactctatcctttaaatttcaaagtggcagtgtttccactggtttaaaattctcaagaatcttgtagttttcctgtgtatattagagaaattcactcctgaagaaaagaagcttgtttatagatttttcttagataatcttgtctctattttgggggtctgctgagaaggccgagggggtccatgagtcacctgtttaatctctttaaagagccttttgtgtgactgaatactgatttttatctttctgaggtaatagcaaaagtgttaccagccacacttctggctttttctctacaatgcacttttctggcagcgaatccttaatttttgctgataacattttaagtcatcaagtcctggccacttttggtttcaccgttctttccctaatttttatctttccttttacatcttactataagcagcgagaaaccaaaatgtgccttcaacactgcttgaaaatctcctcagctatatgcccaacttcattgtttacaaattctgctttccacataactgcaggacacaattctgccaagctttctatcactatgtaacaagtatcacccttcctccagtttccaataacacctttctcatttccacctgagtcctcactagcagccagcttttttcttttttctttttctcttttctttctttctttctttttctttctttctttctttctttctttctttctttctttctttctctctttctctgtttctttctttctctttcttctttcttctttttcttttctttttctctctctctttccttccttccttctttctttcttctttctttctctttctttctctttcttcttttcttttctttctttctctctctccttccttccttccttccttctctccttccttccatcctctgagtctctctctccttccttccttccttccttccttacttccttacttccttccttcctttccttccttccttccttccgggtctcattttgtcacccagcctggagtgcagtggtgtgatctcagcctactgcaacctccacctcccaggctcaagaaattcccccacctcagtctcccaagtagctgggactacaggtgcacaccaccacaccctgctaatttttgtattttcagtagagactgggttttgccatgttgcccatgctggtctcaaacccctgggctcaagtgatccacctgcctgagcttcctaaaatgctgggatcacaggtgtgagccactgtgcctggtctccagcagccactttcatgtccgtatttctatcaatagcctgttaataatgatttaggtattctctagggtaatatatatttttctctaccttgcttctcacttccttctgaagaagcagagttgttaacatccatatttctactaaaagtctgtttaagatagccttctaactttctaacttagcagacttttagtagaaatatggattctaacaactctacttcctcagaaggaagtgagaaggtcttgatctgtcgcccaggctagaagtacagtggtgtgatcacagctcactgcagccttgacttttgagtttgagcaatcctcacacctcagcctcccaaatagctaaaattacaggtctgccccaccaagcctggctaatttacaaaaaaaaatgttttttttgttttgttttgtttttgttttttgagatggagtctcgctctgttgcccaggctggagtgagtggcatgatctcagctcactgcaacctccacctcctgggttcatgccattctcctgcctcagcctcccaagtagctgggactacaggggcctgccaccacgcccggctaattttttgtattttaagtagagacggggtttcaccgtgttagccagaatggtctcgatctcctgacctcgtgatctgccagccttggcctcccaaagtgctgagattacaggcatgagccacagcacctggccaaaaaaatgttttttaaatatagggtcttgctatgatgcccaggctggtcttgaactcctaggccttaagtgatgctcctgccttggactcccaaagtgttgggattacaggagtgagccaccatgcctggacttaaccggtttgcccagagaatacccaccagtggcgtctgtagctgtagcatttaccccaagataactttgccaagaaatatgcttttattattattttcgcatccctctggtatattgacttcagaaacaaaagacatcactctattgatcacattctgtttttagtagtgatatttccatttacaaaatatagtaattctcaatccctgaaaatgtcaaatcctagaaaatgtggcattcctatgaatgatgttaacatcattattgaagagttgtttgccaagaccagctcggctggggagaccctaacccagcggcgctagaagaattaaagacacacacacagaaatattgcatgtggagtggaaaatcaggggtctcagccttcagagctgagaacctcgaacagagatttacccacatacttattgacagcaagccagtgataagcattgtttctatagattatagattaactaaaagcatttcttatgggaaataaagggattggctgaagtaaagggatgggttgggctagttatctgcagcatgaatatgtccttaaggcacagatcgctcatgctattgcttgtggtttaagaacgcctttaagtggtttttggccctgggtgggccaggtgttccttgctctcattccggtaaacccacaaccttcagcatgggtgtcatggctatcacaaacatgtcacagtgctgcagagattttgcttatggccagttttggggccagtttatggccagatttgggggcctgttcccaacagttgttggccaaagattcatttgattaacctgatttttccgtaacagacgattccgatgattctggtgttagctctgtttagaaataactccaagaacagtttttatattttattttcacattgaaaatcagtcagatttgcttcagcctcaaagaatgtgtctaatgaaaattaaatgagcgctggcagtgagctgcacttttctttttctaaatggaaaaagggttaaggccttttgtctgatcgaaaacccttaaaacagccatctgactcaaaggcctgacagaaccaggcccaccatgattatctaggataatctcttgcatgtacagtcaactgattatggactttaatgacatctagcgactcctggattagtgtttgattatgtaattggggactgcagcctagccatactgatacatcaaaaagactgtcacggtgtcttctatcacttattccattaaccaaagctgccacctcacataacacaataatttattttcacttgaacatttaggttttaaagggacttattctcagagacatgttaggaatcaaaatagaaatagttccatatcattggctcattgaacacaatagttcttgaattagcagttacaacttacaagttgtaaattgtttttccatgaggacttaaaagtttcatgtacattaaatataaatttcttttggctggaaatggcattggtactatttaaatagtctattgctggctgggcacggtggctcacacctgtaatcccagcactttgggaggttgaggcgggcggatcaattgacgtcaggagtttgagaccagcctggtcaacattgtgaaaccccgtctctactaaaaatacaaaaattacgtgggtgtagtggtggacacctgtaatcccagctactcggaaggcttttatatgcatttttgaatgcaaatttttaagatctgtgtggtaattagacatataatcatagttataattattattttatactgaaaaactttccaaaagacatttagggtatcatggccaaagcgagtcactgttttatttaaaactacagtcagttcaaccacaagcttttctgagtgtctattgtagtggatatatgtgcttttctttgtcaacttccccatcagtaaaagcaccctaattttattttggggttccactttctccctgccctcagtaatttggttaggttaagactcaccctcctcatatcccccattttccaggtttacttggaaaatagtttccaggtttaccattttcccatttacttgggcagtcatcatattccaactctctggccacacgactggtgcggggatgggcctgtaacccatgtaagtcaatgaataagacccagcttggtagttattaagatataggttgattgcttaaaattgtaagagtggaagagtaagaaggaaagtcaaagagaaaacagttgagccggaaagaaaacggagtcattcaaatcattattcgtaaagagtttcaagaagtggcgtatcaatattctcaacttaatagttgggcaatatttatgtttttgaaactaacaactaaaatacttggataaaatatttctcctgatttaagtaactataatttcagtcatgattcattgttcccagcaggatctgtatctgtgtaagtgggcatagtattgattttttttcaaaagagaagataggtgatctcattaatttccttttcacatcaaagctttccttttagggttttttttttttccttctctcaaaaaaaatactgaatgagtcagggtgctaatctgctttgctctagtaaattctatcttctcattgtagagatgtttttcaccgtagtaataatttgcttagctgcttggtatttactcatgtattcattcacagttctttatcaggcttcaggtatgtacccaatattgtgccaggtgaaatgagattcaaaggtgtctcctagcctagaatgtaaattctataaggaccttctcactcggagcacagtattggcacattatcagaaatctatacagatgcatttaggatgcatttctgtaacaatggtcacttgtgaggtgccatgcttgaccttcaagtattgcctgaaactcaaacacaagttgagggtttgagcctttgtacttgtttcctacagggcagttattcttcaaaatgcccaggtttaatgatacttatttttattttttattatttatttacttttttgagacggagtctcactgtcaccaaggctggagtgcagtggtgtgatctcggttcaatgcaacctctgcctcctggattcaaccgattctcttgcctcaggcccccaagtagctgagattacaggtgtgcaccaccacacccagctaatttttgtatttttaatggagatggggtttcaccatgttggtcaggctggtcttgaactcctgggctcaagtagtctgcccacttcagtctcccaaagtgctgggattacaggcatgagccaccatgcccggcgatacttatttttagtagttcacaatgaaataattaattatatttagtgccaatacaatttcaaataatgatgctggaatgacacccgataccacagtaggcaatgattttgatctctattagtttactagttatagtgggttaaatagtgacttcccaccaaaaatgcccacatcctaattcctgtaacctgtgaatgtgaccttatttggaaaaagggtctttgcagatgtaactacgttaagaatctcgagatgagaccatcctgaattatctggttggtccctaaatccaaagacaaatgtcctttacaacaaaaagaagagaagagggcacagacacagaggagaaggcaagtgaagatgaaggcagagactggagttacgtggccacaagccaaagaattcctgaagccaccagaggcaaggaaggattttctcatagagccttgggagccagtacacacctgctgacaccttgattttggaattttagtctccagagcagtgagagaatacatctctgtttgagcattaagtttgtggtaatttgttacagcagacctaggaaactaatatgttagttcgtactgattatttaattaaaggctctttttgtattgttttgttttctaaatagtctgcagaaacctacctcaatttttgtctccatccaatagagacacctgtctgtctgttgagatttggtggaaatccaagggttagtgtttctgggttatttttcgcctaccacagatagtgctgaaagcccatttagtacacaaatatgacacttctgaataaagtggcttcaacaactggtctggagatccaagtgctattcaaaaaagtgacactcgttctgagaggcgattcctatgaaggagaagctccatttgcgaagttatagcaaggttccttccataatgcacagcagctgggccagggagccgggagtcgtcgcttctggcctacccatctctgggctacttcccgcaactcactttccctgtgtgcctggaatgcttcttcctatgaggccgttagtcaaattaagtagaggcctttaaaaattagccatccatccaatctagagaatgtccactacgcttcattctttctcccttaccctgttgatttcttccatatcacccagcgctgatggtaattgtatgaatacatgcttatctgtctgtcctcccacccctaactctaaattcaaggaactctataactgcacctagcatattgtctgacactcctcaataaagacgcatttaatacatagacaaataatgagtgaacattttgagtggagggccggaaaatgtctatttactttggagttggaatcagactgttcaagagtactttcaaaaaaaattttgctacgtcaaacatcattgaatttcaggattgaaagagtggtggtcatatagctcaatcccctccaaacacccccacccaccagatgcgcgaatgccctcttcagccttcctgataagcatgacgaagatgctggcggaagcatccctggtatcaggaaactcatgacctcactagttttgatcttttccatttagctttcttttcccactcctcccagttattgcaaccttaattgtagcattttacacaactgctgctgcagagttctggaagtctgggggtgggagggacgggggaaccccagtgcctatctcaagcctgcggtcaccgacgcgggtccggggtgggggggtactgccagggaactcgcggcaccgcgtgcttgctgagttcgcctgggctctcggcctccctgcgggcaggggtcctccctccccagcgccgggtctctcctcccgcaggcccgcggccacccgcagcggcattccccgccgccgcccccgccacctgcgcgaccgccctagccgctcgagtccgctcctcccgctcaggggcggctgcggagggcgcggggcgcacgcgggcggccacccgactcttccctcccttctccccaccccagcctgctcctgctcagccccacctccccacgcactcggctgccctcctcctctcctgagagttgccccgcaccttgggcgaggagttcggagcggccccatcgcagagcccacggccagccgagcgcgcgcgacgcaggtgcccgagccccggcgccgccgccatctctgccttcggtcgagttggacccccggatcaaggtgggacctgcttccctctccgacaccccctattgccacctcttcccgctctgggtaactcgagaatggggctttgggacgcgcgtggcagacgcggagccccgcgggccgcttagggactgggagtccggggcagcttagcgggaccaccagaggggccagcgcccggcgggcggcgggggtggggtgggtgcgacgccgggcgactctcggctcccgtggggcgaggaagatctggacacacggctgacagcagccggcagcgcctggagcgaacctgctcgggaccaccgagagagcatgccacccggccaacttcttttccaggcttcgtgcctactttggaaactgaagggactgccacctaaaacagtaaaccctggggtcctgaagagaatttgctggttcgaatgacaagagaaaaaataattgttctgtagggatggtttagacctcagcttttgtttcccacctccccccttccctgcaagcaaattaaacaacaacagtagcagcatcagcagcaaaaccccaaacccaatcctaaccaaaccacttactgaaagagatttgtagtggtgagaaaaagagacccaactgaggaatcatttgggaaccgcaggtatggtgccatttaaaaactggttctttctggtgttatttctagaacttgtgtttgcaaacagattagaattctgggctcttgtcagcctaatggagttctttatactgaagggtggcctggggtgtcctctgttaacatttatttctgtaagtattaaagtatattgaaacaaataccctttcacggctctggaattggaatcagaaaatctgagttttggtgtgatttccattttattacctatgacactgtggttcgtttaacctcagtgggcctcagtttcctcattttttcaagttggagggttggattaagataatttctgagggccttttgagaatatctaaggtatgccccagaataaaaaagtataattccttaactctctttaacttgttacaaacattgctagtttcataatttcatgaaataaaaacaatctgtattaatcttggcactagtttatatgcatttatgacttaggcttttaggattttcccaccaaaaggtatagagaaaaacatgtataaagagctcagaaacatatagatttatatgaatatttacacctctcatactaccttaaataatctttaagccagtatttgcaacactgcaacaaaaatacatggctttagcatagcacgtattctctttaagtattgtacatctggaggaaataaaaatgtgtttgaaggaaaacaaacattgcacctttcctatcaattattgttcttgaacagtgctggctactttttagcataaagttgtgggcagaatgttaaaaaattggtttcaggtcacttctgagccgctgtgaaattaagcacaatagcagagatgccaattttagtaatgcagttagttgccttggaatgaatcccagaaaatagcagagattaactaaacagataaaccagaaattaggaatggacacacgcacacacaaaagtgtctacagtgagtatgtactgtgaagggttagtgtacttcatactttctttttgattagaagaaaatgtcgggttgttttagcagacagagaatgttacagtagcttttgttgctacttctaatgttttatcagtagcattttcaagattatttgaaacttagttatcactagtaaggacaggtttaagaatatttctgcctcttttcggtggcttggattcaaaataataaaacaatcttttctcacccacatgtactttgtatgcagtttgggagagtgaaatggatttgaagtactcttttatgagtacattttaacttattttcagtgactttttgcctttgggctggaaatgtcgtaagttactcaggcatttatcttccctcatattctctggtgaagtagagatagtcatctccgttgaaacagatgctcagagatgtaagtaaattgcttgttgagtgaacagggaatcgtagaactcaaatataccctggttgctaagtcatttggaaaacaactgaaactggatggatccaacagctcacggtccacagccaactcattcatggcttgggagtgtcatcatgggtggcagaggctctgttcctcctttgtaatgtggggacttactctctcagcaatttactgagaaaaaagtaatctcttcacacttagatcactattataggaacaaatggtgtgtatttgtgaagtgcaatatttctgggaggtcttggaaataaatactaaaagtatccagaaaaaaaaaaaaagaactctcttggcagatattgtactgcatttttcatactgagagccaaacacacccacttaaagagtatgtcctgtggagttaaaaatgaagaaaaaggcttatagtctgctctaattcttaagactttatgtgatttacaaattccagttttaattaaattagaaagttgcaaatgttcacctactggccacactcagtatgtacaaccttttggagttgctcttcaaatacgatctgcttatagtttggaatattccttctcaaacatgttttttggagtcttgctatgttgcccaggctgatttaatactttttgtgacttaatagtgatattacctgttatcatcacacataatcttattaatatttaaaatattttaaaactacaaatcttatataaatataaataaaatctttaaaacatttgaactgtaatgaatatagagagaagcatataaaacaaatttaatggttgacagataatatgataaatcattataataattgtaaggcaaatttctcattattcaccacccccaaaaaaagaacattgcaaatatcccaaaacttcttgtttgttccttcttcatcacaaatctaatttacctttttttaaaaaaagaaagttatttacttatttattttgagacggtgtcttgctctgtcgcccaggttggagtgcaatggctcgatcccagctcactgcaacctccgcctcccaggttcaagcgattctcctgcctcagcctcccaagtatctgggattacaggcgtgtgcctccacacctggctattttttttttttgtatttttagtagagatggggtttcaccgtgttagccaggatggtctcaatctcctgacctcatgatctgcccacttcggcctcccaaagtgctgggattacaggtgtgagccatcatgcctggcccaaaaaaagttttatatgattatggtaggcattaaatcatagattattttgcttaacattatgtttatgagattaagggatttcttctctctcctttaaaacaatattttttgaaagagttatctcggctgggcatggtgcctcacgcctgtaatcctagcattttcggaggctgagacgggtggatcacaaggtcaggagttcaagaccagcttggccaagatggtgaaatcccatctctactaaaaatataaaaaaatttatccagacctggtggcaggcgcctgtaatcccagctactccggaggctgaggcagagaattgcttgaacctgggagacggaggttgcagtgagccaagatcgcaccactgcactccagcctgggagacgagtgagactctgtctcaaaaagaaaaagaaaggaaggaagggaggaagggagggagggagggagggagggagggattgtctctattccctgtctccaattattctcttcacactgttaaaaaaaactcattcctattaatcttgttttcaatattctgctaaaactacgtcaaggtctactactgtcaagttcaccaatgatactacctttgctcatccagtagtcagttgtcagtgttcattttacttcactactggtagcattgtcacggttattactctgctccttgaaacagtcccttactgacttccaggacaccatgcattcttgattttcctccttcttcactggctgctcctttctgtctcctgtgctagcctctcctcttttcttagaggttttaaccttggaataccttaaggtttagctcttttttctccatgctttttgatgatttcatgcaatctctctatgtgtgtgtgttgatgattccgaaagtgatagctcaagccttgactgctccctctggacttcagatctttatattccagctgtctactgagcatttccatttggatgtctagtaggcatctccagttcaaattctccacatggaatcttcatctttcccaaacctgcactatctgcagtcttcctcatctccatctttcaagttagttaggccccaaaccttggagtcatcttcgattcctcctattctctcatacctcgtttgtaatgtgttggggaattctctgtgctctatcttcaaaacaaatccagaatataatgacttctcattacttccatggctctgttacaggaaaggggtcccaatccagaccccaagagagggttcttggatctcatgcaagaaagaattcagggcaattaggtagagtaaagtgaaaacaagtttatttggaaagtgaaggaataaaagaatggctactccatagagcagccccaaggtctgctggttgcccatttttatggctatttcttgatgatatgctgaacacggggtggattattcatgcctcccctttttagaccatattgggtaacttcctgacattgccatggcatttgtaaactttcatggcgctggtgggagtgtagtagtggggacaaccagacgtcactctcgtcatcatcttgattttggtgggttttggccatcttttttactgcaacctgttttatcagcaagatctttatgacctgtatcttgtcctgacctcctatctcatcctgtgacttagaatgtcttaactgtttgggaatgcagcccagtaggtctcagcctcattttacccagcccctactcaagatggagttgctctggttcagacgcctctgacagctcccaccctagtacaaggtgccatcaactctcacgtgagttattgcaaggacctccaaactggtctccctgcttttattttttgccctcttcaatacattctcaaaatagcaatcagagcactccttttataatgcatgtcggatcatgtcacttttctcctccaaactctccatggatttctggttcacacagagtaaaaaccaaagtccttaggataacctccaaggccctacctgatcattctgcttgccactttacctgtctggtctcatttcctactgttcttcctttcactttactcagttccagccacactgggctccttgctatttcttgactatattagaaaccatcttttcattttagcttttcctgccttgaatgcttgtcctccagatttccacatggttcgctttgttactgtcacttcttttaagtcttcgttcaaatgtctccttttcaatgaggcctactctgattacagtatttaaaattccatatcttcttaccttgtaatatattctttttcctttcctttcctttcctttcctcctttcctttcctttcctctcttctcctctcctctcctttgtgtctccctatagcattattttaccttataaaatactgtgtgactttctaattatcttttttttttctgtcccatttccactagaatgtgaactccacaagggcagaattttgtcctgttttgctcactgttgtgtccctagtgtgtgaaatagggcctaacatgtaagaggtgctcaatgctttttttggtgattgaatgctattgtttgttcatttttattcctggatatattcaattctataaatataacacgttaatttaaaacatgaattctgattatgcacatttagtttccttcctttcttcttccctcacccatcacttcttccttcctgccttcctcccttccttcttttttgccactataaataaagcagctatgatccatctacaagtgtgctagtatacgaagtttctttagagcgtaaaaccaatagacaaattacgggctagcaggacttgcagacttcaactttattagataatgaatgccacacatttttagtgtggattcaccaatttgcattcctgtttttattgctctacaccagatggacaaacttcgtattgccagaacatttaatttttcgccatctgatgggtattatctcattaatagttactactttaattactggtgagattaagcctggtgtctgtgaggataggttaggttatgctgcagtaacagataatcttcaaatctcatgggcttaatgcagttcttcactgatgcaaagtctcctatggactaagacaactctctggggcaacttctccatgtaataacttggaggtctaagttcagggaaactccatcattctgtaactgtaacaatctggaacatggaactttcccatttggtgtggtaggggaaaagacagcagggatggatactcgtgagccatcttcaaatgcttccatctgaaagtgacatgaattattttcaaatgctaaacgtaagtgtttaagatagtcatatggtaatatgacccagtaattctattcctaggcatatacctaagatggatgaaaatatacatccacacaaaaagttgtacagaagtgtcagtggcaacattcttcataataaccaaaaaacagaaactgcccaaatgtccatacactgatgaatggataaacaaactgaggtatatccatacaatggaatattattaggcaataaaagggaatgaagtgctgataaatgcttcaacacgatgatccttgaaaacatgatgctaacagaaggaagccagttactaaagaccccaggattttatttatatgaactgtccagaataggcaagtccataaacacagaaagcagatcagtggttgccggggatggaggaagctggtgaaaggggagcgactgctaatgaggaagaggtgcattgtggggtgatgataatattttgaaattagacagtggtgatgattgctctgttagatacattcactcaatgtactaaacctagtgaattgtatgctataaaagagtgaactttatgatatatgaataatagaccaataaaactgatattttaaaaaatactttaaaaataaagtatatttctatatgccatcaagaaacagaaaatgaaatattttagaaatgcatcatttaaaatgatttcaaaaacatgaagttcctgtgaaaaacatctaacaagatgttcagggacttttatggaaaaaattagatgagatttacatctcatattagggaagaactcagtatatggagacagatagtcatacattttaggactgaatgattaaaggatatcaatttccttttcattgttatagactcaaaacagtctcaataggatctctattaaattcctaacaatttttttagaacttgacaagctgattctaagatgtatatggaaagtcaaaacccaaagaatgctaaagcactcttgaaaaagatgcaaaatgggagaatttgtgctatcagatagcaagactcgttttaaatctgtagtaatcaagacaatgtttctttattatttctttttcccttctactttctttgattttttctgttctaactgcttaagtgaatgttcgattaaatgttttattctaacagattataaaggaatgatagcacattaattttcagcctttcttctttttgaaaagtattatttatggctttgagctgccttctacatacttctttatctgtgtgaaataaattttgagatactgttttcactaagatcagtttaaaataggttctgattttcatatttctttttgcccagttattaacttaaaagtatttttctggttaattgaaactttagtcaatttggagtaagcttcttgatttctaatgtttctttttgcattaaagcctattttgtatgatattgatataactccaccagctttcttttgttccgtatgtgcatgttaaatcttttttccatcctttgctttcagatttctacatacttattttaaatgtgtctctgtatcctatatcatttttctgtcattctgcattcaacctttctatattcttatgttttagatgtgtctgtagtaaacagcatttatttcttaaggtattttaaattcaatgtctttccactggagaattttgtcagtttacatttaatacaattactgatatattgaggcttgtatttactttctgctttctttatttgcccataattctggttattttcttttttattgccacattttaggttgattatttttatcacttcaaattttctttcattactttaagagttatacactctatttctattgttcagtaactactgtggaagttaccatatgaatccttaagttatcgaagttgaaaatgaatacactttgagcactaatgagtacaggaaaatacagaggccttagcttactttaacttcatttaatactctcttgccatatattgtgagcatcttgaattccatttatttattcaaatatttattgagagcttactcggggctaagcattattctagatactgaacaaaatagatgagcatccctgtgcttgtaagacataacagagtgcaaacaataaacttaatagagtaaattataccatatactagaaggtagtaagtatatggaaaaaaaactagagcaaggcgaaagagattaggagtgccgagagagggagaaagagaatgaatgagagtgagtgcacataagtacaagtgaaagtgagtgagtgtgccctagctttggaccaatactgtctataaagtttgtggggacatataaatgttttatctattttcactagataacagctgaaaggtttgagccaaatagagagtctcaggtgcttctataatggtattataataggctttaaaaacgtgaaaaactcatgtttaagaacagctgttaccaactatctgttttgtgagggtggaggacaacttagtttttctcagaattaattatactttcttattgtaactttagccgctgttatttgggtctctaaacctatacaaattaagaagctatgaacatgagagaatcaaacaattagatttctgtgcacaccaacagaatttctgaaccaaagtggtttgtgtttaggagatgaaagagatgataaatcatacacacacacatagataaacacacatattatatgcatgtgtgtgcatgtgtgtgtgtgtataaacacagagagaaaacatactggcatacacataagcacctgttaattgtagttgctgttatagtagtaagatgttatctcttagaattatggtatacttatcatattagacctatccaggaggtagctgggtatctagtgtggtgatactatctagtgtggtgtcttgcaacaacactgctagtcataggtctgatttgggggagaaaatatttttttaagacagtgtctcgctctatcacccaggctgaagtgcagtggcatgatcatagctcattgcagcctcagtctctgggttcaagctaccctcctgcctcagtgtccccactgcatgctaccacacctggctaattttttcaaatttttagtagggacgaagtcttgctatgttacacagggtggtctcaaactcctgaactcaagtgatcctcccgctttggcctcccaaagcgcagggattacaggtgtggaccatcgtgccaggctgggagaaaagttttgttgacacaacaaacaggatgcaaagaaacaatctataaaaacagtaatttaggtaagtggcttcttggtcttttgattaataggattctaaacttgcaaatcaattcttatgcaggagttcttattggcatttaccgatgctctttggctgatgtttgtttttactgaccagaggttctgtgggaatctcatttattaatacttacaatgtgcttcatattcctctgcatctttgagggacaattaaatgtccactctatggaatcttttataatttcccaatcataagtaattactctgatttctcctaattacccttttttctaggtagttgtgattctttaagtctaagacagcatggatttttaagctacaccactgatatagtttggataatagtcccctccaaatctcatgttgaaacttgattcccagtgttagaggtgagtcctgaagtgggaggtgtttaggtcatggagcagatccccaaagagtggcttggtgacatcatcacagtaatgagcatgttcttactctattagttcctgtgagcactgatttttaaaaagagcttggcttgtccctcctctctcttgcttccatgctgtcactatgtgatctctgcatgctggcttcctttcccctctcctttgcctgcactatgagtggaagcaactcgaggccctcaccagatgcagtacaggtgccggtgccatgcttcttgtatcgcctgtggaaccatgagccaagaaaccttttttcttcataaattacccagtctcaggttttcctttgttacaacatgaatgaattaagataaccatcatttttgtatcagtaaaaagaaaaagctctgcgtatttaactattatacagtattttttatcatttaaaaatttatacttattcagatagctcactaagaattatatatataaacatttttatttaaatcatgccattctcataaggaaagtataaatcaaagatttcggttaagggattcttattcatattcaaagtctgtttttttcaagttgcttttcatctcagaactgttgatgtaaatattttcccaaacagtatcatactctgggctatcaagaatatttgtgatacagcaattcaaaaaagaatgcctcactattgtttctgggattttcttccaagctggttcattttgctaattttgatgcggcttttaactgatcttgtaagatgtcaatatcgggttttttggagttcatattctttcctcaaatggtctttaaatagtttgttgaccaaaatattgataggttaaaattgtccagttggtcattaagaaagtgtccagttttgatgtatgcaatcaataacaaccagatcacagctgctaccaggccatcgggaattgtaagatgctataaatttaaacaatgatgctgatgccagaggtgttaaaatgttgtgaatcttaaaacagaagacatacaatactactctcttcctttgtatttcctgtagttcaactaaaaatctcacctttcgttggcccctaggactttgtgagtagctattttctctgaaatcccatagtactttatttaatgaaaggaactaagtaataatttggggtgaaaataatccatgtacatggttaaaaaaaacttacttatgtataaaccagtagccctctgctctactacctacactaaagggtataacctgaccctaggaacaactagtttgaaccatttctggttttagtccttcttcctctagggctaaattgtatgtttatactgtctgcttttctttttttttcatttatcatttaagcagataccatagtagaagataatttagcctactcatttcacctccttttcttttttgctcctccacatatattaattttatgagctcctttattggttacatttgtcatttccaccacgatatttgttccattaactacagacagtttctcttgaacccctgcttcatgagtttgggatatttcaccctttctcctctcaccatctctccttgtatattataacacctaaatctgacaactgtgtggtgagagtattgataatattttaggtttagtatttgttattaaattttgtatttttgtctattggttgaccctaaaagttgaaaaattaataaatagcattaaagttattatgaccctgtaaatgttgtttactgcagaatcaagaagtattctacagttacatttcattcagtatggctcctgagccacccaaagaatgttcctagaatcaaagttaaggagattctttctttcaaatggattatttaattctagcatttgctaaaaatttgccatattttcttttcattcatatttacattgtgaatttctgtgacgctttttcaaattacctttattttttcttattgggaaagcatatgtgggccttcctggtttcatccttaataattttcagctttttacttcctttatttttttgaatgcattttcttccttttttttttgaagtccactgactcatattctagtggcttcaattttgaattatgacttcctttttccctggtgtttattctgtttttattttattttcaagtttttttctggcttcaggattatattatgtgtcaggttgccttccatctccaccttcctccttgccatctccttttgggggccatctatactacagctgctatctggactagtcatttgaaagtttgcagagccagcaaacttgtttgtaaccacgatttcctgaatgtgtatgtttttgtcgtttttggttttctcctcattttgctggaatactttataaaattacttctggcaaataaatttatactatataaattttgtaagccattacattactaaaagtatatttgtttctctcggatacttctttgactggatgtaaaattctaaactgaaaagaattttctataagtcagttgctggattattttctagtattcggtgttttgggatgaaacatttgttttccattctctttcttactcctttagtgatttttttcttctctggaatcttttcttatattctttttttctttgttgtttggtaatttcttaattatatgtttaggaatgaatctgtttccattcttctttcttggagcctggtagccatatttttcactttgaacacttgtgccttttatctctgggaaatgtgccttttatctcttgtgccttttatctctggaaacacttgtgccttttatcgctgggaaattttcttgtattttttttgtgtgattattttctcctttctattctttttttctggaagtactgttggttggatttgggtctcttggatttatttttaagtgacttctttttcttaaacatttatttcctggttttttttttttgcctttggggggaaatgttaattatgcattttttttaaaaccattgaaattttttttttgtactatgcatgtaattttcaaaagctctttcttgctctcattattcctttgttattttatggatccaaaactttctgaaatgtctctgccaatactcattaaagatttgttaaagcttttttttttttctttaatttatccctgtgtccctggtggttagtttcctttttactttctttttataaaagaaaaatttaacacaatgctaaagactttcttcatgtctttgtgtctccattcagcatggctgttaaatgaagaaacaggaagaatgtgacttctgtgcatatgggcagtgttttatcaactgataggcttcatgttaggcactcaatcaaagagctgccatttatgctaaaggcctgttgcctaaatgtcagggctttaccataccggtgccaagtttacatgaaaagctcaagttctcaaacaacttgtactttttcctcctttaacacataggagtgtatactataatttttaaattgtctttggccatttgacacctttgaatactttgctcgtgtttgaggaatttccacttaataagcccctgttttcccaagcttcctggcagtctgcctgtagagtgtgaagtaggctccatcagttagaggcatttgtgccagattttagatcagaagtgtgggacatgaaagggcagatgagctccccggagctcagaggtagtaggcattgaggtttcagtcataacatgcagtatcctggtatggtgcagggctgtcttctctagagcaattctgcatgggattttgggtgtggtcttggctgtgtgcttttctagcttggttctctggcactcactgaggttcggagagctacccagtaaactttaataaatttctttcctgcttagactagtcaaagttcatttcagttgtttgttagtcactctcctgacagttacatggagctagtttagctgctgtgcaatgtttgtgaggaggtgaattacatacgcagatattacatgtgcagaccaaaatggcctctccttttagccccacctcaccctcctgcccttatcatttagaacatctgcaggtttgttttctcattgttgacagcctattctccaaatatcctatgtagttactacctttgttatacctcattagtctttgctaattgatatggtttggatatttgtcccctccaaatctcacgttgaaatgtaatctccagtgttggtggtggggcctggtgggagatatttgggtcatggggtgggtccctcacgaatggcttggtgccctccctgtggtaatgagtgagttcttgctctgagttcatgcaagatctggttgttaaaggagcctggcatcttcttccaccctctcttgctcccccttgccatgtgatgcacctgctccccattcactttccaccatgactgtaagcttcttgaggccctcaccagaagcagatgctggcctcatgcttcctttatagtctacaggaccatgaaccaaaataaaacacttttctttataaattacccagtctcagatattcctttttaacaatgcaagaatggactaacacactaatgttttagaaatttgtttttctcttttgctgctgatcgctctctcattcactcttgtagtgggttgatattatttactttactataattttcaaggtatctcaggagggaaagatcagtttgttcagtttaccatttttttttgagacagcatctcactctgtcacccaggctagagtacaatggtgcaattttggctcactgtaatctctgcctttcaggctcaagcgattctcatgcctcagcctcttgagtagctgggattacaggcatacgccaccatgcatggctaatttttatatttttagtagagatggggtttttccaggctggtctcgaactcctggcctcaagtgatccgcctgccttggggttccagagtgctgggattacaagcatgagccaccgtgcctagtcccagtttaccatcttgaacctgaagtcccactggtattatcgtgctttgacatgtaaaaaaattaataaaatgttatttcttaaagtaaataaattttaattattttctacatttctagcatcacatgtggtagcttgcattttattgaatatctggttaatatttaaatgagtcaatttatgtagagcttttagattacaccgtaggtaagatgcctactctgactcaactttgttgactttatggtacccacatctgtgaatcatagcttatccttatgcattttttaggaattaatatgtgacaagttcacacagagtaatatcaggaattaaagtacttgaaattatgttttccaagtgacaaatatttatgccaggatgttggaaggttttttttttaattaaaaaataatttaagtctttaacagctacttgatgggaataacatgaccaatttatattccaagtgaataaataaaagttaacatacttaaaatgacaaggctactggaaatagatcaggctatatttattttgttaaatttttgatacttgaagaaatagtgtttttcagttgcatttaaattaaatgtttaaatgcttatttaagtgagagatagatagatgcttctctaacaaaaagtaaaagcaaaaattagtggcatttggagctcattgagttaactcatcaaagcaacattattgtcagaattgcttttcttactcataaactttcctacacactcagagattttttgagatcaatggagcaagttgtaaataattttatttctgctcaaacactgattgagactgttctgttttatatttaagtagaatttgataggtaaaaataacacaaataatcctttacaatagaaattaaacagtctgatcttcctttgaaagcccaaattatgcttattcagtagaatatagatttggattttttcttcatagtaataactgaagagtaagcatgattaatatgcttactgtgctgggcatattatgcaaattaaattactgcttgcatacccatacatcatggatgtatcatttagatcagactgtggatttgtctttgtatactttatacagatttcttcaaatatttgtatatttcaacataggcttttttttcttttcatttctttctaaattcctaagggctgtttttctttttaaacgtgagaataaatatctacattaattatttattatatactttaattgattcaacaactatttatgagtacttacgatgttccagagaatatattaaaatacttgtttttcagaagtctaatatggatgagaaacattgtgcctattctttttttttttttaaattgtactttaagttctgtgatacatgtgcagaatgtgcaggtttgttacataggtatacacatgccacggtggtttgctgcacccatcaacccgtcacctacattagatatttctcctggtgctatccctcccctagccagccaccccccgacaggccctggtgtgtgatgtttcctctccctgtgtccatgtgttctcattgttcaactcccacttgtgagtgagaacatgcagtgtttggttttctgttcctgtgttagtttgctgagaatgatggtttccagcttcattcatgtccctgcaaaggatatgaactcatccttttttatggctgcatagtattccatggtgtatatgtgccacattttctttatccagtctatcattgatggccatttgggttggttccaagtctttgctgttgtgaatagtgctgcaataaacatgtgtgcatgtgtctttatagtagaatgatttataatcctttgggtatatacccagtaatgggattgctgggtcaaatggtatttctggttctagatccctgaagaattgtcatactgtcttccacaatggttgaactaatttacactcccaccaacagtgtaaaagcgttcctatttctccgcatcctctccagcatcttttgtttcctgaatttttaatgatcgccattctaactgacatcagatggtatctcattgttgttttgatttgcatttctcaaatgaccagtgatgatgagcttttttttcatatgtttgttggacacataaatgtcttcttctgagtagtgtctgttcatatcctttgcccaccttttgatggggttgtttgtttttttcttataaatttgtttaagttctttgtagattctggatattagccctttgtcagatggttagattgcaaaaattttctcctattccgtaggttgcctgttcactgtgatgatagtttcttttgctgtgcagaagctgagctgtttagtttaattatatcccatttgtcaattttggcttttgttgccattgcttttgatgttttagtcatgaagactttgctcatgcctatgccctgaatggtgttgcctaggttttcttctagggcttttatgggtttaggtcttacatttaagtctttaatccatcttgagttaatttttgtataagttgtaaagaaggggtccagtctcagttttctgcatatggctagccagctttcccaacaccatttattaaatagggaatcctttccccattgcttgtttttgtcaggattgtcaaagatcagatggttgtagatgtgtggcattatttctgaggcctcttttggttccattggcctatatatctgttttggtacagtaccatgctgtcttggttactgtagccttgtagtatagtttgaagtcagttagtgtgatgcctccagttttgttctttttgcttaggattgtcttggctgtgcaggctctcttttggttccatatgaaatttaaagtagtttttaaaattctttaaagaaagtcaatggtggcttgatggggatagcactgaatctataaattactttgggcagtatagctgttttcacaatattgattcttcctatccatgtgcatggaatgtttttccatttgtttgtgtcctctcttatttccttgagaagtggtttgtagttttccttgaagaggtcattaggtattttattctctttgtagcaattgtgaatgggagttcactcatgatttggtgctctgtttgcctattattggtgtataggaatgcttgtgattttcacacattgattttgtatcctgagactttgctgaagttgcttatcagcttaaggagattttgggctgagacgatggggttttctaaatacacaatcatgtcctctgcaaacagagacaatttgatttcctctcttcctatttgaatacccttaatttctttctcttgcctgatttccctggctagaacttccaatactatgttgaacaggagtggtgagagagggcattcttgtcttgtgccagttttcaaagggaatgcttccagcttttgcccattcagtatgatattggctatgggtcataaatagctcttattatttttagatatgttccatcaatacctagtttattgagcgtttttagcatgaagcagtgttgaatattatcgaaggccttttctgcatctattgagacaatcatgcggttttttttttgcatataaatataatagaatattattcagccttaaaacggggtgaaattttgatacgtggtacaacattgataaactttattttattttattttatttattattattattatactttaagttttagggtacatgtgcacaatgtgcaggttagttacatatgtatacatgtgccatgctggtgtgctgcacccattaactcgtcatttagcattaggtatatctcctaatgctatccctccccactccccccaccccacaacagtccccagagtgtgatgttccccttcctgtgtccatgtgttctcattgttcaattcccacctatgagtgagaatatgcggtgtttggttttttgttcttgcgatagtttactgagaatgatgatttccagtttcatccagtgcctacaaaggacatgaactcatcattttttatggctgcatagtattcccatggtgtatatgtgccannnnnnnnnnnnnnnnnnnnnnnnnnnnnnnnnnnnnnnnnnnnnnnnnnnnnnnnnnnnnnnnnnnnnnnnnnnnnnnnnnnnnnnnnnnnnnnnnnnnnnnnnnnnnnnnnnnnnnnnnnnnnnnnnnnnnnnnnnnnnnnnnnnnnnnnnnnnnnnnnnnnnnnnnnnnnnnnnnnnnnnnnnnnnnnnnnnnnnnnnnnnnnnnnnnnnnnnnnnnnnnnnnnnnnnnnnnnnnnnnnnnnnnnnnnnnnnnnnnnnnnnnnnnnnnnnnnnnnnnnnnnnnnnnnnnnnnnnnnnnnnnnnnnnnnnnnnnnnnnnnnnnnnnnnnnnnnnnnnnnnnnnnnnnnnnnnnnnnnnnnnnnnnnnnnnnnnnnnnnnnnnnnnnnnnnnnnnnnnnnnnnnnnnnnnnnnnnnnnnnnnnnnnnnnnnnnnnnnnnnnnnnnnnnnnnnnnnnnnnnnnnnnnnnnnnnnnnnnnnnnnnnnnnnnnnnnnnnnnnnnnnnnnnnnnnnnnnnnnnnnnnnnnnnnnnnnnnnnnnnnnnnnnnnnnnnnnnnnnnnnnnnnnnnnnnnnnnnnnnnnnnnnnnnnnnnnnnnnnnnnnnnnnnnnnnnnnnnnnnnnnnnnnnnnnnnnnnnnnnnnnnnnnnnnnnnnnnnnnnnnnnnnnnnnnnnnnnnnnnnnnnnnnnnnnnnnnnnnnnnnnnnnnnnnnnnnnnnnnnnnnnnnnnnnnnnnnnnnnnnnnnnnnnnnnnnnnnnnnnnnnnnnnnnnnnnnnnnnnnnnnnnnnnnnnnnnnnnnnnnnnnnnnnnnnnnnnnnnnnnnnnnnnnnnnnnnnnnnnnnnnnnnnnnnnnnnnnnnnnnnnnnnnnnnnnnnnnnnnnnnnnnnnnnnnnnnnnnnnnnnnnnnnnnnnnnnnnnnnnnnnnnnnnnnnnnnnnnnnnnnnnnnnnnnnnnnnnnnnnnnnnnnnnnnnnnnnnnnnnnnnnnnnnnnnnnnnnnnnnnnnnnnnnnnnnnnnnnnnnnnnnnnnnnnnnnnnnnnnnnnnnnnnnnnnnnnnnnnnnnnnnnnnnnnnnnnnnnnnnnnnnnnnnnnnnnnnnnnnnnnnnnnnnnnnnnnnnnnnnnnnnnnnnnnnnnnnnnnnnnnnnnnnnnnnnnnnnnnnnnnnnnnnnnnnnnnnnnnnnnnnnnnnnnnnnnnnnnnnnnnnnnnnnnnnnnnnnnnnnnnnnnnnnnnnnnnnnnnnnnnnnnnnnnnnnnnnnnnnnnnnnnnnnnnnnnnnnnnnnnnnnnnnnnnnnnnnnnnnnnnnnnnnnnnnnnnnnnnnnnnnnnnnnnnnnnnnnnnnnnnnnnnnnnnnnnnnnnnnnnnnnnnnnnnnnnnnnnnnnnnnnnnnnnnnnnnnnnnnnnnnnnnnnnnnnnnnnnnnnnnnnnnnnnnnnnnnnnnnnnnnnnnnnnnnnnnnnnnnnnnnnnnnnnnnnnnnnnnnnnnnnnnnnnnnnnnnnnnnnnnnnnnnnnnnnnnnnnnnnnnnnnnnnnnnnnnnnnnnnnnnnnnnnnnnnnnnnnnnnnnnnnnnnnnnnnnnnnnnnnnnnnnnnnnnnnnnnnnnnnnnnnnnnnnnnnnnnnnnnnnnnnnnnnnnnnnnnnnnnnnnnnnnnnnnnnnnnnnnnnnnnnnnnnnnnnnnnnnnnnnnnnnnnnnnnnnnnnnnnnnnnnnnnnnnnnnnnnnnnnnnnnnnnnnnnnnnnnnnnnnnnnnnnnnnnnnnnnnnnnnnnnnnnnnnnnnnnnnnnnnnnnnnnnnnnnnnnnnnnnnnnnnnnnnnnnnnnnnnnnnnnnnnnnnnnnnnnnnnnnnnnnnnnnnnnnnnnnnnnnnnnnnnnnnnnnnnnnnnnnnnnnnnnnnnnnnnnnnnnnnnnnnnnnnnnnnnnnnnnnnnnnnnnnnnnnnnnnnnnnnnnnnnnnnnnnnnnnnnnnnnnnnnnnnnnnnnnnnnnnnnnnnnnnnnnnnnnnnnnnnnnnnnnnnnnnnnnnnnnnnnnnnnnnnnnnnnnnnnnnnnnnnnnnnnnnnnnnnnnnnnnnnnnnnnnnnnnnnnnnnnnnnnnnnnnnnnnnnnnnnnnnnnnnnnnnnnnnnnnnnnnnnnnnnnnnnnnnnnnnnnnnnnnnnnnnnnnnnnnnnnnnnnnnnnnnnnnnnnnnnnnnnnnnnnnnnnnnnnnnnnnnnnnnnnnnnnnnnnnnnnnnnnnnnnnnnnnnnnnnnnnnnnnnnnnnnnnnnnnnnnnnnnnnnnnnnnnnnnnnnnnnnnnnnnnnnnnnnnnnnnnnnnnnnnnnnnnnnnnnnnnnnnnnnnnnnnnnnnnnnnnnnnnnnnnnnnnnnnnnnnnnnnnnnnnnnnnnnnnnnnnnnnnnnnnnnnnnnnnnnnnnnnnnnnnnnnnnnnnnnnnnnnnnnnnnnnnnnnnnnnnnnnnnnnnnnnnnnnnnnnnnnnnnnnnnnnnnnnnnnnnnnnnnnnnnnnnnnnnnnnnnnnnnnnnnnnnnnnnnnnnnnnnnnnnnnnnnnnnnnnnnnnnnnnnnnnnnnnnnnnnnnnnnnnnnnnnnnnnnnnnnnnnnnnnnnnnnnnnnnnnnnnnnnnnnnnnnnnnnnnnnnnnnnnnnnnnnnnnnnnnnnnnnnnnnnnnnnnnnnnnnnnnnnnnnnnnnnnnnnnnnnnnnnnnnnnnnnnnnnnnnnnnnnnnnnnnnnnnnnnnnnnnnnnnnnnnnnnnnnnnnnnnnnnnnnnnnnnnnnnnnnnnnnnnnnnnnnnnnnnnnnnnnnnnnnnnnnnnnnnnnnnnnnnnnnnnnnnnnnnnnnnnnnnnnnnnnnnnnnnnnnnnnnnnnnnnnnnnnnnnnnnnnnnnnnnnnnnnnnnnnnnnnnnnnnnnnnnnnnnnnnnnnnnnnnnnnnnnnnnnnnnnnnnnnnnnnnnnnnnnnnnnnnnnnnnnnnnnnnnnnnnnnnnnnnnnnnnnnnnnnnnnnnnnnnnnnnnnnnnnnnnnnnnnnnnnnnnnnnnnnnnnnnnnnnnnnnnnnnnnnnnnnnnnnnnnnnnnnnnnnnnnnnnnnnnnnnnnnnnnnnnnnnnnnnnnnnnnnnnnnnnnnnnnnnnnnnnnnnnnnnnnnnnnnnnnnnnnnnnnnnnnnnnnnnnnnnnnnnnnnnnnnnnnnnnnnnnnnnnnnnnnnnnnnnnnnnnnnnnnnnnnnnnnnnnnnnnnnnnnnnnnnnnnnnnnnnnnnnnnnnnnnnnnnnnnnnnnnnnnnnnnnnnnnnnnnnnnnnnnnnnnnnnnnnnnnnnnnnnnnnnnnnnnnnnnnnnnnnnnnnnnnnnnnnnnnnnnnnnnnnnnnnnnnnnnnnnnnnnnnnnnnnnnnnnnnnnnnnnnnnnnnnnnnnnnnnnnnnnnnnnnnnnnnnnnnnnnnnnnnnnnnnnnnnnnnnnnnnnnnnnnnnnnnnnnnnnnnnnnnnnnnnnnnnnnnnnnnnnnnnnnnnnnnnnnnnnnnnnnnnnnnnnnnnnnnnnnnnnnnnnnnnnnnnnnnnnnnnnnnnnnnnnnnnnnnnnnnnnnnnnnnnnnnnnnnnnnnnnnnnnnnnnnnnnnnnnnnnnnnnnnnnnnnnnnnnnnnnnnnnnnnnnnnnnnnnnnnnnnnnnnnnnnnnnnnnnnnnnnnnnnnnnnnnnnnnnnnnnnnnnnnnnnnnnnnnnnnnnnnnnnnnnnnnnnnnnnnnnnnnnnnnnnnnnnnnnnnnnnnnnnnnnnnnnnnnnnnnnnnnnnnnnnnnnnnnnnnnnnnnnnnnnnnnnnnnnnnnnnnnnnnnnnnnnnnnnnnnnnnnnnnnnnnnnnnnnnnnnnnnnnnnnnnnnnnnnnnnnnnnnnnnnnnnnnnnnnnnnnnnnnnnnnnnnnnnnnnnnnnnnnnnnnnnnnnnnnnnnnnnnnnnnnnnnnnnnnnnnnnnnnnnnnnnnnnnnnnnnnnnnnnnnnnnnnnnnnnnnnnnnnnnnnnnnnnnnnnnnnnnnnnnnnnnnnnnnnnnnnnnnnnnnnnnnnnnnnnnnnnnnnnnnnnnnnnnnnnnnnnnnnnnnnnnnnnnnnnnnnnnnnnnnnnnnnnnnnnnnnnnnnnnnnnnnnnnnnnnnnnnnnnnnnnnnnnnnnnnnnnnnnnnnnnnnnnnnnnnnnnnnnnnnnnnnnnnnnnnnnnnnnnnnnnnnnnnnnnnnnnnnnnnnnnnnnnnnnnnnnnnnnnnnnnnnnnnnnnnnnnnnnnnnnnnnnnnnnnnnnnnnnnnnnnnnnnnnnnnnnnnnnnnnnnnnnnnnnnnnnnnnnnnnnnnnnnnnnnnnnnnnnnnnnnnnnnnnnnnnnnnnnnnnnnnnnnnnnnnnnnnnnnnnnnnnnnnnnnnnnnnnnnnnnnnnnnnnnnnnnnnnnnnnnnnnnnnnnnnnnnnnnnnnnnnnnnnnnnnnnnnnnnnnnnnnnnnnnnnnnnnnnnnnnnnnnnnnnnnnnnnnnnnnnnnnnnnnnnnnnnnnnnnnnnnnnnnnnnnnnnnnnnnnnnnnnnnnnnnnnnnnnnnnnnnnnnnnnnnnnnnnnnnnnnnnnnnnnnnnnnnnnnnnnnnnnnnnnnnnnnnnnnnnnnnnnnnnnnnnnnnnnnnnnnnnnnnnnnnnnnnnnnnnnnnnnnnnnnnnnnnnnnnnnnnnnnnnnnnnnnnnnnnnnnnnnnnnnnnnnnnnnnnnnnnnnnnnnnnnnnnnnnnnnnnnnnnnnnnnnnnnnnnnnnnnnnnnnnnnnnnnnnnnnnnnnnnnnnnnnnnnnnnnnnnnnnnnnnnnnnnnnnnnnnnnnnnnnnnnnnnnnnnnnnnnnnnnnnnnnnnnnnnnnnnnnnnnnnnnnnnnnnnnnnnnnnnnnnnnnnnnnnnnnnnnnnnnnnnnnnnnnnnnnnnnnnnnnnnnnnnnnnnnnnnnnnnnnnnnnnnnnnnnnnnnnnnnnnnnnnnnnnnnnnnnnnnnnnnnnnnnnnnnnnnnnnnnnnnnnnnnnnnnnnnnnnnnnnnnnnnnnnnnnnnnnnnnnnnnnnnnnnnnnnnnnnnnnnnnnnnnnnnnnnnnnnnnnnnnnnnnnnnnnnnnnnnnnnnnnnnnnnnnnnnnnnnnnnnnnnnnnnnnnnnnnnnnnnnnnnnnnnnnnnnnnnnnnnnnnnnnnnnnnnnnnnnnnnnnnnnnnnnnnnnnnnnnnnnnnnnnnnnnnnnnnnnnnnnnnnnnnnnnnnnnnnnnnnnnnnnnnnnnnnnnnnnnnnnnnnnnnnnnnnnnnnnnnnnnnnnnnnnnnnnnnnnnnnnnnnnnnnnnnnnnnnnnnnnnnnnnnnnnnnnnnnnagctgtggtgggctccacccagttggagcttcccgctgctttgtttacctgatcaagcctgggcaatggtgggcgcccctcccccagcctcgctgccgccttgcagtttgatctcagactgctgtgctagcaatcagcgagattccgtgggcgtaggaccctcccgagccaggtgtgggatataatctcgtggtgcgccgttttttaagtcagtcagaaaagcgcagtattcgggtgggagtgacccgattttccaggtgcgtccgtcacccctttctttgactcggaaagggaactccctgaccccttgcgcttcccaggtgaggcaatgcctcgccctgcttcggctcgcacacggtgcgtgcacccactggcctgcgcccactgtctggcactccctagtgagatgaacccggtacctcagatggaaatgcagaaatcacccgtcttctgcgttgctcatgctgggagctgtagaccggagctgttcctattcggccatcttggctcctccgtgaatccgtttcttaatgttttacactattctttgtggtaaagtgtggtttccattttaaattacatctctcagaataataggcagctctgaaaggggttgtagagaccatctaacagtctgatttgtagatgaggaacctgaggtctagagtgttgaaaacccaagtcccacagctgattaccggaagagcttagcctggcacccaacactcctgatgcctaattcaggtaggttttcatccaaagtccaagccacatatattaaaattatactactatttggatttatgacatagtagtacaaataatcatatttgtgatactccaacttgagtagaactcataggaaatcttgtctctgaagtcggacttcatgtgggtatattaagccaccagacttttaattattctaactctccaatattacctcatctgcaaataaacaataggtttccaaaggtctactggtaaaatttctcctctttattggaaataaataggcagttgttacctatgcaataattatttggccttacaatatcatagtaaagataaagactttagaaaacagggaaattttaagacctgagcatgaaagaaattgaagacggtgatattaatgatgttaaattagctgttacatattttatcaacattgtgagcacttgcatttagttaaaatttcagtcttatcccgtgatacctgtcctggtttgttatggcataaaggaacattcagtttaaattttttcgacttgtatttttaatgatgtaagataggatgcgtacaggaataaatctatagcctaattttacgtgagatatttctcagatattgatctagagtatcacatgtaaatttagagacttatctataatccctttccttttatgttttccacagacaacttatatatatgtgtttttgtttttgtgtgtgttctgattttagatttaccttttccaggtgtacttctctgaagtaagatgatttgtcaaaaattctgtgtggttttgttacattggggtaagttatttgctcatttgctgttttaatgcccttaaacatggtagagattttgcctttagagatgctgttttatttattagctaacagaatttcctatttctagttaggaattctcatacatgcttatgattaaaaatgcaaaccatagtataggtgtatcagtgtgaaaacgaaaacccttcccaacctcctaaagacaacctgatggtgtatccttccagaatcctctctctctctcacacacacacacacacagactcacacacacagactcacacacacacatacacagacacactcatatctatagctgcaaaaatagcactggtctgtacatgttgttctggatgtttatttttccatttaacaggtttccaatttatcatgatggctttttacctttatcagtatttaccgggatacttattagtttaatggttgcatgacaatgcactgtatgaatatatataaaattattagtctatttgaccaattcctgattgatagacatttctttttctgtaacaaataatactgcattgaaacttcatgtgtctttgtatatttggaaaaatatttctgtagattaattctttttttttttttttttttttgagacgcagtcttgctctgccgccagactggagtgcagtggcatgatctcagcccactgcaacctctgcctcctggattcaagcaattctcctgcctcagcctctcgagtagctgggactacaggcacgcgccaccatgcccagataatttttgtatttttagtagagacggggtttcactgcgttggccagatggtctcaatctcttgacctcgtgatctgcccgcctcggcctcccaaagtgctgggattacaggcgtgagccaccgtgcccagccgatacattgccaataacttttgagcatactgttctcacgtgtttcttaccacattctggtgacattctgatttccttaaaccaaatcatctaagttagattgtgttccaagtttttgaaattaaagttagagtatctttaacaaaacttatgtgatttggcaattgtttatctagctttctttaacaaaacttatgttgtggcaactttatctggcagctgttacctgtgtgtcaactgattctgagcatctccttggctaccccaatctaaaggggctcttctaagcttccctataggtcttccttgtggtacatacttctctttcattgcagccatctgtatatttccagaaaataacctagatagctccaccattacagatttccaaaaaattatgccacaagggactatcaaagagaaataactcattctctttttatattctctaattttattagatatatttaagggaactgttcattctcttttataattctctattaattttcgttagactctagtgttttacattgactttctggaaggtttctggtttgatcaagtttttgaatcaaaagaattcctgggatattgttacctgataagatatgccttcagatgaaaattctagaccatctttagagtttaggattcatttggagggaaagaaatatcatttgcaaagttgcatgtggataaaatagactcatcttttaatttaactgcatcaatagttgctatgtttttaaagttcatcattacattttacatttaaatacttctgtgaggattttaggctaattcatttcaagcaactgaatcctctatgtagacctagaatatataatgctgtaaattagtaatattacatattcttggttttgtaaacctcctccctcaaaaaactattctgttttctttgaggtgttctgattttagaaacatgttagaaggagtgaagtccaaaggaacataattgtaatatggatttacttttggtaatgttgtgatacctaattgttatcagtatggccatagtcacatttgtcacattaatcactttggcctcaatttttgcatctatacctatttatattaatttatatctatagaaatctttagaaaccaaactattaacagtcattacctatgtattgtttgaatattttcactgataattgcttttgtaatgaaaaaatacatttgtgaattgattaaaaattttattttcttacatttttaaaaagcctttattttttagagcagttttaggttcacagcaaaattgagaggaaggtacagagattttccatagactccctgccccacacatttataaccccccattatcaactatcccccctcagagtggtacatttgtcacaattgatgaacccatactgacatatcattgtcactcaaagtccatagtttacattatggttcactcttggtgttgtatattgtatgaatgttgactgatgtatgtatagtgacctttatctgcagctgtagaaacatacagaagaatttcactgccctacccatcctttgtggccttcctattcctccctccttcttacctaactcctgggaactgccgatctttttactgtttccatagttgtgcgttttatagaatgtcataatgtcatatagttggaataacatagtatatagtcttttcatactggtttctttcccttagtaatatgcatttatgtttcctccatgtcttttttttcctctttaaatttttatttttttagattcagaggttacaagtatggttttgttacatggatatgttgcgtagtatgtacatcacctgaatagtgaactttgtgtacaatactacttataagtgagaacatgtggtattggattttctgtttctgagttatttcacttagaataatggcctttagctccatccacgttgttgcaaagtacatgcttttattcttttttatggctgcatagtattccatggtgtgtgagtgtgtgtgtgtgtgtgtgtgtgtgtgcatgtgcatgtgtgtgaatatgccactttttttaatgcagtcattcattgagggacacttaggttgattccatgactttgctattgtgaatagtgctgtgacaaacatatgaccgcaggtgtctttttgttacaatgatttcttttcctttgagtagatacttagtagtgggattgctggattgaatgatagttctacttttagttctttgagaaatctacacattgttttccatagaggttgtacaaatttacattgccaccaacagtgaataagcatttccttttctctgcatcctcaccaacatctattattttttgactttttaataatggccattcttactggtataagatggtatctcattgtagttttaatttgcatttttctaatgattagtgatattgggcatttttttcatgttcattggctgcttgtatgtcttcttttgagaaatgtcttcatttcttttgccttctttttaatgggattatttgtttttttcttgttgagttgtttgagttccttctaaattctggatattagtcctttgttggatgcatagttctggaagagtgctggaacctctgtatcttttcgtgacttgatgtctcatttctttttagccctgaataatatttaattgtctggatgtaccacaatttacccattcacctactgatgaacatcatgtttacttctatttccttacattattacatttgccaaactcttcaaaattctcatttcatacaaatccatacaagattctcagaattcgtattctgcattagtgtctatataagccaacacaattgttgcatcatttgggtaacttactgaaaaaacaattatggagaattattttattttcaaacaaatatttaaaaataagtttggctgggtgcagtggctcatgcctgtaatcccagcactttgggagaccaaggtgggcggatcacctgaggtcaggagttcgagaccagcctggccaacatggcaaaaccccgtctctactaaaagtacaaaaattaaccgggtgtggtggcaggtgcctgtaatcccagctactcaggaggctgaggcaggagaattgcttgaacccgggaagcagaggttgcagtgagtcgagatcatgccactgcactccagcctgagcaacaagagcgaaattccatcttaaaaaaaaaaaaaaaaaagacaaggtttaacttttgcagatcttttggtacaggattatataattgttcttaatttttatatttaaacagtgataatttaatcagcagtgggcatttcccataagaagtctattcttttgcatcattttttgtgtaatgtgctaagggcatgtcttatatgatgatgttttgtatttggaggatcatgggaaaattcaggagatcatcaagccatcatcatgttgaagacaaattctttctaaaagtgctcagcgaaagcagtgttaatattttggtgttactctcttaaatacatattaaaatagcactttaatgtttgtttatataattgcacatccagatatttatttatcatttatactggatattatatttatcatttataatggaagctagaataatatgctttagaaaggaaaaataaaatattcagtgtttgtttccttttattaaaacataaatataaaatgtcagcttaaagagaaaacatgaagtgtgagtcttcaaaaagaaaagagatgtcagaaagtggagtaatttctacaaatgaatgcatcctcttgaatgtaacacattgtacaatggaagcacaaagttattcattagacactcactgaggacttagaaagttaaataattattgagcactacatggtttaatctcagatactttctattcatgtcttagtcaaaatgattacttttttctatgtgtctttttaatatcctaacagaatttatttatgtgataactgcgtttaacttgtcatatccaattactccttggagatttaagttgtcttgcatgccaccaaattcaacctatgactacttccttttgcctgctggactctcaaagaatacttcaaattcgaatggacattatgagacagctgttgaacctaagtttaattcaagtggtactcacttttctaacttatccaaaacaactttccactgttgctttcggagtgagcaagatagaaactgctccttatgtgcagacaacattgaaggaaggacatttgtttcaacagtaaattctttagtttttcaacaaataggtaagcattagctattttttaaatgtattgaacaatgttttttaattctttgatacctgtatgaaatagatgtcttatggctatgattttaacatacataatcatttttatatggataataaaattaggattcattatgtgaacaaactaataaataatttccaaattatcttgtatcccataaaaatataatgagggaattattttacttttaagtacattccttgtagtcttctaaatttgctttgaaatagaaaaacacaccttatttttgttaaatgtataaaatatcaaatgactgataatattgttgaattggttaaattttaaaatattcatgaataataataattcttcaggcaaggaatatctctgaaagaatatacgttttaaagatgggtttttcagaaagaatagctaatggatgctgggcttaacacctaggtgatgtgatgatctgtgtaacaaactgctatagtacatgtttacctatttaactaacctgcacatcctgcacatgtacccctgaactaaaaataaaagttggaaaaacaaaaaaagaaaagaaaaaaattctttttttttgtttaagtataatgcatactgattgtagctagtgtagttaaaaattctgcatctggaaatataaacaacaaaattatcccaagtcttttggaaaagctaggaagagtggagtcaattgactcatccatgtagagagacctccagtatgaaaatacaggcatatcttttcctcccttaaaagcgtgatgattgggttttcacatgtatgagtgagatgtgcctccctcagaccttgttatgatgttggcacattacctgtctaatgttaaaaaaaaaaaaaaaaggctgggcacagtggcttaactgcctgcaatcctagcatttaggaggcctaggcgggcggatcacttgagctcaggagttagagaccagcctgggcaacataatgaaaccccatttctcccaaaaaaaaaaaaaaaaaaaaaaaaaaaaattaactgggcatggtggtgcatgcctctagtcccatctacttaggagactgaggtgggaagattgcttgagagatggaggctgcagtgagccatgatcacatgatcatgccactgcactccagcctgggtgacagagtgacaccccatctcaaaaaaaaaaaaaaaaaggaaagaaaaagaaaagtgagaactgagctaggtgagttttgagctcttttgtcctatttaagtggtttgaaattaaagaaaatttgagaagcaataattgaatttaattctattactttagaaaaaaggaaactgagggccagagggactaagtgatgggcaaacgcatgccactagttaaagcttgttctttttctctcagaataggcaatggaagttgtatcagaacactggtaaatttgatttagctcttctctttcactgagttgttcagatggtttttgagatttcatgtagttgtttttttttttttttttttttttttttaaattcagatgcaaactggaacatacagtgctggctaaaaggagacttaaaattattcatctgttatgtggagtcattatttaagaatctattcaggaattataactataaggtccatcttttatatgttctgtaagtaccaaataattaatttggcatttctaatacacagtttttttaaaagagctttcatatacggaagtagattataaacctcttgcatccctacatttcctattatatgttttattttttaatatagcattctgctctgttaggtttcctcttttctcctcctgctaattgaggtagcaagacagtcaggtttagggtcacgattgtcaggtccatgagtataccaaatgttcagttcaagttcaggttctagctcacactgaggtccgaagggagtgggtggatgggcaatagctgaacgaacactctgggggccttaaacaggtgaaacgtagttttattcagcagctctctatcagcagcttactcaaactaggtctctcattagcagctctcttagcagcagctttctctcactgtctgctctgttttgactgcttgggccagctgctcctatgcacagctgcacggctggctctctcttgccttcagggtcagcagcttaactctttctctctctgggcatgaacgtgaaccatgctgtgccatgttgtgccatgctgagccatgccctggctcccctcgtcagagcaagactgacagctctggtactctctctctgggtacaagagcgcctgtacaagaacatctgtagagtgtcagcagggcaattataccttttacagacaacagtggcatatggccaagggatggccttcccatgttatggctacatggctgtgataacagatggagttatatgcctgcgcactactcgctgagtcatgcaggcctggacatctgccttggcctgattcttgaccgaagcacatccatgtaccttacaaagatattgcaggtataggtgggcatgtagtctgaaagaagagtgaactcagttcaggagtgctagatatttgagtggaaaaggaaaaaaggtgcgttttatatttctttttcagatgatttttcgtattcgatctctttataaacttaaaaatatgggtggctaatatttgtgctagaaagagaacaaagatattgttttcaaatagccatatacttataactcaaacagcgaatatgtcattaagttttctaattactctagtgatgatatacaccatttttatgtcaattttaactctttaaaattctttctcattaattcttctatttgatgcttaaagtctcgcttccttcagttctgcagttattgagataataccgttgaggagcaatgtgctagaaactgtccctatacaaatgaatagagacagaaagtaaagtggggctgagaggagggggaattggggagttactgtttaatggatataaagtttcaatttgggaaaatgaaaaatgttctggagttggggagtggtgatggttgcataataacgtgaatgtatttcatgtcattgcactgtacacttaaaatggttgaaatgttaaattttatatacattttattacagtaaaaatttaaaaagaaacttaaagacatgtaaaaaaggatgaatggttacgatcactgtcctttaggtgctcaaaggctagcagttgggacctgtatgtacagagtttcagtttaagtggttaccgatatgtatttggtaggtacataatgtcatgggagcccatcattgttgtgagatcttagatgggggttatctagttaagctggtgagagaagagaggaggaaaggtttcctaaggaaggagatagctgagttgagtcattagagataaataagagctaatgagaaaatatgtgggcagtgtagtgttgggaagagatcagtatcacctggaaccttgttagaaatttaaatttgcatgctaaatgacgagttaatggttgcagcacaccaacatggcacatgtatacatatgtaacaaacctgcacgttgtgcacatgtaccctaaaacttaaagtataataataataaaaaaatttaaatttgctagctcacccctgtgaataaaaaattagggggggtggagctcattaatatatgttttgccaagtcctttgggtgattctgatggaactcaagtttgaaaattcctgctgtagaggttaatatgacagattttagagtcagactacctggctgtaccacttactaaatgcactcacaaagcacttgctatgtttaacagttgttctacctctagaaattaacacaatggaaatatttacacaatgtttaaaaattatttgttgaatgaatacatattgccaaaatgctttctaaaatattttccaatttaccctccagaaatgtcttaatgagccaaaaagttaataaaaaaataatattgtctgaaggtgtgagtagtgagtagtcaacggtcagatatagcaggaagatataataaggtctgaatgatatgtacggatttggcagtgtgaaagtaatgggtctttaggcagagctcattcgggggagcggaaggagaggttgccagaacaaagggaaacttgaagaaaggacccggaagagctgatctttatgctagttcctcattcagttgatggggggacactgcagagctggaattcatatatccaaggcatactatggctggtgctgagaatatgaaaaaaacctggttactgggaccaactgctgctgcccaggtgaggaacctttggctggagtgatatttcaagaatggtaggcaaaacaggaaggatcaactcccttgtcactccattattctagtctctttctagctcccccacaggtagaatttaacaagaatttaggtagcagaggagaactatggtttgcagagttccagccccagcatggtgaaacagagcatagggtgcatttgaagatggcagtcaatagcttaaccaccagcaaaattcacttcattggctcattggctacttagaacattcacacacacctttctacgcatacctacctttccctacaacttccttataacttcatgctttcacttaattaagtgcaactatactttaaaaaaaaaatcaaaaagatcctttatttcatgtgtatgtagtatcataattcatcaaaataatttataatagttaactgcccctcaaatattgttttataaatgatgccttctgaagttaaacataatgtagattcattttttaaaaattgtctgtttagaacatactaaacaaatgataagttaaaaaaaaatataattctctcctgtgaagtcttctaagaaaatcatggcaagttcctgataagataaaaaccattccatcattaaaggggattaaaaagaggcataaataaatttgaataggaacatctgtttgctgagttttttcattgtgtacaaatgaaactctagagttaaaattatattctgatttccttctataagcaagaaattccttaatagaagctcagaaatgacctcagtgccttggtgaaacatacttcttcatctgcggacactcagtgctcccatctctatcagatctgctgtgttacctctgttaacattcccaggcatctccaggaagacgggagatgtcatcctctccaagatggctctaccaaaccaaggctttcctggcaccaacaacgttctttctaaagccctacacttcacagaggaggcaaagcccgacgaagcaccatttctgccacggtgtccaccttaagcttccaactgccactgttgtgaggaggagccatcacagattgccatagccacagagtcttcctgaccctgtggagccactgctctcaggcactgtccagctgacgtctggtgtagccaattattttccccaaaggtccatgtctgcctgacccatggcactccacgagttgtggtgggtctgatgagctagtttctgtcatacctagacaaagaagatggtttaaaaccaattcatgctcttcattataaatccagatctgatttgtgtccccatgctcacaagtcttaagcactagtaggcctcctttccaacttgggcagccctgagccaccagacatttgttggtctggaggtgatagagccttccaagttgaaggactttggggcattttggccctctactgataaaagtgggttgctgggatttgtcatgggtcccagatatctgcatctttgggtaaatattacccaaataccattcaaatgatttgcatcctaacttctttctcaattcaacatgctcactgatggttccaaagcttttcctctccagattaagtcttaaggaaaaatactgcgcctttattcatccagccagacatgtgccagctgcaaaaagttgtgttcatggcatcccggccttcaggagatccatatggtcccctttttttggaaaatgtgtcctactgtagagcaaggcatgatgaagaacttacctccacacacccagatctgaaatgttatttccaagttttctcctctccagatatccatgccagtatcatactgtccaagttcctggaaatactgtctgttcctggcaaacaatcctccagccattatcggtgactttgttggtgctgtggctttttctgctcatcctagctcagaaaggggaacaagctcctatttgaagtgcagccctcagttgaatcccccacggacaacagaggatgagctgtaggctagcgtgttggcactaatgatatcaatcactgagaacatcatggtctgctagtccacacagatgacagccagcaagggctgctgccacatcacattcacttcaattggctgtctaggaacacaaggacttctgttgtgtggactgctacactcattcttccttgaatcaatccctcacactttatgtttcttataccttaatttttccaaggaggtatttttggacatattcatctcgtcctcctttcaagtcatcaaggtcgctaacaacatccataaagatgatttcatgaagcaggtttgctggcatgcaatttgtgacaatgtgcagcgtctggagacagggcagaaaaagcttcattgtggaaacagataacaattatgtaagcaactggcaggtcaggaggtaggactttacatgctgtattctttgtccctggcacatctctgtggtagcctgcagttactgataagcatattaaaagcacatttctgatagcccgtctctcaactcctgagcacgttaattaaaaatcatgcctagttcagaagacaatttcaagtggcctttttctggatcttcaatatgaccatcacatcatcaattttgtttgcttcgaactgtggctctagtaatagacttggaccttgagtgaatcaggaatagaattgttttggaaatggtccatggggtccaggccccttgagcacattctttttttttttaatatagtttaagttctgggatacacgtgcagaaagtgcaggtttgttacataggtatacgtgtgccatggtggtttgctgcacccatcaacccgtcatctacattaggtatttctcctaatgctatccctcctctagcctcccacccccctacaggccccagtgtgtgatgttcccctccctgtgtccatgtgttctcattgttcaactcccacttatgagtgagaacgtagtgtttgtttttcggttcctgtgttagtctgctgagaatgatggttttcagctttatccatgtccttgcaaaggacatgaacttatccttttttatggctgcatagtattccatgatgtgtatgtgccacattttccttatccagtccatcactgaggggtatgtgggttggttccaagtctttgctattatgaatagtggatgagcacattcttaagtggctgagtcacttcaccgaagttgaaatgaacaaaaaccaaaactgcacaggtcacagatgtaaaaatgtacccataacagaaatattgaactgtgacacttcccataatagacttagcataactaatgggccattttcaatttctgcagcactggcagtggccttccaggactcaggctgtggcatctttcctcctgccacagcccctgtctgagccacaggagctgcccagggggtgaggagtggtgggctacactttgaacaaaaggagacagtcttattctctctcccaaatgggatgatgctatgtcacagttgtcattatgttttctgtgcaacatgtacagtattgctctctgggcagtattaattgctcctcacattcaatcactgtttcacctgaatgaatattgtggaagctaaatataaaattgtaaatttaataattccaggaatccttatataaaataatagggggaaggaaaagattgagaagaaattagttaatatatagaaacacacacacacacaagcatactgtaagggaggaaatatgcacagctgccactgctcttctttctgtattgattaccaggctgtagttaatatttattactagtgttagaccactggactaattctttaagtcacccagaggaggaacccagatatagtgccactgccatcatatctggacattgaatgtccctgtggtcatcatttccacatggaggtcacctgatgccacgactgatgaacctacaagcccctgcatctttgtgcaatcgtcatgagggctagtgtctcagatgtagttatctagttggtgagaaggtgctctagctgccagtgtttcagccttgtatgatggtagattcttcagtcagatattgggcaaccagcaagtagacaaatgtccttaacaaaagtgactgagttataaatctctagaggcctgagaagcctggctggggttggaaagtggaggtggaagactaatggataatgaatgtcccagggtggataattaaaggatgaaatcatgagtttgtttctagtctatagaaagtgacccagcagggagagaaaagttgataatcgaaggggagccattgaagatattttattgagagtgaataatggaataggccaattccatgaaaagagcacagggttggtcttaaagaaggtttacctcaacttctgagtattgagagaagaaaggaagccctatggtggatgaagatatatttgaagctcagggcagtttcctgctttattgagcaaaataggttttagctcagagaaaagtattcctttgcatagtagtaccttcttgcaatgacctaaatgctttggatgtgattaaagattctcacttgggtgcctactctagacaatttctgatcttatcagcaggttaaggcaaaatgctcagttttaaagccccgtgaatatgtgtaagggcttaaattctattatgtatatattataattatgatgaggtatttttctgaaaaagataagtatatgtgtaatatatagatatatataatttcagagcattataaatttgaatagttacttagttatagctgagaattttagcttcagtttagtcagccaaacagtcattggtctattcttctaaacaataggacccagaagaatgagaaaattaggtaaattaggtagattttcaaactttcttacaagatgatttttaatttggtcttcttttacttggaacctaggtttctaaaaatattagcacagtaaaacctgtcataatttcaaggaatttgagaaacagtctcccatttttttcctgccacattatatacctctatgatttggttaatatgttcattgcaccaactatcacatgctgtttctgcctttaattctatttttgtttggctcttaaggcaatgtatctccaaacaattaaataggactctaattcaataggtagagctggtcaatataggaagagctggtcaatataaccaatgagaactccatggaagagaaaatccataatggtgattactacagaaaagctttgaatcagactcacctattttggacatcagagaattcacaagagaaattttcaaatgcttccatgtgtaaaaaagtatattttaaaagggataaaatctaatgtttgtaagggatttaaaaccatataaatatgtcccttaagggaaagctttgtttgggctcagatattaatgtttgtcagagagtctgaaggacagatactctagaaatgtaatattttgaaactgctctgagattttctcttagatctaggaaggaaattctctttctttattaggtgcctactgtgtgttccaggcacggagctgagcatggggaacaaggttctacaacacagactcagcccttgccctcctggagctaacattctgtagtaaaaacagaagacataacagcaaagtttggaaaggctgtgctgtaataaatacagtgccttgtggaaacaagtactagggatatccagcccaggtgaagagggggtagaggagaatgagccagagagtgaagaacatttgcaaaggcccagaggcacagataccacatggcaggacttgaaaagttgagtgtggtgggactgggaagctggggaatgaagagaaatcaggatggagggatacacaagggtcagattatgaagggccctccaggtcatgcttggagtttgggcttctataactactaacacctactttactttgttttcacaattactcctgccagcattcttgatgatttcagcatccatgtgattaatcttcagtttcttgaatgcttattttcaatattcttgtattttcacaccactttgttcaccccttgtcatggacatgctcgagactttgtcatcaccaataagcatgctttttctataatctccatgtcaagaatcctgctctttgaccatctccccttgcacccttcatgttagtttattccctctactactcaacttcaggaataattctccatggttcttggctcccccttctgggtgccaggttctggcctgagtaaccctctcttcttcatgaaaagcagcccatatgcgcatctaagttgttttcacagcctgctttcctaccagcacaatttttaatggttgaaaggctttttttttttttccattttgttctgtctctgtctctttctgtctctatattagcactatttctgctaatacacttctctcacaaaactacctggacctccagtggatctctctggtgttcactccattagatatgataaaagcctgcaaatctcctagagatcttttctctgtcttctctttgatctttgctcagaaggcatttcttaattttaacagtgtttgctatctggagaggctagacacttcaagactatgaagtcctctttccttttgtttaagggccctttcttcaatgtatatctctcctcttacagcaagaagaaaccaagagacatccgcaacacttgctggaaatctccttaaatatatcattcagttcaataggcacattctatactttccacataactacagatggtaatgttaatgagctctctgctactacacaagaaggaccactgttctccagtttccaataaattatctctcacttccttttgtgccctcactggcagagtctttgaagtccgccagatttctactaacagcctgttcgaggcaatttaggttttcttcaccatgcttctccaaatccttctagcctctgtctgtccgctggttccaaagccactcacacattttcaggttttcattatggcagcaccccactttcaagttccagtatctgcattagtgatctaatgtcatataataaattaacccaaaacttagtggcttaaaacagtaatcatttattatctcacaatttctgtttttaaggaattcagctgcagcttagtgtggggtggaatgggaaaggagtatctgcttcagggtctcttacaaatactgcactgaaggtgtcagccaccaggactgcagtcatttcaaggttcaacttcaggaggagctagttttgagataaattcttggggttccaagttcttcatgggatgttggactgagggcctcagttcctccctggctgtcggctggagacctccttcagttccttgttatgtggatctccccataggacagcctgcaccattgcagctggctttcctgagagtgagccagagagactcactgatgatcttgctttttattttcactgagacaacagaagcaggtggagtttctctaatgattgcttttctcacccaaatctaccaggctgcctgtatcagtgcccatgcacttttcctctcttcttttattgtgaataaattctttgagttctgatctaaggcgaaccctttgttacgtgttctgagtcccgtctcttattgtcaactcaaggactttcttgccattatcctctattttctgcaccatcatgtttctctctcagctaatagacacgatataataactcccatttaaaaaaataaattttctctgttacacatttctgtcaagtaaccaccccatttcactacttcttttaaagaaaacaaagttttgaattgtatgaatacattatatcttcaaaagttaataaaaaagtcaacaagtgactctggccacgagggaataagagggtctggattactctcctgtgataaacaactagaaaactggaaaaaaatgtaggaaataattattttcagacattggacaaagacagacagaactgtgattcctaagagaaggaaacaaaatgagtactcctagtacttaggctttctgaactgtagaaaattcccagaacatggcacagagctgaggaactcaagctgagcccaacaatcttgcagagataagagttcagagagggtaaggggctcaagttcatggggcagagtactttgaaagcaggagcatacagaaaaacttacagtggggccactttaactctttggctgaatatcaatctggccacaatgttgggtaagaaaaacttctagtaagagaacagttatcagggagctataagctaaacaattcacagaattcatagaggtctgggaatcgttcaagttcccacaaaagagattggagagaccttaatgggtatcagtgacatttcgtaggaactccagaagagctatactttaaaggtggggccaaattagccttagagtcaaggctacactatactattccccaaaatgcttaaaggatgccctaaaagattcaaattagtgctcaagtaacttaactgactttcagaacaaaatccaacactcttcaaggcaaaataaaacaatgtaatattcaaaaatgaaataatcacagtgtctggcagccagtaaacacatgctagatatatgaaaagataggaaaatgtgacccataaccaagagaaaaagaaaaaatagtcaatagaaacagacccggaaatgacagaggtgatagaattggtagacaaagacagctatcattaatatgctctacatgttcaagaatgtaaaggaaaatatgaatataatgagacaggaaattgaagatgtaaaaaagaacccagtgacatttttaaagatgcaaaatgcattttttgtaaacaaaaatgctaaatattaatttgggcatttagaataatgttattcaatacaatagtatttatggtgtgcagcccatagtgctaggctctgtaagggatgcacttttcattctccttcccttctttcctttctatcaggatggactcatggattcttattttagtttgtgggctacaaaagttacatcatttattttattactgaaatcgtctttctttctagcagtataagatgtaccaggttgatcttatacttttcctgatataacactggaattagccatttctccaaggagccatcgttccttttgttgaagaatggtatttacaaaccagtgtctggaggatagttgttcgttgttattgtttctagccctctctgtgtgcagagctagttagtgcacacaatatatacacaatgtgtgtacataatatacacaaatctatatatctatatatctctgtatgtacatgtattaaagggtgtgtgttcatactaatatgtcccattctaggccaaaactgcacagtccgttctaaacttcttttctttctgttttgtaactttcttctccagcagtgagaaagaaacctggcttccctttcccacagtgtgttacttatttgctcagtgctagaatacacacaaagcagttttagcattgctatcccatactgctgtgaaaaatgaaaacaagcgtactaactgaagtgcaatattgtttacactcattttgcctttactaaggctaatgggtacatggtcaaatattatgttccaaagttaaataggataggtcttccctctcccttcaggtggttatattattaacttgatagacattaagttctgtttgtttcagtttgcattcttctttttttcccactttctcttctctttgttgattttccatttatttggtgatatcttacatctgaagagtactttgcattttacaaaatgcttcttaaactttcctccttgataagatttatctaggtcagcactacttacttggcattcaataggtctgggtggaactagattgcttgcatttattcagaacatagattgcttagctctggaccttctgaattcctcatggggtctaggaatctattttttcacaagttctccaggtgatttttatgatgagtctagtctgggacaataactcagtctcaaattattttggattggcaagagaaaattttgaggtaatgtttttatagattaccaatctgaaatttaaaataagtgacttgattaaatgatttacaaaactaatactaaattttctaattccacttcattggtttgttcactattttgctgtcagtttacattacaatcagaaaattaggtggcaccaatttggtgttattcctgtaataatttagcatagaatttgcttggagaagctttaatatattcacattttctgggaagaaaaattggaccaaaagtcagaggacagaatgtgctttctttctaaaccatgtatggctaccaaaaatgaaattccaatactaaagaattatatctctaccttttgtgtaaaaatattaccaaaaaggcaaaaatggtaaagagacaaaattttaagttcatttgacaactgttttcatactattttcactttcaagtaaagtttatttacatgtagaggtattaaataaatagtggcactgagtttgtatatgcgtatatatactggtaaggcataaaatattttgttgcatataaaattttcaagaattccagaaattcttaatgtttgcttgttttaagccaagtatatctcctgttacttttaaaatttgatgatccttttattctcatactttaaaattatcaaatttgttagagtatgttttgatattagtaaaaacagagttcttaacttcttatactgactttggcatgtaacaaggttggtggattccaggtttcacacaaacttgggaaactcctctcacaaatacaggaaatagctaatgtttttccttaaagaaaagaatcatttgaagtaattatataattctctaattttccatttataaaaatattgacatgattcaggttataattattttttagtcatggttactatggtctttattgatctctaaataaaatggtgatgataacagtgaaatttatcttgtgacaataaggcacgttgggtgtaatgaaatgaatattgaacatgatgcacaagacttcagttgagttccaggtctaccttctctccaaatctcagttttcttacctgtaaagtagatgatgttagttccctcaaagggtgctttgaaaaactggattagataatattactaaaggtgtttcatgtaaattgtaataatgaaatttgatgatatatttaatgtgctttctctatttttgtgtcctttgcccatcaaatacccaccagtagggagtacaaaatacttttggcttatacctggggagggaaaattttcttttttcttaaagggccaaatagtaaacattttggggtttgtggaccatcctgtcttggtcacagctattcaactctgtgcttgtagaaaaacaattatagttggtatgtaaattgaattaatgttactacatttatgggcactgaaatttgaatttcatgtatcatgaaacagtcttttttttttttaattgaaaatgtaagtaaccattcttagctcacaggctgtacaaaaacaggcagatggctggatttggcctgtgggccagagtttgctgatcccaagcttagaacattttgaaattagttttagattgatgctgatagtgtcatgatggggttagctgttggcatggttacagaaagcttttttaaaaaccaacaaacaatgaattactataatgcatattttataatgtagatactatatagtcattattaaggatatatactctatatgatgttttgcatgtgtattacaattattaacaaaatgaaaaagagattgaataaatagaaaatacatcagtgaagggatgaggaaaccatagagttaatctgattttaaattcgccctttttttacaaatattcagtgtatttagaaaaggatggctttggcaagaccatctaaagtaagatgatgtgattctaacttttctttttgtcttaaaatatgactaaaattttctatcatttaaaatgttagcagagaatatatttgttgttttgtgctcaacttaggcaaatattcttgctttaaaattctgaagtttttcagccaaagcataataccttgcaagaatgtttccgacataaaacaccacaatttattcaatttgttcacagactttttgtaaaagcttttattttaatatttgaaaaacacctaaaaggtctggcttgatatttttaaaaattacattttgtttgctttgcttaaagatttagataaaatcaaaagtgctaaatcaggctacctctaattcaaaacaatattttatgggtggatagcattttacagttttcaaaaatacttttatgtgattattgtctttgatattcacaccgttgtaaacatagatggttcggggattgtcttggttttattgattcaggaacctgaggctcacaaatataaacttacttgtccatgatcctatggctaataagcaaacagaagtacttgattttagatctcaatgttaatttagtgtgcttttgacactaatatcccctatacagttcccagtagattccttggcacattaaagccatgcaaatgttgtttcagggttgattttttttagtagtaaagtaataataaattctattacttgaaaatatatcataattcaaaacatttagtattagtggggtatgcagagaaagactagggtctatttttcatgttttttatatctggatgctcatgtatatgctagtttattatagcttctaaagcaacacttttccatactgatttttaaattattacgtttgttaattacagtgttttccctctacaaggactgcaagatttctgaaggcagtgatcatgcactatctccctatccccaggttctttgaaaaacagtgtggtttcgatatgaggtagcagatattaatggatagaatggggcagcacaggtgagatgggtagacagaggcactgctactcctcacccttctccccactgctcttattctatagtcacttcatttacaccaagacttagactccctaaaggatgaggcagatttataaaaaatctagtaagtaagaaataacaactgtctgttcttggttgcatgctattattttttatgccctgtatttggtaaccctacccagctaattataattttttttttaagattgacctacttatttgaaggtttaaaatgataggcaaggtattgcttaacaaaaatttcctggattttctttctttttgtaaatagttttattgaggtatagttgatatataataagctgtacatatttaaattataaatttgacaaatattgatctgagaaatcactcataaaaccatcagtataataaagaaagtgaatatatcatcaattagaaaatttcttcctgctcctttgtaatcccaccctcatgctcctaccattggtacttcctcctcccaccccacctctgtccccagggaatggctgatctgatttctagcacatagcctactattactctagcattttttagaactttatataaatgcaatcatacagtactttgttgtgctttcatatacatgattatcttgagattcattaatgttgtttatatcagtatttcattcgttttgattgctgaatagcattccactaaatggttatattgcaatttgttcatccattcacctgttgataggcatttaaattgtttatagtttttgactgttacaaatgaagttgtcacaagtgttagaattgaaatatgttttcatgtctcttggataaatgcctgggcatggaatgggtacatcatatggtaggtgtgtgtttaacaacttaagaaagtgccaaactgttttccaaaattgtatcattttacattcccaccagcagtgtaagagttccagttcctccacatcttcaccaatacttggtgtagtcagtctttttttaaaattttaaccattctagtatgtggatagtgatatctcattgtgattttagtttgtgtttcttgagtgactaatgatgttgagcatcctttcatatgcttatttgccataactatgatttatatggtgaagtgactgtgtaacattttgcctatctttttaactgggttgtttgtattattattatttagttttgagtattgtagataccttatgtatacaaatcttttatcagatagataattggcaaatatgttctctgtgtatggtttgtctttttgttatctttcatagtgcttctcagaaaacaacttttcaattttgataaagtctaatttatcagtttgttcttttatggatcatgctttttgtgtcatatgtaagaaatttttaattaacacaaggtcacaaaattttttacttatgttttcttctagaagtttcatagctttaggttttacatttagatttatgattcatttggaattaatttttgtatctgatgtgaggtatggattaaagttcttttcttttattgcatatagatattccattgttccagcacaatttatcagaaagattatcatttttccacagaatttcttttgtgcctttgtagaaaatcagttgtccatgtaagtgttagtctattctagactctattctggtccattcatttacttttttttgtttttacatgaatacttcattggcctgattattgcagctttataatacattttgaagttaggtattgttattcttcaaaatatgttcttcagtttcaaagttgttttggctattctagattctttgcatttccatatgaatttttagattcatcttgtcaatttgtgtaaaatagcctgttgagattgtgagtagcattgcattaaatctgtagataaatttgaggagagctggcatattaaccatattgagtcttctgacccataagcacagtacatctctcattttagttaggtcttaataatttccgtcaacagcatttcatagttttcaatgtgcagatcctaaacatcttttgtcaaatacattacaaagtatttctatttttgatgttattgtaaatgatattttaaaataatttctgtttcatcagttatccaatataaattcagtatcataaaattattcatattggccgggcgcggtggctcacgcctgtaatcccagcactttgggaggccgagacgggcggatcacgaggtcaggagatcgagaccatcctggctaacacggtgaaaccctgtctctactaaaaatacaaaaattagccgggcatggtggcgcgcgcctgtagtcccagctacacgggaggctgaggcaggagaatggcgtgaacccgggaggcggagcttgcagtgagtcgagatcgcgccactgcactccagcctgggcgacagagcgaaactccgtctcaaaaaaaaaaaaaaaaaaaaaaaaaaaattattcatatttccttattatccttttaatatctgtagactgtgtagcaatatcgtgctttcagtttttatattcttaatttgtgacttctgtggtttttcctggtcagtctgtgatatggcttggccatgttcccacctaaatctcatcttgtagttcccataatccccaagtgtcatgggaggaacccagtgggaggtaatcatgggggtggttacctccatgctgttcttcactattatggcggttacctccatgataatgagtgagttctcatgagagctgatggttttataaggggcttttccccacattcactctgtacttcttgctgccaccatgtttgcatgtccttccaccatgatattctaagtttcctgaggcctcctcagccctgaggaactgtgaatcaattaaacctcttccctttataaattacccagtcttgggtatttcttcctagcagcataagaatggactaatacagtctggttaaagcttctttcatgttttaaaatcttttaaccagcttttggctttcttgatctttgtgtattatttttctgtattctatttcattatattctgatttgatatttatgatttctcatctatnnnnnnnnnnnnnnnnnnnnttaaatctgtagataaatttgaggagagctggcatattaaccatattgagtcttctgacccataagcacagtacatctctcattttagttaggtcttaataatttccgtcaacagcatttcatagttttcaatgtgcagatcctaaacatcttttgtcaaatacattacaaagtatttctatttttgatgttattgtaaatgatattttaaaataatttctgtttcatcagttatccaatataaattcagtatcataaaattattcatatttccttattatccttttaatatctgtagactgtgtagcaatatcgtgctttcagtttttatattcttaatttgtgacttctgtggtttttcctggtcagtctgtgatatggtttggccatgttcccacctaaatctcatcttgtagttcccataatccccaagtgtcatgggaggaacccagtgggaggtaatcatgggggtggttacctccatgctgttcttcactattatggcggttacctccatgataatgagtgagttctcatgagagctgatggttttataaggggcttttccccacattcactctgtacttcttgctgccaccatgtttgcatgtccttccaccatgattctaagtttcctgaggcctcctcagccctgaggaactgtgaatcaattaaacctcttccctttataaattacccagtcttgggtatttcttcctagcagcataagaatggactaatacagtctggttaaagcttctttcatgttttaaaatcttttaaccagcttttggctttcttgatctttgtgtattatttttctgtattctatttcattatattctgatttgatatttatgatttctcatctgttttaaagtttggttgaatttgctcttttttttttttcctagtttgttaagacggaagctgaggtcattgatctgagacttttctttttttctcatataggcagttagtgcctatatttagtgttaaacacatttccctggaattattgctgtaagcaatatcctaccttaaagaatatgttgtattttaattttcatgtacttaaaaaatccttctaattttttttgatatgttttttgacccaggaattatttagttgtgttcagtttccaactatttagggcctttccaaatatctttctgttattgatttctgttattaatcctatttttgtgtgactggaatcctttaaaatttattgagacttgttttatggcccagaatatggtcttccttggtaaatgcttttgcaaagaatgtgcattctgctattgttgcatggagtgttcttgaaatgtctattaggtcaagtcagttgatgcgttgttcacgtttttatccttaccaatttctgtctatttgttatatcaatggagaagaatgttacatcaatgatgaaatgaaattaatcagtaattgtggattagtctatttctccttaaggttctctcaatcttttgcttcatgtattttgaaactctgttattgggtgcataaatgttttggattgttatgttctcttggtaaattgatccctttttcattatgaaatgatcatctttatcccatggaatattcactgctttgaaatctactttctctgatgttaatataaccattacaactttcttttgactaatcttataatggtatatcttttcccgttcatttccttttatttgtgtttatagttaaaattgatttcttgtaggttgtttataattgggtctttttaacccagcatgataatctttgccttctaaatgggatgttaaggctgtttgcacttagtgtgaaaattgatatgtttaggtttaaatctttttatttcttttcttatcctattttattatttgtttccctttcctctttttatgccttctttttgattttttaaatgattctacttaatatcctttgttgcttattaattatattttcttgttttattattttagtggttgctttagcatttataatatttgtcttcaatttattatagtccaagagatagtatacctctaagtgatatcataccacttcgtgtaagaacattacaaatttctcccctcccaagcttggtactaatgccatacattttacttttacctacgttgtaaactccacaccacggatctattatttttgctttaaacaatcaataaatatttatcattttagttaaatttaatttctttgtgtgaaaccacatttctatctgctgtcatttttttttttttttgcctgatggattgcctttagcattttttatagtgcaagtctgatggtgatgaattatttttgctttggtatgtctgaaaaaaaaagcctttatttcatcattattttgaaagctgttttcgctgggtataggattttagaattgcagtttttcttttattttagtacttcacttttacgtcattatctttttgcttatgttattcctgatgattaacctgctgtaatctttatctttgtttttctaatgtagggttttttttttttcagataccctttaagctgggtgtcccaaatagtttacttcaattagtatttagtatcctgctttaaaagcctatccagtattttcatatctgttttaatatttagctcttatttttcaatataggcctgaagtgttagaagattcacctctggttccccaaaaaggcagttttcagatggttcactgcaattgcagtgttcatgaatgttgtgaatgtcttgtgcctgtgccaacagccaaactcaacgacactctccttatgtgtttgaaaatcacatctggtggagtaattttccggtcacctctaatgtcagttcagcccataaatatgggtaagttatgcactaaaatgatgataataggtctaaacatcagtcatatataaaggttaaaaattgcttacaaaaatatttgctagcttatctcactttgcttaacactgtaatgatggtagatgtagtactgggggtattaagagtggcttctagaatgatttaacaatggtatgtatatctctgccattgtcacttaaattctgttttgaaaactgttttctttcaatcctggatctatgtaatggatgtgtattgattggatatcactttttcacatctcagataactatttttgaaaataattagaagcatgtttcttgcctgaatttattccttcaataaatatttcttagaggctcatgtttgtcagagactgctccaggagctggaaaaagagtgggacattagacatagttcccacctcagagagcagggacaaacaatagtaggcagagacaatgataaaagagtaaatgagtaatttactgtacaaacatgattacaaaaaacttcaaataatagacaacactctgttttctttgtgcaaagatcccccaaatctctttttatcaatttaaatatacaattacaaatgtgaataatacaggaaaatgttagcgctatgtatttaatttattaatttcatttaattatgtataatttagcagtttttctccacttatatttcctgaaacaattatatgcaaactctttatgtctgattttgcatcattggttttgacatcactagagctgcttttccaagtatctgatacaattttccatacaactcaagctttacttctttctaagttactcgagatatagcactttttgaaactgtgtatgacatcatattttaacatgaagactttcaaataatttgtcctgtagggacatagttgtgatctctacaacataattacaatggcatacaagcaattcaatcgtgaagttataccatagagaaaaaagttacaaaatctttattcaatatcattttcttttcttttcaaaactaattctacctgatgattttttagtagcatttagagtcaacattgagtgcattgtttttcaaaatgaagtaggtaagggaaagtgctgtggaatttttaagaacttgaaagctttcttaattttgtctttatgcagagataattttggggaaaagtatttccttctatttgaatatatattataatatccccaaattatatgttccatgaaaaaaataaaactggtgtgatggagtgtcagggactattatttctactatgtagatcaaagaagatctcctttaggacatagcatttgagctgaatgaagaagagatatccatgcaaaaatccagagcaaaaggtgctccaagcaggaagaacaatattcacaaaatccctaagatacaatgaacttggtaatttgaggaacaaaacagaagacctttgtgctaggagtgaaagagatatgagagtattaagggatgaggtcagagttacctggtccagagcatattgtaggccagggtggagaagtaaagaactgttttggtttggatctgtttgtgagatggtgctgactggactgtctagtggatggagttgtagagtgtgaaggacagaggggtatcaaggataacctttaaatttagacctgagcatctaggtgaacagagacaccagatactgagatacggaaactcagggaagattaggtgtgtgtacagaaatcaagagctctattttggacacattgtatttgagatgtctattggaaacctaagagacgttgaataagaggttggacatatgagtctaaagtttaggggagatatatatatttgggagttgttagcgtatcaaggtttatagtattgtatgagatcacctatttagagttcaggaagagaaagactgaggggttatcagtaagaatgaaggagtaaaagagtatgttgttgtagaagccaagtgaaaaaaatatttcaagaaggagggaataagcatctatggagtgctgctgaaaggccgagtaaggtgaacaggaaattgacattgggtttatttttgtatttctaatattaatgcatattaatattgtcaacctaaaatgtatgacagataccaactctataaagcaaaaagttgatttgggagtagtaggggattgcagttctagacatgcatgctatggaatgactatgacacatccacaggggattggagtaaaggggaagcttgaaaagacatataggagacctccatgtaagctgttttgaacaaagattattggttacaagagcttgctgcaggggttggcattagctcattggtggagacagccgtagttaggcaagtgtctctgtgcaagcggcttttatggaatactgtggttttgaggaattctttacgttgttccaatgtaggcatacatacataaggggactccttcatggcctcccaactccattgtgttagggtttcacactagtaactccagtttgatactgataacttttacagtacgcagataggaaatgtacaatagcttgtaatattgtaattttacttttctttggtatatattgttttctctttggtcatggaaacacagtaaatttcacctgctgtttccagacttttgtgtttagctgtctctgctttaaagtaactgaaatttataatatgtctcataaagtaaaacctcattgattttgactaaaagaggaaaattgtgaccaaattcttgaaaatatagaatgtgaaaattatcttatgctctttatttattgaaaataaaattcaaatcagtgtttcaatttaatgataatttctatatatatgaataattcctgttaattgtaaaaaccttgctaatatagagatgaacaaacaagaaaatgcatcgattttctatcactttggcgatctttatattttaactatatcaggaatccaagtataaatgtgtattaaactttcaaaatttaaacattaaacatttttaatattctgagaaacttcatccctacttctgatgacaagccagggactgctgatgctgcatttattgcatgggaatatttatgctgtcagttatttgagtaggtttgtctagattatagtgatctaaaattaatagacaagctgaattttgggtagttttgtgtatttccaaatagtgttctgcaaaatgcttttttcctttttaaccactaaaataattgaagtgggtgaggttcaggggagacttcagataagttttaggatgctgggtttaataaagttaagtgggattcttacaaggggaaatcacatttagcaaaataatctcatttactgattcatagtctttaccacttaaggggagggtaatgaatatacatggattgctatgataaggtacaaggacgagacccagtattcaagcttgtttcggttctataattagtccttggataaagtcaccttttaagtacttgaaaggcaagatatgatgaaaatttatcttgactttattttattcagctataattgtcatgaaaattacttgacttaaaagtattctcttttttttccttaagtgaagcctgatccaccattaggtttgcatatggaaatcacagatgatggtaatttaaagatttcttggtccagcccaccattggtaccatttccacttcaatatcaagtgaaatattcagagaattctacaacagttatcagagaagtaagtatattttagtaagtaaaaggaaaagttgagaagtaaataaagaccctcttaagtcccatagcaattaccctctgcatactaaatatatacatttcttctaaagcagaatgaattataattcaacatttcatattatatatcatatatagatagatatacgtatgtatatatatggctataggaaatctagttacagaaacttgaattcataattacaattattttccaccaacagaccactgatttcatcttttttttaattgctcaatctatttgaatgtttttctgaatgtggcaacagaaagatttttgcttggctaatcattagtcgagcttctgaatcttctgctagcccgatctgtgcacattcctgtaaaatccagttttagcaaagaactctgctaggtcattttagcaggaacacccccaccctggatatctgatgaatatttgatcagatttctcatcctccaccattccccaaatgatgtttgatcaccatggcctgtcttcagcaagaattctgttaggtcagtttagccagaatccctcttaccatgatgtttttgcttagtaattttctatctactccctccttcttggctataaattccctgttgtccatgctgtgtttggacttagcccacataccccgacccaccacaagaccccattgcagtgctccatatacctattgtgatgattccaaataaagtcttccttacttcctttctctttttctttaacagttcgttccgtaagtatttattgaacacctgctacatgcctggaactgttctgcttgcatcaggatacactgagatagcaggacagtataagaggaatctgggggtgctggtagggaatggaaggttgcaataataaatggaggttggggagggtgacatttgagcaaggatgtgaaggagatggtaatgtagatatctgggtagttgggttctaaacagggagaacagcagtgcaaaggatggtgtggctgagggcagtgaaggtgacagcagtagtggttgaattcagaggccagcaggggaagagaacgtggagctcaatgaaaggcctcttgggccatgtgaatactttggcactttactttgtgaaactaagtttcatataatttagaagtaaaaatcagtctttttagaactggcaaaaaaatttaaaacattttattttcacaaagagaatgatgggaatcctcagtgtcacatatggagaaaacagagttaaggcttctgtgggtttcagctttcttatctgtaaactggagataatttgtaaacttgaggattttaaataggagttattaatatctgatgttttatgcattcctgatgcttttcataatttttagtctgtgacatgctccccttaccccaagagcagtcattagagccagagaatttattaactttggagtacatttttgggaagctgaattttgatctcctaggctcaagtgatcctcctgcctcttttttttttttttttttttaagagatgaggtatcactatgttgctcaggctggtcttgaactcctgggctcaagtggtctacccacttcggtctcccaaagtgttgggattacaggcatgagccaccatgcctgaccaggctcaggttcttaagacttttcatgctcttctgtacagggacacttgtagttctttgtctacccctgcacagcattttctaccaggtgtgtgttataggtgtcagtagtggcttaaagcttcccacagattttagctgcatttcttaaaattctaaaggtcatatattcatcatgattcaattaacagtatttgttaattatcattatgattttttcttggacccatgggctatttaaaattttattgactaatgtgcaaactttttttttggttattgatgtttgttttaattccgctgtggccagataactactgtgtaagatattaattctttgaaatttgatgagattagcttatcctcacttttagtaaaggttccacatcaacttgatgttctgatgttttaatataatatttaacaggctgacaagattgtctcagctacatccctgctagtagacagtatacttcctgggtcttcgtatgaggttcaggtgaggggcaagagactggatggcccaggaatctggagtgactggagtactcctcgtgtctttaccacacaaggtaggttatgtaatagccacttctactgggagggaaatatatttcctgaacttgcctttgtatagtataagcatcttacattttgaggccttaaaatgaaaggaggaacacagtatcaacttccttgtttaaactttgaacaggccaatttgtgaattaaaattctgtcagagcctctaggcttgtgtgtttctattgcagtatattgtaggatcacttttcctattaaaaagaaaaaattaatataacagctccaaattaacaaactcagaaagccatttgtattgataattccttaatttacattttaaaaccaagcatatttatttgacataaaattcaaatattaacattttactttatattatataataaatgaattatttttactccagatgcttgcttttgagagttttcagtgccaatgttcatattttaaaggttatttttagcatcggaacatctacagttcattcacagcttcttcatgcagctgatgcgcaaagttttgcatagaggctccagaggcttggaatggtcctagacctgttgcatgcaaagttgggactatagaaagacaatagtcctttggctggttgtccgatctgtcaaaagggcaaaatttttcttgttcagacttactgagattgattatggcctgtacagagataacaggtaccatgcaaatatcaatccatttaacaagtttacttgttgattgcttactattttaaaagcattgattcgtcaaaaggcaagtagcaatagtagtttaagacattgacttcggagtccaacagaagtttataggagttctggctccaccacttatttggaaagtttcttaacctttctatgccttaatttccttatctgtaaaatagggatgttttacatggatatgaaatatccatataaaattaaataatgaaatgaaataattaacattggtcatgtgaagaaaaccattattgttttcttattctgcaaattaaaaattgcatagtatgtcatatgcagataaaatgtgtatctatattattaaaattttgcaaattaaatattcaatatctcatatcaatttcaataaatttatccagtgtaaatttcacaaattgtcaggtttttattaacttagttttcttattttaagctaatattttagcatctaatcatgtaaaaatactatgactttaatcttatttctcagttaagccttactatatgtatttgatttcaaagtgaaatgctttgaattttcttgtcatctttaaaatgaaaaacttcagcttaatccatgaaaactcaattatattttttatttttaaataagaattattctgagacttttgaggcagttgagtaaggaggttgtggcgcatactgaaggtaggttaagataggttaatgtactaggtacttgtccacagtaagtaatgtacaagtgaagcttgagtgccacctcggctaggattatactcagtcacgctcataaatctaatggtctggctcctgtgcagtaattttatgctactaagttttttcctgtttctatttgattatggacatacaaaacacaaatgttttgtatgaattgtaaatatatagacattgacgtttaccatgctattacagaataaagaaaacttaataaaaaccaattaaagtatttttgtttctgtttttaagggtaatcccaagatatgtgtgaaaacaaattttcatagtctatcaacagaaaatggtttaccttaactttacaactgaaatgtactgacgtttttgcagtgcactgtggtggaaataatttcttcctatgtaaaccatcatttacttgtatctcgcatgtctttgaaaatgataggcaaatgaaatttacaacaacagaggactttaaaaatagtatagaatcatgtgtaggcattaaaaaaatcatgttttaggaaaatatcgcttccctttaccctcatccataggatattggcattaaataactcaaaatgatagtacaaaccagtatttcccattttctctgctttgtatattgctgcattatcattcatacgacattcctattttttaatttatatctcgtatctttacctacttacttgaaatttttatgtatccaaacaagacaatagcggcaatcatttttacttcaggatttggcttcatagtgatttgctttaagaacttgtcctagtttcactgattcccaaagcagggtctgttggaaaatatgtcattgttgaattaagctatattttgttttagtcactttcctgcctatcagttagcaagtgacaattactggctaaaacatattttatgatgaataagcctctgtgtttagaagatagtaaagacattcatggaagctcaactcactttagaatgagagcactcgggacactagataactgtacacaaacaggtaatttcagcattatccagtttttaaattacactcattttatttttggcagtgtaactctggaatgtgttgtgaatatttttcgatgtggtacaaattacttacagaatgttttgtcttcatctgatatcctttcttccctcattacagatgtcatatactttccacctaaaattctgacaagtgttgggtctaatgtttcttttcactgcatctataagaaggaaaacaagattgttccctcaaaagagattgtttggtggatgaatttagctgagaaaattcctcaaagccagtatgatgttgtgagtgatcatgttagcaaagttacttttttcaatctgaatgaaaccaaacctcgaggaaagtttacctatgatgcagtgtactgctgcaatgaacatgaatgccatcatcgctatgctgaattatatgtgattggtaagaaaacagaggttttgttcattttgttccacaacttgaattttcattatggaccctccttatattagagtcctgttaaagatgtaagaaaaaatttttttcattgaattttttggagtttttgctttatattaatattttaatatgtttcaaatagatgtcaatatcaatatctcatgtgaaactgatgggtacttaactaaaatgacttgcagatggtcaaccagtacaatccagtcacttgcggaaagcactttgcaattgaggtatcataggtacgtattatttttgctgttttgtttttctgtgggcacagtgagataaaaattttctttagaaatattacaacagtagtcttacagattatttgcttcctgaaagaggaaagtataatataatgaatcaggaaatttttgagggattatataaattggtgattcttgaaaaatattcacacctgagattaaaaaattgtaatttgtttttacttcaaattatcttttctgaaaatcaatcaattctgaaaaatttgtattttaactcttgaatgaaatgcaagaaaatgtagtttatatatattttaatttgacttagttgactagaggagaatgtgaaagattataaaagtttcgtatcatttggctaaagattaatgttttggaaaaaagaggtaaaaacagattataagagataatatgaatggtttttagaactgagtgagattacttaggaaataaatacttatggttaataaagggtaatgtgttctaatgagaagtaatttgtgcttgtttatttttactcttctatgttttaaaaagaattcaaggcatcgtcttatagtggtccctttctttctaaaatcattttatctaaaatgatacaacccttgattatataatagatttttatttttaaaaatatcccatagtagtagtcaagtaaatatatactgctgttaaacactgtgtcccaatttatatttttatttgtagtggagactttcaatttgtataacatgctcatttattcttaaaatataaattttcaactagaaaaataaatcccttctctcaaatactgtgatctgaagtctattcctaatgctgccagtctcttcttatgtagcgttaggaaaaaaatgtggcaattcgtacatttctcaaatagctgccttcatcctacctaatatgagtattttaaaatcagtagaattgttcatgatatgaaattttacttttataatctgtctttacattcttttcatggcattttcacattagaaaaggtgtttatggaaaactattatgttaagccccatgccttgtttctcttattaacatttacagaataactatgaaactacatttacttgggtgagtttcttaacttccctaagcctcaatttccttgtctgtaaaacagagagaataataggacttacagtgtttctgcgagagttaatgacatatttcatctaattataatcacatggtataatttctccttgtaaatattcaatatatggtttttgctgtcatgataatgatgccaacttttcgatttcaagtgtactagtactgtgcttctactttgttcttattttctacccccagatgacccctcactcctcattttcatttttgcccacgcaccaccatttattcacacacacacacacacacacattcatgattgtaattttgagaagacaagaaaaagaagtggtatagaaaatagaaaatgacagaagaatatagattttttagcttcttctaacttcctcactcccatctctttggaaagagtaattgctacttcagctatttaaatatagtattcagagcaaacattggcccaagaggttatttcaaagaagaggaaaaagactttatgtcaagtttgtccaacccatggcctggggcccccatgtggactaggatagctttgaatgcagcccaacacaaatttataaactgtctgaaaacattaggagattttttttgcaactggtttttttttttttttttgattcatcagctatcgttagtatattttatgtgtggcccaagacagttcttcttccagtgtggcctagggaagccaaaagattggacacccctgctttatgggttctgaggtggagtgttggctaggactcacttataaaattttttttaaattttcttttctgagaaaatgaggaatatacatggttatataattcacatacatatctgaaattggtattatattaacttatattaatttgaactagaaaattatattcaccactcatttgtggtgaaatttaattctttcttcaaagtgtgaggaatttgccttccttgccatctcaggaatgctccatgactactttcatctatattttaaatattctatcactaatacataatgtttgtttaattttcaaattattgtaggttctgtctctaactggatcattttcttctttttagagtatttatttcatttgcatccctgcttagtgtctaatgaaatatttaataagagttactgtcagtttctgtggaaagatatagaattgggaaaaattaaaaaatgcctttctaataagaatgtctttttttagatggagtgaaattgtctgtattttatttattttaatttaatttaatttaattttattttgtttttgagacagtctccctctgtcgcccaggctgcagtgcagtggtaccatctccgttcactgcaacctccgcctccccagttcaagcgattctcctgcctcagcctccctagtagccaggactacagatgtgcatttgtagagacagggtttccccatgttgcccaggctggtctggaactcctgggctcaagtgatcagcccgcctcagcctcccaaagtgctgggattacaggcatgagccaccgcaccgggccttctgcctgtcttttaaacttggggtccccagtccctgggccacggaccggtacctgtctgtggcctcttaggaacccggccacaaagcgggaggtgagagagcagcattaccacctgcgctccacctcctgtcagatcagcgcagcattagattcttagaggagcagaaccctattgtgaactgggcatgcgctcctcatgagaatctaatgcctggtgatctgaagtggaacagtttcatcccgaaatcctgaaccatctcccatcccccattagtggaaaaattgtcttccatgaaaccggtccctggtgccaaaaaggttggggactgctgttttaaacaacaaatcagaattctcagatatcttcttgttgcttttattaatgtatactaattgactatttttgtatcttttaaaggagcagcctttactgttctgatattccatctattcatcccatatctgagcccaaagattgctatttgcagagtgatggtttttatgaatgcattttccagccaatcttcctattatctggctacacaatgtggattaggatcaatcactctctaggttcacttgactctccaccaacatgtgtccttcctgattctgtgggtatgtcaagctgcgttgtgtcttcatttgtgttagcagatttgtatgcagattgatgcagatttaatgttatattttgccattttctgatcacattagattttgaaaaaaaaattgttcctgtttacagtggtattgagaaaatcagccttaggaagttttacagttttgaattcatttcaaattatttatagcagactttttttagcaataggaatattttctgcacactattagatgaaatacatgggtcattatgaatgaattttagtagtgtttttctaaataaggcattattttatgtttttgttccaatgtagttatgaaaacatgtaatatttgtaatccaaacgtttaatttgaatattctgaggttctcaataatctgagtactcataactcaagcctttaatttgtgaggctatgtagggcacagaagcatttaaaatagctaaattgaagtggaggaaatagacaacaatgacatacattatattttaaacattcttttcaaaaaacttttgatttcaaagatattaagagagcccttggaaaatgtgatatattctttccggttcattgtgaaatctctgagaaatgattgtgcaacaggaatgcaaaaatatcttttggtgctgttacatatgtataactaaggaagcttttgtagatcttttctaaatgtttgttttcaagataagatgtctaaaaacaaaacaaaaatgggattttcagtgaattttcccctcaaataaaatattcctcagtaggaaacatgttagaataatgttccataaaaatattaatatatactattttgttgggggattatgtcaaaaatcaatatttgagtcattatttttcaattaattaatacacatttgaattaaaacctataaccaaaaaatacacgataagattgtcttaattataagatttctttttcaatgtaaagtcccaatgaattctctccccactgtttaattccattttaagtgatttttactgcagtgatacttaatatcccaggatagcaaggaaccctcctacactcccccaaacatgcacagataataacacactcacttataagatatgacaaatgaagcctggattcagtaacatatgttacttgaataacctatggtgttatccttttcaaaactaaaataacgagtttaggttgggcttatattgcctacttagtactagaaagtaactcaacgttgggatccaaataccatctccacttattactagcctttaaatccggactagccacacaggcactatgtgtctgttttgtcatccataaaatgtagacagctcctcataccttcccagcatgggtattgagggaatcacgtaaactattgaacttcaagcatatcctttctgcagactggatattcactgccagtctgcagaaaggatatgattcatatgattcagttaattgcaaacacagatttaacctcttacagtctcttgaatattgatacttcctttcctgacaagaaattatcaagaggtgaaatacagtatatatcatcttcctgggttggtggagaatgtctttttgttctatgaagaattgaataatcatgataaactttacatgacggaaaaagtttaggtatttttgttatcaacagtcaaaagtattattgttgattgcttaaaaatgattttaaaataccatatgaaagggagactatacctttacacagtgttggtttttggcaagtgagacttggagcaagagaataataaacacccatattgtgccaatccaggtattaagttttccctgtgaatcataacagtagcatgatttataagacatggggaaataaatcaagaaggtaaaccctggaactctatcgtcagttctctcttaatttttcttacacagagtgtctacatttggccttagttatggtttgggttatttaggtttctttttgttggtggtggtttgttggttggatggtttcatacattagcccttcagcttccctttttgctactgcagttgtttcctgcatattccagccaagggccatctctcactttagattgtccactggcaggggtgactgtcaaaataatgaccaagaggagggccattccagctgcaatcccagaggcctctgctgtaccaggcattgaccttttaggttctgagccgtgggcaggtgtggagggcatccaacctgagcagttctggaggagatattcctcaggagagcacctctttaccagttggtatggatgtacttaatatttttaacaactgttttgacataccaactgaatatatgtcctctaaatggaatcttctagtcttagtgcagataatcaagacatgactatgtaaatgtagtgtgtatcataaagttgatgcttggagtcataacagagttagggcttcagagacgcactgttatgcttgggctttcaggcttttagtttaaaatatgccacatttccatattgcctgttattgtcaggaagattggccctcaaagttaaaaattaagaacttgggggaaaacttatgtagtgaatctaagcctaaggtagtttttactttagctctgaaagcagcatcataaaaaggtgataggaaaacagggaagataacctttttctttgcatttctatgatttttacattacacctttaaacatgtcttgttatgtacatatacgtatctattttaaaaatcacttgctattcagaccatctttgcctctattactgcccattaaaagcctgttttcctcagattatagaaaaccaaggctttgctctgagagactatctctgaccttgacctagaaatatttaatgatacacagcagcataagagtttcacactcacacatattgaaattgatgcagtccatgggttttttttttttttgcctttaattaaagttcaatggagaacagtttgttattgatatttagcatgtgttcagcatggtatctttttttttttttttgagacggagtctggctctgtcgcccaggctggagtgcagtggcgcaatctcggctcactgcaagcttcacctcccgggttcatgccattctcctgcctcagcctcctgagtagctgggactacaggcgcccgccaccacgcgtggctaattttttgtattttttagtagagacggggtttcaccgtgttagccaggatcggcatgttatcttttgcttgcagagccaatggttcaatttctaatcaggtactactactagctttcagagtaacatgaataatgtattgacttttttcagtcaagtctatatttgcgaaaaagagataaatccctcttttaatatatcacataaagtaatagggaaacaaatgagataatgagtgagaaagttatgaagaagatattgcttgatgaatacagatgtatgaaaatataacacaatgtttttaggcattattactatttaaattaccatcacttaatactattgtaaaaatttctagtgaagccactgcctccatccagtgtgaaagcagaaattactataaacattggattattgaaaatatcttgggaaaagccagtctttccagagaataaccttcaattccagattcgctatggtttaagtggaaaagaagtacaatggaaggtaccttttacttagaacttcagctttcctcattaaatgctatttttataatatgtaagagtttaattgcattagattaattttattggcataaaagtacattctcctgtattgtgtagctattttcattaaatagatttatctaagtctaacttttttaaagaacaaagtttcctgaaatccatcattccctgaagtgtgttttatagaacgttggttgcatattatgttccttggaaaaagattaaatggctaaatcagtttaggaaaccctgtatcactgtatcttccttgtgtagtcacggtatacatattacatattcaaggtttggagaggtccttcattaaagaaaaatttgtgaccttatttcatctcatgttccccaaactaatttttccaaggaactgttgtttctctaacatctgttgatatcttttagtacatacatgtttagtggaatgcattttggaagaagctgcttttcaaacaaacagagtcattcccgtagtggcaagtgtgcctatcatggcattccacatcagctttgtgacggcagcctgcaaagacctagaaatatcagaaacccttattgtatcattagatcacaatgatatcaactaaaacaaatgtgacagtttagctgctattgaagaatactgaatatcagcgatttgctacagtaggtcctatctaaccaatacgtttaaattctttttaaattcttaaaacatctttgtgggtagaggattagtggacagggattagtaggagggtaagagagtgtttgggaaacaaggttgcaagtaaaccagttcaaaatcttgtcatcatcagcaagggagtgacaagataaataagaaaatccttgacttgaaggagtttacaatccaagcctaattgtgactatttctgaaggcagagaacacagaatcagttctcttaattttggaatagtgttaaggtttaaaataaaatgtacttcagggccctttagatacatatgtgttggtaatgatcaatctaatgctttgacttattttacagatgtatgaggtttatgatgcaaaatcaaaatctgtcagtctcccagttccagacttgtgtgcagtctatgctgttcaggtgcgctgtaagaggctagatggactgggatattggagtaattggagcaatccagcctacacagttgtcatggatataaaaggtctgcagagattttgtaaatgtgttttgaaagtgcataagtgtgtgcttcaaatatggctgaaaagtatttcttcaaaaacatatacacaacttgtcattttgcagttcctatgagaggacctgaattttggagaataattaatggagatactatgaaaaaggagaaaaatgtcactttactttggaaggtattcccaattttaatattaatcttaaattgtatttttatactcttaaaaatttacttcatggtccataatcctgttattaatcttcggaaagctcaacaatcctgtattttcattgcatttatgagatgtatttaaagagagctaagatgtacagtggctgaagcactggcatagtgttaggagactttcattctcttcttagcttcacatattatagttaccgtcagtactatttgggcaaagttacttagactctttgggcctcagttttctcatctgtgtaaatgtaatattgaactagatgataggcagtgtttcttggagtctaaaaattgtattcatatttaatcctgaacaatgtaaatgtcaccttccccgcacaccccaagggcatctaacacatgacagagtattccatttatgtgatggcataaaaacagtggatagtcccatatatgatggctgtttagcctagtaattttcaaagcatcctctcccaaatgaactgatttctatttcaagtgaatagtttatttggtcagtaaatgccaaatttaagattgacttgggaatacaacacatgaagtcaaagagtatttctgtcactccaaatgtgaattgtaagtttaatacccaaggttgaatgagcacatgtttgaaaatggtttcctgatgtaagaccaaagcctctgtaaaagttgtggtatataagaatttatgttcatttggtttctaaatccagttactctataatttcatttggtgaataatcaatgcaatttctaaagtcttccatttcaatatttcttaaaataattttttattcttttatttcatttcttttatcattgctctccttaaaaaatttagtttcttttgttattgctctcttttctttttctagcaaaccattccttcaacacattttaatatttccaacttaaagttagcattagaactgacagacatttatgagccatttattgtattctgaacacttcatacagatctccacctcccggggaattcaggacctgtattctgagagattgagtgggcggttgaacccaccgcggaagggggcactgctgaataagaaacaagagtcttgcccgacagattatttttctcatatttttggttttatctccatgggcactgttccagatacctgcaaacttctacagtgaaggacaggcagtgatgttcccatgtttgtggtagggccagctatgagcagaatttaagtagcttttctttttctttgatttgtcctctcagagctgtagtcaacagccctttggcctaggctacagctaccctctcccattgcaatatactctagaacaaaacagttgtctttctccagacagttcttatgttttcctcatatcatggattccacatttcctcagcaatgctgccaatagaagtttctgtaatgatgaaaatggtttatatctgcattgtccaatatggtagcaaccagccacatgtggttattaagcacttgaaatgtgcctagtgtgactcagcaactgaattttaaattgtatttaattttgattaatttaaatttaaatggctgcaagtggccagtggctatctttttggacaacaaagctctatgggttctttaggggtgatttgtgggagggagacaggacccttgctaatctaccatctttgcagaaccttgaatgccttttattagtcaatttgcctttcattaattttgttttgtgctgttttgttgtgttttcctaaactgagataatagttcaatgattacggttctccaagcctatgcctcttaaaccgggataagatttgcttaaggagtaagccacaaggccacaggataagtatggcactttttaaaaaatatcatttctctggcatttttaaaataataaactttacgttaaggcagttttagagttacaaaaagacggcaaagatagtacagagaattcctatgtattcccacaccaagttttctctagtattaacatcttaggctagtatgatacatttgttacaatgaattaaacaatattgatatgtcatcattaactcatctgtaatttatttcaaatccaaatttccttagcttttacccaatgttctttttctggttcaggattccatccaggatagcagatttcatttagtagtcatacctccttatgcttctcttggttgcaaaagtttcttagatcttctttgtttttatgaacttgacacaattgagaagtactggtcgggtattttgtagaatctccatcaaatgggttttgtctaatgttttctcatgattaatttagggttatgtgtcatacctccttatgcttctcttggttgcaaaagtttcttagatcttctttgtttttatgaacttgacacaattgagaagtactggttgggtattttgtagaatctccatcaaatgggttttgtctaatgttttctcatgattaatttagggttatgggtttgggggaggaagatcacagatgtaaaatgccattccatcacatcatattaaggatacattctaccaatgtgacttaccatagttgatgttaaccttgctcgtctggctgaggtagtgttgtctggctgaggtagtgttgtctggcttcccactggaaagttactcttttttctcctttctccattttagttttaaaaatgaagtccccatgcttaaggagtaggagtcatgttccacctacttgaaggtagaggacctacatatattatttagtgttcttctgcatgggagatttgtctgttctcccacattaactattttatttattcaatcatttatttatattagtatggacaatgaacatttattttagacttggtttgtaatccaatactactttattttgttgctgaaaatattcctgcttcagtcattgggagctcttttaattgactcatgttcctttgacatgcccccgtcattgtggggttttttattttaatttttgagtactggtaagttcgactttattaaaattaaaaacttctgatctgggaaagactgtcaagaggatgaaaagttaaggcacagactgggtgaaaatatttgcaaaaacacacatctgataaaggacttataaccaaattacacaaagaaatctttaagattcaacaggggccgggcgcggtggctcacgcctgtaatcccagcactttgggaggccgaggcgggtggatcacgaggtcaggagatcgagaccatcctggctaacaaggtgaaaccccgtctctactaaaaatacaaaaaattagccgggcgcggtggcgggcgcctgtagtcccagctactcgggaggctgaggcaggagaatggcgtgaacccaggaagcggagcttgcagtgagccgagattgcgccattgcagtccgcagtccggcctgggcaacagagcgagactccgtctcaaaaaaaaaaaaaaaaaaaaaaaccaagtatctgaacaaaaacctagccaaagtagatatacagatgacaaatatgaatattaaaagatgttcaacatcattcatcactaaagagttgcaaattaaaacaagataccactccacatctattagaatggctaaaatccaaaaaaaaaacctgacaatacaaattgctggtgaggatgcagggcagcaagaacttttattcattgctgtggaaatgcaaaatggtacagccactttggaagccagtttggtaatttcttacaaatttaaacatagccttaccaaccacatgatgcaacattgcatcctaggtatttactcagctgatttgaaaacttaagtctacatagaaacttgcacatgaatgtttaagcagctttagttatattcaccccaaactagaggcaactaagatatccttcaaaaatgaaacgattctgtatacttctgaaatggtgggtatatagcactatgcatttgccaaaactcctcgaacttcatagcacaaagagtgaatcttaatgcatgtagattaaaaagaaaatcatttaggaggttgaaggatcccaggattgactgtaaactgtgacaaaggaatctacctgtattacaagtgtatgaagcaacttcactgaaggtggtgggagaaaaggccactttggaacttgagtggagttgttggaaatgtgtggaatcttaagactaaaggcaaaagaaactgtacataagcactgtactctagttgatacagttctcacagggctatgggctaacaattatggtactgctctacatgtactctggaaggggacaagcaagtaaatggatggtggatggtgggacccagatttctcactgttggattgggaggttacacacaagcacaggatgatccatgtggcaatgaattagagttggggatataggtatgaacttatatctagcttaatatagatatagctagattctggtttaggatacatgtacattttcttgatttgtaaggtaagagggcctaaaagtaatgacatccagtagtaagacatgtgcccagacttgtttctaattaccatcgttcaataatagaaacaagggctattggaagaaatggctaattttagggttggggcagaaaatatacgagattagcctggaggatcttgtagtaccagaaagtaaggaagcttaacattctcttacttgatggttaccaaaaaagtattcattaaaactgacatgtttttttttcaaataaaatgcaacatttgcatgactttgaaacatttctttcttgcggtggctgctaaaatcttactttcaacctatccagatgattccaagttttgcagggatacatgtatatgtgtttatttttctctgccatttctaacttagaggcatctcaccggcaagaaattgagatgtactgttctagtctatgatatacagtccagccttctctgtctttataagggattgccagcatttaatcttacctgccataggtgaagttgattggggaaatggggtacactgttaacctctgtggaatataagaatagaattgaactagacacttattttacattcggatctttaatgacctgatattattatttttaattatatgacagaaattctggggtgccatagacactgttttgatggcctctgttactcattaacctttgcagacattcttacattctagataatcttccaagagtatcagaggaaaggaaaatgaatgacaaatcttactatgatcaatatatgatgattaacaccttcacagctcttgttgttgcttttcattttctgagggttattccttgtttgctttttagatgaggaaactctctactccttatgtctttcatttctctaaaattagagtgaaacttcttggtagaaaagtgtcttgatcatatccctactttattatcttcaagtgatttattctctgggccttaagaaaaaaacctcaaaaaggggaaaataagtttgctatgctccataacgatccagacaccttcatggagactgtggcagaggcaaactctatcccacccatctccccagcctctcagccttgtaatagtacctgccctgatctggcccctgcctcctaataagaaatgtagaatgagagttatgtgagctcagttagtataaaaagcactgcagcccttaaactaatcaatttctatatttactacagcccctgatgaaaaatgactcattgtgcagtgttcagagatatgtgataaaccatcatacttcctgcaatggaacatggtcagaagatgtgggaaatcacacgaaattcactttcctgtggacagagcaagcacatactgttacggttctggccatcaattcaattggtgcttctgttgcaaattttaatttaaccttttcatggcctatgagcaaaggtaagaagaggtacagagtggtaatccattgcctcttttaatatttaacttttgcaaactctcctattttaaattatctttcaagcagcctgcaattctctgcatctgaaagtctctctttcacctttcatttcctttgtctggaaaaataacaaagtacattgtacaatgatcacataatacagtccttgagctttcatttgggagaacattgttgtaatggtgttataatatatgagaatgttttagtgaatctaatacttaaatcttttggaccaatggagatctttaggtcaataattctctctccctatgtacatatacatgtatatatttatattcatacatacacacatataaatatgtaaaaataagtatatatcatattaaatatatatttaacactatgtaaaatagtaatagcatgacatgttatatggatgcaggttaattgctgagacttaaaattactatggacttcattgaatgtgagtagcaaaccttcttgcattaattttgatatatctgattaatcggagaattgagacccactttcaataggaatttctagtctagattacatattcaaagtgtaaatttttaatggaaaatacaaattttctgtgtctctaccaatctataaaggcctttccaactgttacctcctttatgaaatctttgcttattgctttaattgaatatgccctatctcttctttaaatctcagagtgcttcctgtctttcttattttatgtcctgtttacattatgattacctttgtatttatagtgttaagcatcgagttccatagcacccagctcagtgttttatgcttaacatttcctaagtatatatattctagaaatatctgtagaatgcgtcagtggggtaggtagtgggaattgtaatgtgagaaaaactataatggttggagtgtccagagcctaataggtaagacaggtattaatgaaataatcatacaagtgaatgtctatttgcaaactgagagataagggcctgcaggaaaggaatataattttatgaaaggaatgaaaaaaaggaacctgacctggcattgagattcagagaagccaccttgaggaagtggtactgaactgaaatctgaaatgtgagtaggaattaaacttccccaaaagatgtaggggagggcaggaaaagcattggctcctaacaagagcagccagatcaaaagtctatggcacaggatagaaaatgaagaaagaccagggtggctttggtgtgggaaatcatggaaggcagagaggtgcgttgagacttggccctcagggccttgcaggcatgataggaattttaccctcaaatgtagaaatccgctggaggcttttaagtgggatgctgtgcagatggtgttaaaatgaacagatttgtgctttgagagtatcactccatcagtgggagaggatggttaataggcttgtgcagtattccatatgagaatgcctttttgaatatatcaaaaaattgctttttaaggttttagggagtatcatgtttctcttcaatgtcatctattcccatatctctctgtttaaatgactctcatgatgcaaaagtaattgtcatgtatcatatttatttgtgtaaattgtctgtcttctcttccttattccctttagtaggttataagttcctcaagagtattagtagatttttattaatttttaatttaaaaattaatttccttcttttcccctcagtaaatatcgtgcagtcactcagtgcttatcctttaaacagcagttgtgtgattgtttcctggatactatcacccagtgattacaagctaatgtattttattattgagtggaaaaatcttaatgaagatggtgaaataaaatggcttagaatctcttcatctgttaagaagtattatatccatggtaagtttactatactttagtaagttgctctcatggattaatatgacactacagattattaattctattaatatagccagttaatgaaaacttcaaaaatatagaggatactaccatcctaatacatataatcctataacctttatcaaaacatttaattctcttcctcttctcttctcttctcttttcttttcttttcggcagggtctctctgtgttgcccaggctaaagtgcagtggaacaaacatggctcactgcagcctcaaccttctgggctcaagctatctttccacctcagcttcctgagtagctgagactatagacacacaccatcacacccagctaattaaaattttttttttttggtagagacaaggtctcactatgttgctcaggctggtcttgaactcctaagctcaagtgatcctcctgccttggcctcccaaagtgttgggattacaggcatgggccaccacacccagcctaattctgtttcctttgacattttctcattttaacattttatacaggggttatcatatcatatcatatcatatatcctatcctatcatatcatatcaattttctcctcatttctttctaccattatttttaatgatatagcattttattccaaagtccacttaaactgtttgagattctttatgttgcttccagctttatcttttcttaaatcattttttaacagcttctgatatcttctgccaaattgtttcctcaaactgtgtaccaacttataatgccactaacaatgagtgggaatgctagcctgaaggtctgaggagctaggactgggtgacctagaccagggtattctcccaaagttagaccagttattccaggaggtgagtcaagcacaaagtataagtgcacaagacagcatttctaagtctgagtaaggattgaggaaagttaactagggaagctaaggattgctatgatcttattatacaatatcattctaaggactcataccattattttattccagggacctagaatttagcatcagggtaaatttatttacaaattgttgaactgaatttagttcatcaccactgatgcgcaggtagtttctctctgtgcttttctttaaaccatgaggatataaaatttaggcttcacagagatctctcttcttctggatatattcttctagaagaatattcatatattattagcatttgtgaaaatcatgatggatccatctggagctttgctatagggttggtcattttccatggatcaaaatcccagatcttgcaaggggtctcgtggtctccaccaccattttgtttgcataggatttcacaagactttagtctcccagctaccttgaatggaatggggaaactaagtaagctgaattcctattaaaaaaaggagtattgcccactttgggggtaagggagaggtagtagaacatattgctctggaaaaggaaatgaaggaaagaaaaagctcatacaccctgcacttgaacaaattggctatcactggaacatgcctttgaaaaattgcaatcttctgtctctggctaagatttttagaaaaatatttggaaaactattgtcatgactagataattagaagtgcttaagtttgttttgaaactcccttgataatttaatccacaaataataagtaatttctatgtttggaaatatatgatagtcactttaattcttttttaaaatgtatgttccactcattactattaattttgtataaatgagccttttacgtatttttctcctcagatcattttatccccattgagaagtaccagttcagtctttacccaatatttatggaaggagtgggaaaaccaaagataattaatagtttcactcaaggtaaaaattataattttagtttccttttacaccaatgtgtgtgcctaatttgtttgcagtaatattgccatctgattattctttttctgatagaatcatggaagagtccaaagtcttctgtagatttttcatggtgaggttccaaaggaaatatttttttcctctaaaaataaaactggagctatagaaatagagtcactgggcctcttatatttctgattcatcttactgtacttggaataccaacattttgattttgttattactttttaaattgtcttcaaatctaagcaacctagcaatgatatttcaagagataaacatttcatttgttgttagaataaaaatcattaaaaaaattcatacatgtattatccaacagatattaattgagcattgttctaagcactgtggattgaatagtgaacataagtttctgcccttatggatcttaaataccagtgctctaattgagagtgatgggcaaaaaataattatataatgtcagatagaaataagtgccatgaaggaaaacaaaagcaagataaagggatggcattaaatgtggcactttagttgatagccagaaatggtctttctatggaggtggatgatattcgagtaaaaccttgcaagtacagtaagaccctacttgatatagtcaatagattcttggaaactgcaactttatgcaacatgaactacaggaggtccttgaataacatcattttgttcaaggtagtttcattataatgttgatgagaaaaaaaaggttttgttatacattgccatttcacttaacattgcagtttccaagagcctatcaatgatgttcagtgaagacataactgtacaaatagcaaaagcattccaggcaaagggacagtgtgtgaagagcccctaaagagtggggatgcttggtggttcaagaaacagcaaggaaatcagtgtgtgtggagtgaacaagatagagattggcaggtgtggaaggttgggtcctccaggagtagatactgagacagtcatcataacaagtttgacactttggcccattataatgtaaaaatgatcaggtagagaggaatggcaaataaataaatttgaaaaaatattttgctaatttacagtagatatgatgctgaacaaaataataagtattttattaatgtgatcacaacatatttttatcttcattttttatttttatatttttgaaggtaataagagatttgtgatgaattcagaaaatgtctactataatttttgatacagaaagaaattaatatttcctcaagtttctgagttgtgtaaattgtatttctttttcagatgatattgaaaaacaccagagtgatgcaggtttatatgtaattgtgccagtaattatttcctcttccatcttattgcttggaacattattaatatcacaccaaaggtattgtacttgaggttaagaatctttacggcaaaagtccttacgcgtattcaaaccctgatttaaaaccttctaaattaggaatattaaagtcttctaagtgcttttatatgtagtctgtatacaattaagatagcataaaaaggaaaggcctgttgtgaggaaatggcattccattttgctaggactgtaagagttaaagaatgaggaaagaaacacgaaacacagcttaacagttaaagacaggttttctttagataaaacctgaggggcttctggccaattttgttcaggagcccctttctcttacagactaagagtatgtattggttttagggtgagggggcttatcacaagcttggaatgtttatgtgtgagggagaagtttatggcggggttggaatgtctctgggaggaggggaggttatcttggggctgacatctttccagctggatggggagggttatcttggggctggcatgtgcctggtcagggaggatggaatgtttctggttggagatgttatttgtggtttatggtaatgctgaccttagccattaggctgatgccctttggatttaggtggtttttgattaaggggaattttaatatgaggtgcttgtccatgatggtgatgctcctgctctgtcaaggacaacataacttcaaggaagaatttagttttttaaaaaaaatgtacatacattcaggaaacaacaagcttataacaggaaatcctaagcagtatgttcttggaggtggcaaaaatggctttcagagttctgcagtttgggttaaggacgttttgtggtgaagtgggtggtaaaagtagccttttagtggtgacctggagcagtcagttcatttatgatcagcaggcactctgctttttagagatcagcactgtgtggctccagtctgcttggcttgtcaggcaaatgcctgagttccgtggatggtggcatgggtgccatgatactctctgtgctgagaagtccagtgtggttattttacacatgccaaatctctgtagaaaccatcgtcttcaggcaaaaaagagagagaggagattttagaatctgaatttatcttgtagttaagtgagttgatggggccacatcaaatggaattttttctggtacccactttgtgaccatttttaatatttcaatttctttgagagaaatctatccagtgtttagcatggtgcttggcacacagctttcaataagtattggctatttctattattacagtgattttcagcttgggtctagataaaagtttggtagaaatcttcatgggctagcatgtgaaaatgcatctgaccctacggaggcatagttgatctggtggactaatttctagcttgtctgttcactaactgttcacattttcaatatggatgtttttctctaattttgatgccctgtttatcctttgtagaatgaaaaagctattttgggaagatgttccgaaccccaagaattgttcctgggcacaaggacttaattttcagaaggttgctttttcaattttttttaacccagaatatatacgattgcaatctagacgccatatgacttatagagcattaagcatttttaagatttaaaaggtcatattttattcaattcatcttaatatatctgttattatatactttcaagaatagcaggatgcagggatttgaaatcaggaagaaacaaatttcagcgcatagtttatcgtatgagagttcacaatatacatatgttgcttctgtgtcacagtacataataaaataaatattagaaagttaagggtcaatctgatggagaacagatatttggatacactttttttggtataaactgtatttaggcaaaaggctggaatcaatatttttaatgtctataattatctccataattatttaaataaattagaaaattatataatcctcaaacattacaatctgaaaaatgcagtgatcataataaaacttatatttatgcagaagttccattcaagtacaagtactttatgagagttagtcaactataataaaataatttgtatttacttctatagtaggatttttcagaaagctctaaatttagtgactgttttattaattctcataatgtcccttgaagcaaagctagctttccactcataaaactggaaaaatagaattcagtcaagtcaaaatatacagatttttaaacaatacttatttggaggttattatccaggtttggtgattgcatctttatcattagtcacttgttaaaagttttcaatggtttccttttgaatacaagatataaactaaagccccctgaagctattaatagtactcaaggacctctttctacaatctgttatcaacctacctatacgactttttctatccctgggccttgatgatacctttactgttcccatccaccttcacagagccttccttgtacatgaagatcttgctctaggcccttctttcctcaagccttcctttaaccagtgtaattcaaaagaatttctaccccctttaagttcctagatcattgtactgtttttttaattgtggatagtgctctgaattcaaagactgtattttatccatcacaaatatttgtagtactcctcctgctgttttttatgtgcaaagcactgagatacatattcttacatttattaagatttttacttacattctcaatgtttcagtttcctcttctgtgaaataggctgcttaccttattaggttgtttgcgggactaaagaagatggtacttgtgacatagtaaggtctcaacaaatattaattattattgtacatatttatgtattttatattactattattattctttcagttaccctatgggacaagtgttattctctctattttgcaaaagagaaagctgaagctcatagtggttcggtaacttgttttagaggcaagattagcttaccagtttgtctggctttggagcctgttctaatagcagctgttctctatagcagtggcttctttttctttctttcttcttcgccatgacccacagtgaaaaaaacttaggttggtgcaaaagtaattgcagttttggcatttttaatgtataaatacgttttaccttccaacctagtacaccatagatacagatatgcaagaccgaaatgaaagatacgcaaagcagctttacttcttgcttgaaatagaatgttttaaaattctattttatttgttaaaaatgctggttgcaagacactaaattgatttcacaacattcgaatggcctatgatttgcagttagaaaaacactgttctacagcttatcaatgaataagtaaacaactaatattgtagacataatgaacaaagaaaaagattgaattgtaatttttcagcaggagaaagaatgccctgtcttcagaagcagcagtagtgttgttttatatacgaacaattctttttatagaaacttcgctttgcctgagtctaatcagccacactcctatatactcctcacctgtgctgttgctcactaagccagagtcttctttcattaaaacagtgttgccgagtttttcaagtaaatattttttctctcatttatcttttactaagaatttatacagtgacattttgtgtagttgtgatgatatttcagagagagatatatatatgtcgttcattcatttgttcaacaagcacatggtgagtatttatatgtaaggcttggctgttgctagggtctgggagaacagatttttcttaccatatgagaaataagacagtgaggtcagagaagagtggctgggttgaaagtagaataggaagagcttgtctccttttgcctctctaaaatagttcttttctattcatttcatccatatattcaatatgattgaatacttaccctataccagtcactatagtatgccctggcattataaggataagaaaaacactatgtgctcctgagtatacagtttaatggggatgataatcattaatacatttatcatggaaatagcattactttttttttgtacaaatttatggggcacatgagaaattttgttacatgtatataacatataatgatccaatcacaaccttatagttgtaaactacatgttgtgaaagaaggggttccattgtgctgagcgcttataatgtgggaacctggcttagtgtatccgtgggggtgagtggataaagttaagcaaattacatttgggccaagatctggtagatgaacaatcattaactaggttttgaggcagagatgtggtgtccagctaagtacctgcaaacactaagtcatgtggaaggcagtacctagcatattcacaaactggaaataggaagactataagactttttcttaaatatgagggttttatgtcaaaaaacctatatacttatctaagtaaaattgccaaattttcagtatataggtatatattaattcagggaatgatcatcttactttttaatgtcacttaaaaagaggctgaaacactctctcttcagcatttaagctctgaaatcttacctatggaccaccatgaagtggtttctcagtgttcaggagggccatgaaatgatcaggcccacatcagcaaaatgcagtttaaacctgcagcaaattatttttcccttttccagaaaatgcctggcacaaaggaactactgggtggaggttggttgacttaggaaatgcttgtagactacgtcctacctcgctgccgcacctgctctccctgaggtgtgcacaatgctgccacaggtcatctgacagaccttatatacaagtagattgaaatattgccacattttttcaagttctggtaaattaaagaaatgtgaagaatttttataatacagtgggtgtgaatgttcttatttgtaggactgattttttaaaaatctctggaaatatttgactttctaatcttataaattattttttaagcacagctaacccacaagatgcttagtttattactagggctgaccaggcgcataaataacactattaggaataaattaggttttggaatataatagaacatttaaagagtaaaggagaatataacttcaaagattttattaatgataaaaatcttctaaaattcattaacttttttctctttagcctgttgttttaatctcctaaacaattaaaatgtacccttttctttttgagacagggtctcgctctgtcacccaggctggagcgcagcggtgagatctcagctcactgcagcctcgacgtccttgggctcaactgatcctcccacctcatcccctttagtagctgggaccataggcgcgtgccaccacgcccggctaatttttgtagatatggggttttgtcatgttgcccaggctggtctcgaactcccaggctcaagtgatccacccacctcagcctcccaaaatgctggacttaacagatgtgagccaccacaccctgcctaaaatatgctttttaaaggaaaaataatatagtgtaactcactttatattactaaacaggaaaaggcaaatttaccatccaccctatgtttcatattcatgttatttaaattatttcatagggctaatagccttatattttctgatgataaaactgaggcccagagtggttcagtagcttgtcttgctcacccagcctgtccatgtaacatctgtggttcaaatccagatctatctgactcaaattgatacccgtgccatcagttccatattaacaatgtatttcttaatatgcttaatgccactaaattatacacttaaaaatagttcaaatggtaaatattgttacgtatattttaacatcataaaaatgggcaaatgatgtgaataggcatttctccaaagaagatacacaaatagccaagaagcacaaatgaaaatatcctcagtgtcattagataatagggaaacacaaataaaaaccacaagatgcccagtaggatggctataataagagacagatagtaagtgttggtgagaatagagagaaattagaattatcatatactgacagtgggaatggaatagcaactctttcggtaaatagtctgacaattcttcaaaaggttaaacatagaattattatatgatccagtaattccattcctaggtatgtactcaatagaaatgaaatagcaaatccacatgggaagttttataagaatactcatagcagtattattcataatagccaaaatgtgaaagtaacccaaatgatgaataaataagcaaacaaacaaaaaactcacactatattgcaaagaaagcagaccagaggagcctattgtttttaaaaataattcaaatacaaatatagtattttttaaaggaagtaataatttctatatcaagtgtttcctttaatttgttctccaaattcagatattttgaatattgattattatgaaagtactcttaacctgaaatttctagacatctaacatgattttcaaaatcttccctaaaattaatctattccacttttgaagctgtcattttccttccccttggtttatattaaatctaaatcctgaacctataattatgttaatcaaatgtgtttttaaaaatccaatattttgaatgtatttctaaaagaaaaatgaaaagaaaacatttatttaaaaccactatatgccagacattgctaacaataggataataccatatgtgattaaaaataattttgccaatataatttcctgccagatcttttttcttttgtatgttccacttccttttctcttttaaaattagtttttctggataatataaagatgaaaatataggacaatatgaaaacagctctatattaacacaatattttaaaactttctgcattttcttcatttttaaaataaataaaaactacaggtaaagtttgtcctgcttgttccactatttccggtccctcctcttcctggaggaacccatgatttcaagaatgctgtagcctgtgtttgtctagtttgtgcatttatactttcctactttcacatgtgtgtatccatgaccaatgaagagtaatcctttgaagtactgaaaatgttaatgtacctttcatattattccaaaaatatctctgaacattgtgttttgagctctctccaagttgatgtagttaatttagttcacacatttggactggtctgtagtattccattatacaaacatagcacaattcatttattcctctactggtggatgtttaaggtgtttgaacacttttttatatttattacaaaaagtgctgcaggaagtatggttgtatatgtctctttgttctctcatgtatatgatatttctcaatatttaaaattttttgaaaaaatatatgtgaatgacttaataatgaaatgttacagttaaatatttgagtttggaagaccacttcatgaaaaggacagtccccttttccacccctccgtacccttagtcttgctctccaaatgcctctttagttaactgtctgacttttggtttttctggtatgtcacctttttatttctaaaaaccatatgcttatgccactatgaaatgtagacggtatctattgatttctggctacaacgaggatttactcccacacattattccctccttgtgtttctacccatattgtcttgtcacttttttcaattccttaagtaatcatttctccaacctcagaaaaatctacttaaacttccatttcttgttcttttaaacagaagactatttcttggagctcccctgctatttttttttttaaataaaaacattagcactcttacgcttccctccatttctccctctactttccaatctctaaatctaagtttatgtttttccttaagtcagggttgatatgatgttctgtgttgtaatttgtctgtggtttatttttaaaaatagaaaaactaataaactgaatttgcattgttatgattatgtaaatattgtgacttactgaaccaagtatttaataatatgtgattacacttctcagtggttccgatgtcaaaggggaattttttaaaaaatatattagatatattccacctgttgatcaaaattgtgccgaattttagttagcttcatttttagtttttatcttttttcttttccttaagtttctaattgtcccttccttcctcttcctccctccattctttcatccattcatccctctctccctccctctctttctttcttttcatgctgtctttctttctccttccccttctcttccctcccctcccattatataatctatgctgttatgttacctattttatccactaccccatctttactggaggtgttgttctagtggactctccaggaactcctctatcctcctacttcaatcaggactaggctttctctaaaattactataagccatcactctaaactttcccttaactggtttctggttagtactgtttcctggattcctttccttcatctttcttaactacacccttaagtaacctcctaagaagtatgcgataagtctccatctctccatgcctgaactgccttttattctgccctcctcgattgttagtttggtggagtatcaattcttagaaatagcctttccaagagaacattgagataattcctgccttaacatatagtatccagtgttgcttctgagcagtcagatactattgtgatttttactcctcactgtttacttataatttcctttttaaacagatgcttgaaggcagcatgttcgttaagagtcatcaccactccctaatctcaagtacccagggacacaaacactgcggaaggccacagggtcctctgcataggaaaaccagagacctttgttcacttgtttatctgctgaccctccctccactattgtcctatgaccctgccaaatccccctctgtgagaaacacccaagaatgatcaataaaaaaaaaaaagaaagaaaaaaaaattctcctcatttttgttgttttgaattttcagtgatgaatctggagtggttctttttttatttaatgtggttattttttgaagagactttcaattccatgtctcctgtcaattctaagaaattatattatttctttgataatttcctctcctcttgtttctttgtttctctttctagaatctgtatgttggatgatggaccctctgcgtagatcttccacatctcttaccttttatctcatattttcggtttctttgttttgtgtgtgtgtgtgtgtgtgttatattctgagaccttgccataccctcttcttccagtgcttctgttggatttttatatactattatttttgtaaatttccaagtattctttctcagagtattctgttctggttttatgcatattttcttaaatgttgctagaaataccaattcgaggatttttgttcttttattttaaaaattcttttttcttctattccctgaattctgtgttccttctaggtcgtgtgttcctgttgtttatcttggcctctcttttattatctcagactttcctcctaatatctggtaatcctttgttttcctttcatgtttaggaatgaaacagtagacaggctgactgggagcccagtgtatataggcagggattgttgccctgggtgagtaggcagggttctggccagatgaggaaagatgtgctctcagctagcaatattccatggctgctgtcttcctccccagacagttccttagttgcttttgagaacaaaccctcagtctggttgtgaagggtagttcttacatggaggctcttccatgttcagcagaggagtagaagagccctattccatatacagaacttccattaggccccagtttccagccacagttctcttgtcttcatgtgtttttacgtgccatttcttcacgcactgtctccgctgtatacggcagggctaattttctttctcctgagctgcagctggatatattctggtcttcagctttctttgctcaccttctttgatctatactcttccaattgttttctatcttttagcaatgaatgaaaattacccacttctcattagccctctcagatcatcttctttgtggtgggtctgtatttgactcatttacatactgccattccaacagaatctctatagagacaagagagaaacctgttcagtcagccatcttgaatcagaataccatttctgtttataccttaaaaatcagaatcttaaacatatattgaatttttgttgtaagaaaatgtgttatgataactcattagccttgcttttcttccaattcaaattttagagtgtaaaagaactattacctttcttactttgttttgcacctttttaccttagcatttctgcctaatttgttaaatttcttctaaatccaaatcacctgggtttttcccttaaagatattttaagcctctttaattcattttcaatttgttccactcctttttattctttattttacaatatttttctcattctctgttttttgtttgtttttatccagccatgctcctgtgtctacatttatgccagctttcacaagagtttactccatttaacaacttcctttagcggggctaaagctagaaacaaatagatttttccttgggatctaaaaactatcttagattccccagtcagccctaggcctccaaataaagcagctcaataacccgtggcctcccagaacaccatcctcacagatctgaatcagaagcatccctaaagttgctagatggccttccaaatgtgtggaagagctggtgcattttcgagttagaagttctgtttagaagtagccatctcccctatgcccagaaatgcacattactgggcctagaagtgtgtatttcactcccctaaaaatgtaacctcagttttgtttattttcttgttccttatagccctcaggttatgaggaaccaggagagagtataaattaatcagctgaactttgtcacagcgagtagtaaaagggaaacaaagaacatgttcttctgcctatttgtgtttgggacaacctttcatcttctgttgtgttatagaaagattgttggactagaaaaaaagaactaagtcagggtcctccctctactctaattagccatgtaacctttagcaaataatcttggcagcctcaattgctttgtcagaaaaaagggagacacttggaccatataatttctgagatcttatttctagattttaaaaacccatggtaatgaatggttctgtgattctattctttaccatttttagcacttctttctctttattttttttaaatttttcttttcactgctctcctcttttattttttcttgttccaaactatcctatattgctgttggttctccctctttaaatttttccagctcgttgttcttctctccttttacctattctgttatttccctatagtttttcccttcctggggtaattaaagctgtccttagagtgtgatattaaaacattcattaagaaaatgggagaagccaccttagttcaaaattttgccctttcccaaaaggatgcattattgtaacctaacacaaaaatttatagtccagaacccatgcttgacaatgttttttgaaatcttttatctttttctttgtgagtgattttttattttgctttcttattttgttttattttatctaaacagagaacggacattctttgaagtctaatcatgatcactacagatgaacccaatgtgccaacttcccaacagtctatagagtattagaagatttttacattttgaagaaggggagcaaatctaaaaaaaattcagttgaacttctgagagttaacatatggtggattatgttgatttagaacttaaaatagatgtgtaaatttgggttcaaaatgtagatttgagtccagtttggatgtgtgattaattttcaaatcatctaaagtttaaaagtagtattcatgatttctggcttttgatttgtcatattcctggtcataaaacattaagaaaattatggctgttgctgtcattacatatctattaaatgtcatcaaatatgtagtagacaatgctgtaattaggtgaactctaaaactgcaacatctgacaaatagctttaaaaatacaatgattataagtatggaatcagtgaaaatatttagtttgtatttttatgtccaaacttttccattttagattcctttatagacacgtcagcctaaaaatcagcctattcgggtgttcttttgaatatctcctggcatttttgtatctaactttgttcaatctgggaatttcagttttcaatatccttgaaaatggcttaagtgataacttccgtttcagttaaaaggaagcccgaagttgtgtttgtgctgcccacaggacagtgggagttacagttcatatcaggatgaccctacatacccaggtcagattgacgggaccagaagggaacatcgacttctaatccagctttcttgtttaattatgacctaaatctaatttacttccactgaaccatccaagacctctggcaggcagggaaatgggcagtgatgcaaaaaagggagactctttggagcttttatgaatagttcatggtgaggacagaacttttctactttcagacagactgcttgctagttttatgaattcagcacacgaattatgctgcgttgctcacattcaaaccaaaccaacgactatgtttaatgaactcagtattcaaatttattatatatgcgtatatatgtatatatggatcccttatatttagatttaactcgtagttttatttgaaagtagaaaagaactctacaaaaacgggaagaatgtgtctttcttcccttcttgacttctaataggtgtcattgaaatgtaaaatctaagtatgaaattatgaaaggacattctttaattactgcccactcaacacatatttaatatgtgcccagattattctaaaatcttaaaaaaagatgcatatagtgaaattttttaaatggatatacttttaataaagttttataactcactgacaaaacatatttcaatagtatatgagtatgagatttcttatcaattatgagtgaaatattctatctgaatgcattggaaggcatttacagtatttgctttcaacagttactgagtatgacattttagcatgaaatatatcaaacacatcatttgaaggacatatgtaatcttgactatggttatggtttttttgtatgtattccttgttttcatattgatagcatctaattcttttgacaatcttaatatgtaggttcatttaaattttaagacagttcagtgcatatatagtagaagccttaagaaaaaagaaaatgagcaagcaaatatttgaagaaatgtataaaaccatagatttctttcagaaaaaaaaaacaggcataggaacagttttctcttcatatattatgattatgaataataggaaagttgtattaattcagtatttgtcattatgcagtattttaatacctacataagtctattccattattatattttgcgcttggcatatttattcctttatgcttttaatcactaacatattttacttaagagtataaaactatgctaaataaattgtattgtatatggaatatgcttgccattatgaagaacagctgggtataccattatttcaagtaataaatctgaattctattagtttaaaaattgtaaaattcaagttaaatgacgtgtatgatatataagctgaacacattttctatagcccttaatttagttgtgttaatttttcaaggtgatgtatcaacagctttttttattttgcatttgttttttcaatgtgtttacattgtatgaattgagctttttgcccacagattcttgatttgtagttgtttggcaggatttttctttgtgatataatcacttctataaaaaatatgatgtacatttgtcttgtgtatttgtcttcatttcacatgtccatagtaaatatttttacgtgaagttatttataaggaatagtaatttaccagtttgtgatcatctctttcatcatcattgttctctacatatgatattattagctcttattttcagatagtctcaagcagattctcagtatacagcagataagtttttaatagtcaacacaattattttactttcataccatatcttatttcacaacatagttattttaactgtttttagacaagttattttggtcatttcatttcaatccacttttttctattttgggctaacatttttagtttatgggaatgtaatttgctacaaaatattaggaaggaaatatcttcagaagatagcattttccaatgacagtaaccaatctttcctgagagctaagcacttgcagacactaatttatttctagccacaataccatgaagcacatttttagagatgatgaaattgaaaggcagagaggttagtgtacttgttcatggttgtagaattggaagaactcaagtctaagtctgtcttgtcccactttcaaatgctatcatcttaaacgggctcttccttatgctttttgatatatgtattttagtcaaaaactagttaatttgtggttgacttatgttctttattattaacttaacacacttccatttctgccagtatgacataatgaagcaaaattttttaacataattgagccttaaaatgtgtcttttcttttagccagaaacgtttgagcatctttttatcaagcatacagcatcagtgacatgtggtcctcttcttttggagcctgaaacaatttcagaagatatcagtgttgatacatcatggaaaaataaagatgagatgatgccaacaactgtggtctctctactttcaacaacagatcttgaaaagggttctgtttgtattagtgaccagttcaacagtgttaacttctctgaggctgagggtactgaggtaacctatgaggacgaaagccagagacaaccctttgttaaatacgccacgctgatcagcaactctaaaccaagtgaaactggtgaagaacaagggcttataaatagttcagtcaccaagtgcttctctagcaaaaattctccgttgaaggattctttctctaatagctcatgggagatagaggcccaggcattttttatattatcagatcagcatcccaacataatttcaccacacctcacattctcagaaggattggatgaacttttgaaattggagggaaatttccctgaagaaaataatgataaaaagtctatctattatttaggggtcacctcaatcaaaaagagagagagtggtgtgcttttgactgacaagtcaagggtatcgtgcccattcccagccccctgtttattcacggacatcagagttctccaggacagttgctcacactttgtagaaaataatatcaacttaggaacttctagtaagaagacttttgcatcttacatgcctcaattccaaacttgttctactcagactcataagatcatggaaaacaagatgtgtgacctaactgtgtaatttcactgaagaaaccttcagatttgtgttataatgggtaatataaagtgtaatagattatagttgtgggtgggagagagaaaagaaaccagagtcaaatttgaaaataattgttccaaatgaatgttgtctgtttgttctctcttagtaacatagacaaaaaatttgagaaagccttcataagcctaccaatgtagacacgctcttctattttattcccaagctctagtgggaaggtcccttgtttccagctagaaataagcccaacagacaccatcttttgtgagatgtaattgttttttcagagggcgtgttgttttacctcaagtttttgttttgtaccaacacacacacacacacacattcttaacacatgtccttgtgtgttttgagagtatattatgtatttatattttgtgctatcagactgtaggatttgaagtaggactttcctaaatgtttaagataaacagaattcagccctggcctaaggggttatacttgtgaagactaatgagccaattgttatgtaccaaatctaagatatgtaccatagaatgaaataacctgcaagaatggtgatgcccacaatcagtattttgatgacaacacaagcacttttgaaaacataatgtcagttttaattcttctctctgaaagatgttgaagtggtcactttctgataaagttagattgccaaatgtcactgtatatctctccggaataattgtcttcccccatccccacctggacatatcctattttttcccctcactgagcattctgtctacataaaccaaccactgtgcagtactttacataccttaacccagttaattattgaaataattgtatgagacatctgttactatgatactccttaaagatgaagacagtaaataatttgcccacagttacagtcagtgggtgatggaatcagagttcagatttaaatccagattttttaatgctaatgattatgtttttaacctataccctacatagccatcaatttaaaaaaactgacttgtaatcaaaatttattaagtagaggctggcacagtggtgcatgcctgtaatcccagcactttgggaggctgaggcgggtggatcgcttgagctcagaagtcttgaaactagccggggcaacatagtgaggcctcgtctctacaaaaaacacaaaaattagctgagtgtgacagaaaaaataaagattataaaatgtattaagtagaagtataatgctggatgagaaattaagtgagaattgcacagatctcatgtttgcctttaacaacttaagattaatacataagtttattatttattcaacttttggtacggtaaaaaaattcaaagacagcatattgggcaacaaactaaattaagaaacctgcacatttggatgttcagtggcaagaagaccttcaagaatatcagtatcatcaaaataagtactttagtgttcaaaaatatgcctatgggtttttaaaaattatcagaatttcatatttagaccgagacaagagactcccaattttactgttatcctaaataaatctctacattccatctctagtccagttgtggctatgaagtgagcagttctaaacaatgacaaagattccagaccccacttgatagatatttttcacactttataatcaatttccactcaggaatcaataaagttattccatgtcataagtatttttaagatgtctcaggatctcacatactcaactaatgacccccttacaagaaataggtaaagggctgatagcaactcattacttgatgtggtacgagagccttagttctatgcaaagataaatggagaagcgtttttttcatggataattttacatggctttagagacacagaaacagataaattattacatgtataaaaattttagtaaaattgacattttaaatacatgcttatagattattggtatttaattgaaggtacagtacagaagagatagaaaaataaattttgccccactctgaaattgaagactgacctctgagcatgtccgctgagacacagtattctcctgtgatctgggacccagaataacaggaaagagaaactgatagat

SEQ ID NO: 135 - DNA, 59645 bp, Human
atctcaagccaccaataaacctgacatatttgccagtttagtcataaaacagaaaatcctttgcctaatcaaacttagcttaatagttccttcagaagcaggcagggccaagaggctgagtctcgtgtttctggaataatgtggcatgtgtgtgtgtatgtgcagtgccagattgggacttggccccctggaagtgactgagccaggacagggaagggatctattgaatggtctggggaacagggctggccaagctcatggtccctctgaggtcagccctcccaccctcaaacctcctcccactccacccacccccaggaaccctcccacacactctgggtaaaacacagcttggcaagctctcacatcatggcttggtggctacagtgtgttgatcttccctcaggaccaaccaagaaagctagccttggtgcttctaaagctgccagcctcctaagggagtattcctatataggaatatactttgagaagctgataagacccctctaaatatttgggaggcagcctttgaattaaattatttgcctgctgatgtcaactattagagtgctatttaaaagttaaaacccaagaggcatatgtaaaaggaaataagtcaaatcaatcatttatctcaatatcagagtaattcagaggaactcttaattacatacctccaagagacttgtgaggtcaactccattctatctgctgcccttgaagctcagctggagtccctcaacaccccgattggaggatgaactctagcatagggaattctgagatggagggagggggcgctggttcaggatgcttggaggttctagaaagaactgaggtcacctggaagatacaacgctactctaaaaatgattcaggatggcttttctatgcattctctactcccataggaatcaggggccacctcccaggatggaatctgcctgatgctgtaacagtgttcagctccccaatttccccatgataacaggcaacctccttctgttttgtctacagttaattaatcagtcattgctgacagtaaggctccatcctcaacacaggatattttctgaagcattaatttttgtttcaatagttgatccttgtttggaatataatgtgttacaatgtagtggtacttagtattaaaatcaaaatacctttttattcatctttcaattttaatacttttagcatttcaaccattatttgaagggttacttactgcagtatgtcacatttatatacacacatgcacatgctgcagtgctttcagtttgagccagtgatattttaggccccaaatgctctgaaaaaatagagaaagctctcaccaagctaaggaagtgagcttgcagaccatgcctttaaaaattttcagcttgataacttagtcctcaagatgactaggtttctcttcccccacccctcagttagcatgtgcgaacaaggattcttttgaattcccaggaggggaatgagtttaatttgactggtaaaagtcttcctaataggatacctaatactgtggctcttagaactagctacaaaaatatttcatatgtttatgtctcataatgggtaattttggtttggatttatgtcattttgtctcagtatcacaatttttgaaaaattagttcaaagagaaaaaaaaaagaaaagaaaaaccatggtaaacattgctcagtctcatactcctaccctctctatgctaaaacaggaaatgcatttctgacacttttaaaatgagcaatcacacgtataatcaacttggttaaaacttccttcctggtaactgcaacacttcctctgcatctggatatgaagggagccccagaaaagcggaagaatttagacgcacactgggtaggtttgaatttgttttgttttcaaaaattaaacaaatgatccttcagcatcatcgcctccgctgctttatcaggtattgcttccttctattttttgctctttgtggggtctgactcggaatagtggcacttccttctcggctagattatctgaaactgttgtcggttcttgagatgatactaccaccgaatgtctgtgtttcattgtctagtccaacctgtattgtggatatctacaacgttccggcaatagttttgcaggtgcatcacatttttgtttttgttttgggaggaaaagggagggcacggcagccaggcttcatattcctacaagtgcatgcttcaagattactgtacttacagtgtttccaacatcttctcataaaaggggaaagcttcatagcctcaaccatgaaggaaaccagtgagtattagtcagcctgttttcctctgcatcttataagatcgtttggtatcactgaggcagaagttattgctgtgtatttatatgctgcctaaatttggacatgttttatttcaagttagtgtcaatatcaatgtatcttacagttctcttctttgttagttattctataatgtagcaaaagaccaaaatgaatgttttaagccacaagagacagttctttgggacagttggtttcacttactaagtataacttcatattttaagagagggaatattggttttaaaagttaagccaagatttgaacataagtttggatcaaatgaaatttgtctttcttatcttcttatcaagctctcctttttggtatacatcaaatgctccactatttcttaaggaaataatgtagttttaagtctaacattagttatttaagagagtaaacgatattttctgaaacattaattttttgtttcaataattgattcgtttagaatataatgtattacaatgtagtgatactaaacattgaaagcaaaatacctaatctttcagtgttaatacctttcaaatttcaattattatttgaaggatttcctattgcagtatgtcctatttatacgtaagtgctttgtgaagggtaggtacttactgaattttgtggaaagagtgagtaggttaatgagaataaatttgtgaatttgtgttacaaaaatgaaaatattagagcaaaaaagaagttaaatgattgggggtcttaacagaaggtcactggagtccagaaatcctgccttccatcctgtagctcctccattattaagtagagacagatcaaatgaattttaattaattaattaaacaatgttaaaattacctaaatgttcctattgggagagtacagccttgggtgactcttctaagatactgccctaatatagcagtgacagccagaatgctgacaaattccatgattcaaaattttacatatctgcaaatggttttgactgtaactttactaattccgatatgttttagctttacaaatgaaatgacttgctttcctaattagaaagaaaaaatgaaaccaagaggcaggaaatttattagggagtagatcctaggtccaggcagtttgaaaacaggcaacgtgaagcaaggctgggtgaggtgtctgggttccaagaagtgtgagacttaacaaagaggaagtaagttaaaggcctgttttcaaagtgagattttttggcatctcgtgttgcaccttgtaaactgggacttgaaccttaactgtactattttagtaatctatatgtttcagtatgtttaagaacaatgtccattctgagccattataatgtgtcatgcgctgtgctggatgagtgttttacctacctctttaaaattttcaaagtatacaaaagtagaacgaccaataagcccccatatacctgtcacccatattgaacaagtattactttatttaactctccctctggggcattcattactaaccagtttgagagatgagaaacaggctcagagattaagcagcccaaatcacccagaaagtaagtggctgggccaggactcaccggcccgactccaaagcccacgctctgaagggctgtagtgcttccagtttaaaatacttggtccctctgggtccctgtgcacatgtacgccgcctatacctcctcttccctcatctcaccagaaaatataaggggaaagtgcctttcttgtgacaaatccctgtgtccctccgctcccaggtcgcatagggcatggagctggagaactataaacagcccgtggtgctgagagaggacaactgccgaaggcgccggaggatgaagccgcgcagtgctgcggccagcctgtcctccatggagctcatccccatcgagttcgtgctgcccaccagccagcgcaaatgcaagagccccgaaacggcgctgctgcacgtggccggccacggcaacgtggagcagatgaaggcccaggtgtggctgcgagcgctggagaccagcgtggcggcggacttctaccaccggctgggaccgcatcacttcctcctgctctatcagaagaaggggcagtggtacgagatctacgacaagtaccaggtggtgcagactctggactgcctgcgctactggaaggccacgcaccggagcccgggccagatccacctggtgcagcggcacccgccctccgaggagtcccaagccttccagcggcagctcacggcgctgattggctatgacgtcactgacgtcagcaacgtgcacgacgatgagctggagttcacgcgccgtggcttggtgaccccgcgcatggcggaggtggccagccgcgaccccaagctctacgccatgcacccgtgggtgacgtccaagcccctcccggagtacctgtggaagaagattgccaacaactgcatcttcatcgtcattcaccgcagcaccaccagccagaccattaaggtctcacccgacgacacccccggcgccatcctgcagagcttcttcaccaagatggccaagaagaaatctctgatggatattcccgaaagccaaagcgaacaggattttgtgctgcgcgtctgtggccgggatgagtacctggtgggcgaaacgcccatcaaaaacttccagtgggtgaggcactgcctcaagaacggagaagagattcacgtggtactggacacgcctccagacccggccctagacgaggtgaggaaggaagagtggccgctggtggacgactgcacgggagtcaccggctaccatgagcagcttaccatccacggcaaggaccacgagagtgtgttcaccgtgtccctgtgggactgcgaccgcaagttcagggtcaagatcagaggcattgatatccccgtcctgcctcggaacaccgacctcacagtttttgtagaggcaaacatccagcatgggcaacaagtcctttgccaaaggagaaccagccccaaacccttcacagaggaggtgctgtggaatgtgtggcttgagttcagtatcaaaatcaaagacttgcccaaaggggctctactgaacctccagatctactgcggtaaagctccagcactgtccagcaaggcctctgcagagtcccccagttctgagtccaagggcaaagttcagcttctctattatgtgaacctgctgctgatagaccaccgtttcctcctgcgccgtggagaatacgtcctccacatgtggcagatatctgggaagggagaagaccaaggaagcttcaatgctgacaaactcacgtctgcaactaacccagacaaggagaactcaatgtccatctccattcttctggacaattactgccacccgatagccctgcctaagcatcagcccacccctgacccggaaggggaccgggttcgagcagaaatgcccaaccagcttcgcaagcaattggaggcgatcatagccactgatccacttaaccctctcacagcagaggacaaagaattgctctggcattttagatacgaaagccttaagcacccaaaagcatatcctaagctatttagttcagtgaaatggggacagcaagaaattgtggccaaaacataccaattgttggccagaagggaagtctgggatcaaagtgctttggatgttgggttaacaatgcagctcctggactgcaacttctcagatgaaaatgtaagagccattgcagttcagaaactggagagcttggaggacgatgatgttctgcattaccttctacaattggtccaggtaggggatgttggtgttatcaatggaagccttctcaaaaggaattgatttgcatatgcacaggcactccattcagttgtcatcaaatgccctttgttcagagcttcatcatcggcaaaagtagatatgatgaagctgcctcaaaaagtagtaaactgttccatgtacatttttactgtctcggagggtttgctgacaagggttttgcagacattagtacttcacgtttttaggagaattggccctgtgggaatactttgttctcatttattattttaatgatagattgcacttactgaatgctttcttgtgccaaggctccaagtgactgacatgctttcagtgtattatctcatttaactcttccaataactatgatggaggtcaaattgacatttgcactttttacatgaggaaactgaggtacaaagaggctaagtaatgtgcccaaggtcacatactttgaaagaggtagaccagaattcaaacccaggaggtctccctccagatcctgctcttttcactaccccaaatccttcacaaatccaccaccatatccttcatcagtctggtgtcaggattctggggctagagataaaaggtcttattctctgtgtatgtctgttacagttcacagaataatatctcatatctgggtagagtcttgaaagctcctctctgcagataggtacaggactgtatgtatttctgctccgtttctcatgatgttccctggggtcctgagaggacaagtgatttttctaaggtttagttaagaagttaaagaaagaagggggaacagttcccctgctcactttagcagttctcaacttatattgtactgcttgacaagggaaaagaagtaaaggaatttgaatagaaatgctattttagagcacagccttcattcattaattcaacaacatgtactgagaagactggcattaaatgagtacacacacaaatagatgtttaataccaaattgtgacaaatactttagggaaaactataccgtattatgagaaaacagtccaggggtccaagggacacttaattttgattaagagaccccgggacagttctgagtaagtgacatttgacctgagatctttaggattagccagactaaattttacacactaaactatctaatcactatccgtatttataggaagttctggagttttctgataagcattttggatagcctcaacttaaactctcaatcttcaccttcctgttagatacttgaaacattacatttggctttgttttcatccattaaatatattcagtagttttttcactagttgagatatttgtataacactaaagaattttagaataattaaagaatcttcagttttctagctctccataacagaaacaacatgaaaaaaacttggatgagctctgttgcaaaccccaaggctaacaggaattatttttcattgtcatgttcacaagtaaactttaaagagctggaaaatgaataatgttctttttagaaatgtgttaaatgaaagaggtcaatacataatattaacattgaatttgtggtcttaaatctgaagaagaatagtcatttgtaaaactacttgagacattttcagctatggctaaatgactcattcctgatcaaaatggtctcctagttgagatctgcactgtctttacagaagtgaaacctgaagaaggtcagaaagactcacatctggcttagaaacttaaaacattgcgaaaatgagtactggtggctaaaagaccacattctcagaattaaggcctttgatgcagctacagtggcacctatttgaccatacttttgaaaagcatttttgtaaacacttgtataattgaaacatgatgaagccactagtgatcatgtccaaactggaaaaccagaggaagaattataaatccttccaagaagcctccagttcctaaaatataaactagaatgtgaatttcttccgttccttaggaaaaaaggatacaccatttctattcataaagtgtatactctgagatatttaatattaagtctttcttcatgtttacatatgacatctatcctctaactttatatatgcttttataataatctgaacaatgtttgttagtgttgctgcttttaaaattatgaactatttcaaacttacagaaaagcacagagaacaatgaaacacctatgcactcacaagatttaattgtgttttttacattttatcagttcttcctcatcagtaatggagctgtactaagtcaatattctctaacatcagccaagtgatatgaaaattactaaacactaaaaatgaagatcaaattatacttaagaaaacataaaatcagggacttttggacagaaagctctgtacacaccacagtgtggcagagggtagtgattgctctgtgtggattgatctagagccactgtttacttgtagttaaggacctgtgagacagttcagtgacttgccagtgagatgccgaaaagggaagctatagggcttttaggatctttccatctaacaaatatttttctccttacgtgtattatactatatctccactgtccattttctttctcacattctctcttaccttccactttatagattggttacagtgtctccatcttccccctctacccctccaacaaaaccagtaagacctaattagagcaaattccctcacctcttcacctttgaatttatcagcagcacatgactgtgagtcaaaagtttcatcctctaatcccagttatgtcatcggctgctctatgatcttaagcaagtggttcagtctggtcctaagtgtcctctaacagacaggattaaacttaagtgactgttaagattttcatctttctagccgtgaagacccagtaaagcagagcaccagttcttctccatttccttttccctgattcaacgacatagagtacagtcctacaaatgccaatgtgttcttcctttaggctgtgaaatttgaaccataccatgatagtgcccttgccagatttctgctgaagcgtggtttaagagtaagtacttccattttgataatagcgtgaaattttaagttgccaagaattaactggtagacctaaagcattagtcataataatttcaactttcttgtacctgccctcagaacaaaagaattggtcactttttgttttggttcttgagaagtgagatagcccagtccagacactatcagcagaggttcgctgtgattctggaagcctatctgaggggctgtggcacagccatgctgcacgactttacccaacaagtccaagtaatcgagatgttacaaaaagtcacccttgatattaaatcgctctctgctgaaaagtatgacgtcagttcccaaggtacggtggctatattttctgtgttctctttccaaatgccttcatctccaaatgccattgttcctataattctttttcttcctggaatccaagttgcatcctcctgaaggcaccaagaacacatttttgagttttctgtctgcatggagtaaacaaatttaaagttctccttttacaagttcataatttttaactatatatttacatattcttaactgaaaaattaagcagcattatgcagatgtaagatgtagtttttaagaacagttgcatacacaaagattagatatttccaaatctttacctttttcttcacatctctgaatatgcacatacagttttcaagtttacagtcttataaaatgatgaatttttgagaggctattttaattttttggcatttcttcatctatatatctcagagtgatatatagagatacattcattcttccctatctggggtcctacatctgtaaattcaaccaagcatggatagaaaacatttgggaaaaaaattgcatctgcattgaacatgtacagactttttttcctgtcattattccctaaacagtacagtgtaacaactatttgcatagcatttacattgtatcagatattataggtatctagagatgatttacagtatatgggaggaagtgcataggtcatatgcaaatactataccattttatatcaggggcttgagcattcatggattatgatatctgcaggaggtcctggaaccaatccttacagacagcaagagacgactctgtatctgtgtgtgtgtgtgtgtgcataaaggtaataaacacacacacacacacaccaccttctctctcaagctgtttccaatatcttattcctaccctaagaaaacctgcccctgccctaggaaaattaatcactccttctctgtatttctgtagattttgattgatactacattaaattaaagtctttaacatatcttcctggtctggtaaactgtatcaaccttgaatctagagaatatctctttttcatttttatatacctagacctagcactatggctcattacatagacacttcatgtactcaaccagtattttaaactcctgaatatttaaaatttctttctccctttgattcttacaatgcttcctcctaaaaatgatgatggtaataataatattttatttgcattttaagaaaggaaaacatttgtactgaccctcattctgtcagtcatccagtaatttttaattcacatattttgcctttagaattttaaggctgtcacatccatcttctctacttctctacagaacctaacttcctcttctgaaaagaaattacagaaccctaaccaaattccatgtattattttcttaaaatgtctgttcctcaaatcagatggtagtttaaagtttaatgtgctggaaagaaaactacagtattaattccttagcatcaccctcagagcatacttctctacttggattgtgttggtgtctatgtgttatcccacatatattcacatatttctgtcccctgttgtagtatgtgtacatggttatgttgctcaccttaagcccaatgtatcttgccacctcatatggttagctcctcaaaggcagggcccacccacatttctcctgctctacaccagaacaaatatatagaatgctatgaataaatgtgttctcaggaaatgtaatagataatattgatgatttctggaactcacataactcttgtgtacttttgacaattacagttatttcacaacttaaacaaaagcttgaaaacctgcagaattctcaactccccgaaagctttagagttccatatgatcctggactgaaagcaggagcgctggcagtaggtatcacttggatgtctccatgtggtctttatgtcttgaagatgtctaacgtgcttgctggggcccagtacttaaaagctaatgtttatgcagagacagggaagctggagagtctctggatgggtttctcataagcccttgtctaatcactggttatgaaagcctcaataccagataatttcccttccatattttttaaaatcagcttgagatattctttgtatacaataaaaattgtccatttaaaatgtagaattcagggaacaggcgcggtagctcacgcctgtaatcccagcactttgggaggccgaggcaggcagatcacgaggtcaggagttcaagaccagcctggccaacaaggtgaaaccccgtctctactaaaaaatacaaaagaaaattagccaggcatggtggtgcattcctgtaatcccagcaactcgggaggctgaggcaggagaattgcttgaactaggacctaggaggtggaggttgcagtgagccaagatcacgccactacactccagcctgggtgacagagcaagactccgtctcaaaaaaaaaaaaaaaagtagaattcagtgagttttgagaaatgtatacaattatataaccaccgccacaatcaagatctagaacatttccatagacatgttacagaaaaagttctgtcatgtcccattgcagttagtcctttttctcctcccattctctgtgataatgcaacagatctactttctatcataaaatgccttttctagacttttattaagaggaatcatatagtatatagttttatatctgaattattttactttccataatgcttttaagattcattcatgttattgtatgtatcagtaatttgtttctttttatgacttagtagtagtcccttgtatggatataccacagtttgttttccattcattttttgagtaaatgtttaacagtggggtagttgggtcagatggtgtgtgtgtgtaattttacaagataccatttttccaaagtggttataccatttaaattccagcaatgtatacgatgagttctagttgtttcacatcctagcaagcacttgttatcatcagttttttttttgttttttttttttttttgagacggagtctcgctctgttgcccaggccggactgcggactgcagtggcgcaatctcggctcactgcaagctccgcttcccgggttcacgccattctcctgcctcagcctcccgagtagctgggactacaggcgcccgccaccgcgcccggctaattttttgtatttttagtagagacggggtttcaccttgttagccaggatggtctcgatctcctgacctcatgatccacccgcctcggcctcccaaagtgctgggattacaggcgtgagccaccgcgcccggcctatcatcagtctttttaaacttagccattcaaatgagtatgaagtggtatctcactattgtttttatttgcatttccataataaggttgagtgtctttctatgtgctcattttccattagagtacattcttctgaaaattttctattcaaatatttcaccagttttttaggtgggttgccttctttttttttttttgagacagagtctcgctctgtcgcccagggtggagtgcagaggcacgatctcggctcactgcaagctcctcctcccaggttcatgccattctcctgcctcagcctcccaagtagctgggactacaggtgcccgccaccacacccagctaattttttttttttttttgtatttttagttgagatggggtttcaccgtgttagccaggatggtctcaatctcctgacctcgtgatccacctgcctcggcctcccaaagtgctgggattacaggtgtgagccaccgcacctggaccttagttttagttatgagagttacttatataaactggatacaaattctttatcagatatacattttacagatattttctgttagtctgtggcttgcctttttattttcttagaggtgtctttcaaagcagaagctttaaattttgattaagtcaaatttgcaactttttcttaaatggtttgtgcttttagtgtcttatctaagaaatctgtctaggactagcacagtgtctcacacctgtaattccagcactgtgggaagccaaggcgggaggatcacttgaggcaaggagtatgagaccagactgggcaacatggcgagactccatctctacaaaaaataaaaaaaaatagccgggcatggtggcacgtgccatagtccccactacttggaaggctgtggtgggaggatcacttgagctcaggagtttgatactgcagtgagctgtgtttgtgccactgcattccaacctgggctacagagcgagaccctgtttcaaaagaaatgaaaaagaaatctatctaatccagtgcctcagcctggggtaatccctctgtctgccaagggacatttggcaatgtctgaagacattgttgatggttataactgggagaatgctattggcatctagtgggtagaggccagggatgctgccaaataccctgcagggtacaggatagtcccccagaaccaacactatccaccccaaaatggcaacagtgccaaggttaagaaattctggtttaactcaatgtggcagatattttttcttagaagggttatggttttaattcttacattgaagtctgcaatccaatttgagttaatttttgtgtacagtgtgaggtgaaggtcagagttcatttttaaatatgaatatccagatttttcagcaccatgtgttgaaaagactgttttgttttgttttgttttgttttgtttttcctggagaactaccttggcacctttgtcaagtatcaactgaccgtatatgtgtgggtctacacctagattctctgttctgttccactgatctaaatgtctgtccttacatcaataccacacattcttgattatgtttaaataacaaagcacttcatatacgtgtgcttatacaggcaacagtatacttccattaacccccgcatcctttgcattatttttattatgatttcaacttctatatatgttataaatggcacaataagttactatttttgccctaaacagttaaaaaatagacttaacagacttaatagatgaaataatttttaactattcacctacatatttaccatttttggtactctttattgccttatatcggtccacatttccttgagcttctaacatcttttctactgcaagtttgctgacaataaattctttcagcttttgtttatctgaaacactttttattctgctttcatttttgaaaaatattttccctgaatatggaattctagattgactggtttttttctttcagtaacatttttttctggcttgcatattttctgatgatgagtcttatctttgattgtgtctgcataatacgtctttttccccaggctgtttttaagattcttttttatttctggttttcagcaatttgattatgatgtaccctggtatgggtttcctttgtgtttaggctgctggagtctatggagctccttgaatttgtgagtttatagtctatcaaatttggaaatttttcaaccaattttttatgttgcctcttttctctcctctctgagacttcagttacagtaatttagactgctggactctgggctcagtctggatttccttcctctgtgctgtagcctagaaacagcccccaggcagtaatctggggcaattacagggctcacttcatttgtcttccttttcttggggatcacggacctacactgcctgttcaatgtctgaaaagagttttatatattttgcatagttttctagttgtttatggcaggacggcaactcccgtagcagcgaagccacatgagaagatgaggaagttcttcccctgaatgtttaattttatatacaattaccagcaaactggccctatagtaaaagcacacactatccactgtccattatttaaagattggtaggaattatgacatattaatacagtttcaaattgtgtttgcttctttaaatgactacatcacaattttgatctgtggtgaactcacctttgcctgaaacacctaccttttttatgtttaagtgagtaactgccaagccacatttcccctgccttgaatttatttagatgtatgaggtttagggggagggcgtgttgtacctaaatgccagattttccatttatttctgttaaatttcatctgcttagatgtagcctattgcatctgattctgcaataatagtttttttgacattgtggtagcattagaattcttttttcaaattaaatctcagaaggcggacaaatataatagccaggttgctgtctattaaagaggatgtgggagtgtcagagctctgtgtgcgtggggagggtgagatctgccatacctcttaggcacttccaaagactcttgtggttctttggagcacagtttgagaggcactggtttaagagttgtgaattcgctctcacatggcatttccagatttgctcaaaacaacttctgtatttttacccaaatattgaaaatcattctccaactaggactttgtccttgttgtttatagtgatgttttgcaagagaatttgtgtctccaccatgtatattcgttattcattgtgtgtggggaacatgtgactgcttccttacagattgaaaaatgtaaagtaatggcctccaagaaaaaaccactatggcttgagtttaaatgtgccgatcctacagccctatcaaatgaaacaattggaattatctttaaacatggtgatgatctgcgccaagacatgcttattttacaggtatgctaattttaagattgttttcaattatctgaaaacaattctatattacatcaaaaacatgctttctcctactggctctattcccactctcttctttcaagtgatgaattgtgatcaaatattacatcatagagagttttcacttggggaatttggctgcagactattagatatgcaatctaatgagcattatggttctgtccaagttgcatatctaacactcccaagtagccagatatacctccctcacctaatgtcttttttatacaccccattctaagcttgataacatagaaaatagccatatttatccccagcactcacttcattcctgcccatagacatgtctgcacatctctaggcactcttttagatacatctcctctgatgcacataaacaaatcaagcaaatgattttatgggaaggagaaagatgaacaagtaggtcaccacagaaatcctgcaggtaagtgacaagagtgaagtactgttagggcagaaggtgaatggtcaatatatcagtgctaattattttcatattttctaacatttctagataaactttagcttcacaagtctgtaaagtaatattctccagattctagttggtcagtgttgtagaggtaataatttctaatacttaatatggtttatttgaagtagacaaattacattgatttcaaggtagcctatttaaaactggtcatgtttccaattgtaagtttctgtttttacttatttctaatatagaaacaggaatacctttgctttgcctttgctttgctttcaagaatgatctatgttttgtccaggaggtattttagaaaagaaaaagagaaatccttcaaactttttgcaagtttattaaatttcaaataaatctgtagaatattttgaattgtttgaagatggacactttaaaaacacaaaaattaccctgttggtcctctcattttgagtgaaagtttgcctttgccctttatgtactttgtggttttgtttttttttaatttttttaagatgaggccttgctttatcgcccaggttggaatacagtggcacgatcacagcccactgcagcctcaaactcctaggctcaagcaatcctcctgccttagcctctgaagtaactaggactataggtgtgcaccaccatacctggcaaattatattttttgtagagatggggtcttgccatgttacccacgctggcctcaaactccttggctcaatgaatcctcccacctcagcctcccacacaactttcacagtcttctccttttctttcccttcctcataagaaaaccaacagtgtggacctggaaaatagctctctggtcaaaaaaaacctctctgcccttcactcaacaaaaacatagcctttccttctctgggccaggcactagcccacaatctccattagactcttcatccttctataggaatgatcaagattgtgaaagacaccatgacaattgccaaaattgctgggattctaggcacgagccagttaatcgccaaaattgctgggattctaggtgtgagccatcatgcccagcctactttgtttatttgttggggcacatagtttggcagctaagggcaagttatttaagctctttaaggctttgttccttcacctgtagaatgggaataataatcctatccacattatagggcaatgcaaggatcacacataaagcagcaatcagtatatattcgctatcattatcatcattgtagttactgctgctttggttattgcctttgataaatatgtgtaaggatgttagagttttgtggtaaaatagacacaagtaaagcagaacatttgaacagagaggtgatgaaccacagctaaaacccactccaaaagaaatgtattggccaagcatggtggctcacgcctgtaatcccagcactttgagaggccaaggtgggcggatcacttgaggtcaggagtttgagaccagcctggccaacatggtgaaaccccatctctactaaaaatacaaaaaaaattagccgggcatcatgatgcgcgcctctaatcccagctactcaggaggctgaggcaggagaatcacttgaacctgggaggtggaggtggcagtgagctaagatcacaccactgcactccaggctgggcgacagagcaagattccatctacaaaacaaaaacaaaaacaaaacaaaacaagaaatgtatttatcctcttccccaaggtacatttcggaaaacaaaattaacaagctcacaaagaagagaaactttagagtaccagattgaccaataaacgtacagttgttacttatatgttttacatttactcttatattttgtgttactagatatgattgctatttttaagggagaagaaaaatatattaagttaatatatatataatataaacatttctgtgtttcgatgcccagattctacgaatcatggagtctatttgggagactgaatctttggatctatgcctcctgccatatggttgcatttcaactggtgacaaaataggtatgtagttacctcaggagatgaatagacctctcagctcgtttgaaaagattataattccttcagtgtagacatttaataactgaaaaatcataatcttaatctgtataaaaaggaagaaaacatttctatgctggtgaatgtgactctcaatttaatgtggatatattgaaaatacatgaatgcatgattcaaatccctgtgactatacatggaaatgattttagtaagaacttgttccctcctctttccttctccatctctaaactttaactcatttcattacacattaaacttttctctcacaaaaaacatttaaaaatagatggaaagatctgtcacttattttagtattccagaattcacattatcaaagctattacacactctactatcaggtatttttatagacattcagcattagtttcagtcaaacatatgtttattcaagtttctgatctgagaactctacaaaaccatttacatttaaccctgtaatttaaaaaaggaaaaggcacagattgccatctgaggaaggatatgctcagcatataaatgcttttatttattactattcaaaaccagccctttcctcttgtcattctgggatattgaaaacatatcccacacaacttccatatcctccttctttcctttctattcctcataagaaaaccaatagcatagacctggaaaatagctctctggtcaaaaaaaaaaaaaaaaaaaaccctctgcccttcactcaacaaagacatagcctttcctcctctgggccaggtactggcccccaatctccatcagactctgtgcatccttctgtaggaatgatcgagattgtgaaagacgccacgacaattgccaaaattcagcaaagcacagtgggcaacacgggagcatttaaagatgaagtcctgaatcactggctcaaagaaaaatcccctactgaagaaaaggtgagctcatgctttttcccagtctaatggctccttacaagttgtcatttatatagcagtagtggcttcaagttttcagagaatctgccagtgtcttgcctcctgacatattagtgaagttttttacttgtgaaataatggaggttttaagtaccctcccgtggtgacagcatatctgtgtgaaacagaggcactcagttcaggactccatgagcatttgcttctcttttgattatcaggcatactttgcttaaaatttggttctgtaaaataatctgttagcactttttatggctatctatttttgttgttcagccaagatatttagttaccatgtataaactcttacgtacctgggaaatacaacatacacaacaaagtaatttataatttactgctgaactctaatctaaatggtaaatcatggatgctgaaaatgtcacttccaccattccttggaagtgcatatgctcaatccttcacaagctgtgttttagctgtttggctgtcgtttaaagttctgctgcacaggattagcacttctcatttgcatggttagcagccttttggggaggaaatataatgagtagcacttattaatctgttatacatggggatctgtgaacccaagcatactcttagtggtcacaagcaaaacatgttcacaaatgaaggagaaattaccatgggttctatatagttgttggcaagtgatgcatggagaggaagtgaaccctttgattaaattactgttgccctttgactcttgtttcttcctcatgccattgtgattcactgaatcttcacctaaaatataagcagagcaatgagaaagttggcaattcatagatataatgctaatgaaatcaggcacaactaacttgctctctgaaaatggtttccagaatattctctttttagaagtcatttgtagattcatgatgctttttgtagttagaagacaactaatattcaaatgcattttaattagtttcaggcagcagtggagagatttgtttattcctgtgcaggctactgtgtggcaacctttgttcttggaataggcgacagacacaatgacaatattatgatcaccgagacaggtgagtttatttagtgcagaataaacttttattgtggtaaaatatatataacataacatttactattttaactctaattaactgtaagtgttcagttcagtggcattacatatgttcaccttgttgtacaaccatcatcaccattcatccccagaatttttccatcttccccagctgaaactctgtacccattaaacactaactccccatgcctccctcctttcagaacggagtagtctttaaatggagtttaagactggagcacatatttagaagtcattgtgtagggacactggtgcttcagttactctagagcagtggcccccaacctctttggcaccaaggaccggcttcttggaagacaccttttccacggacaggggtgggggagcaaggatggtttcaggatcattcaagagcattacgtttattgcacacttttttttcaactcacttgccactataaagcctgccaccagatgcagctcaattttcacttgccactcactgagagggttttgatatgtaaggaattgatttattatggtctctgtgcagtgaaacctctctgctaatgttaatctgtatttacagccactgcccagtgctagcatcaccacctcagctccacctcagatcatcaggcattagattctcataaggggtgcacagtctagatctttctcgtgcacagttcacaatagggtttgtgttcctatgagaatctaatgctgcaactgatctgacaggaggtggagctcaggcagtaattcaggcaatggggagcagctgtaaatacagatgaagttgctcacttgcccatcgctcacctcctgctgtgtggcccagttcctaacaggccatggacctgtccatggcccaggggttggggacctctgctctagagagaccacctcacttgaggactaaggtgtgagtgaaggaggaagaggcaggaaatgagtcttaagaaggcaaagttagagggaccgctggaaaactaggagagggtcatatcccagaagctggcgaaggtgggagtgatcaccagtgacagatgttgcagagaaagaacagaaagaactcatagatatccttaaatctccctaacccactccactttagtggttcactgtccactctgacagtagtcagtagtggccaccaaagcatgagatttttctctatgaatttgggccattttaagagtagagtctggaaaaggcatcagatggggacagattgcttacttcctatgagaattaaaagagataatatatttatggacaatagaaatgataaagggctaaacaaataagatgatgattattgtggtggtgatagtagtagtggtagaaattgacccaaaggagactcaaaatgatttgcttctatcatgctgcccaagtttctgagatcagatgagcttagatacattcaggatggtatggccgtagatggctactcaaaaggaaaaggtgaataacccctgcccccaagcagagtgaaacatcagtctatcctgagttgcgtaaagagcataagagagtcttagggataatgatgacatagtggccagagagtttgatttatgtttctaagaataattttgagatgagaatcttatagtggcatctggctgtcatctaaagaacaccagaaggatatcaaaaacatacttggttcaaagaatgttttgtggctacgactttcacacacctgctaagacgaaaaatatcacaaactgacaaacattgtaaaaaatgctttcaacacaagatagctcatttttaggcaactcaaagaaatattttaaggaacaaagtgctgtgccactgtaatgatgtcagatactttcttctcttaaggaaacctatttcatattgacttcgggcacattcttgggaattacaaaagtttcctgggcattaataaagagagagtgccatttgtgctaacccctgacttcctctttgtgatgggaacttctggaaagaagacaagcccacacttccagaaatttcaggtaagtcacctccttcatcgcctgctgagaatagcaccgaagcagatggttcctgcagcactccgcagccttcacctctcactcagcttggaggccagtccagcctctacccctaccctcttctggcatggccaaccctacctcctccctttcacttccattcattcctttcccaggtgcaaaatgacacttctcagtaatcctcccacctaaaaccaaacagaagtagaaatatttcataagcagtgggatgggcaaatgtggaacaccaggatgatgctggcactaaagagggctttcaggaagggtgtctgctgagcaggttagccactagatatttgtctattcaagaccttagctagaagactcaaattttacacatatttttcagaactcacaaaaggttgtgagcttctcttggtttttgctacaggtgaattctcgatgtgccaactgggcttatctcatttttataaggcagaatacccaatatttcatttgaaatcttgttggtttgaccacaagttctactaagacctctagcttttcctgcttacctgtaaacaagctcctacatgagtctgtccatctccctgagagtgtgtagatcaggggagtccaatcttttggcttccctgggccacattggaagaattgtcttgggcaacacataaaatacactagatagctgatgatctaaaaaaaaaaatcacaaaaaagcctcacagtgttttaagaaagtttatgaatttgtgttgggccacattaaaagccatcctgggctacattcgggttggatgagcttggcgtagattctactggctttccattccttcctggtctgtatccagttttgactatcaaatacttcaaataccaaagagaattaaatactggcaaaattaataacttaatgaacataattcataacagttgtaactactactgtaatatacctatgttatagcaatacaaacacaaaacaaagacaaggaataattacttttatgtacatttgccttgggtgccctttaaatagccacctcccttagtacatcttaaacatgatttgctttgcattgcacatctcagacttgctctcttttccctgagtctcttcttgagtccaaggttacccttgggagacgacatgacccttgaagttcagtagaacaggaagtaggatacattgttttgaaacctgtctgttcttgtttgttctcctgactgattttcaatttggtgattacaagacttaccctcccacagttccagtggtgttgtcagagaaactgagatctctgtggccagatggtcttgtgattttttagtgtgtgtttttctgcataaactcaattgagtttcaggctatttccagggacttgacacatttcagtcctgtttttctttaaagttaaaaatcacatgttttgacaacttcctggaacagagaaatggttccaaaaaaaaagaaaaccctggaagaatttcaccatttaaaggggggaaaacactcatgtcttctctcctgtcagcggggttcatctgtttgtctgtttgcttcggacaaacagagcagcaatgaactgcaacttaaagatcagacatacgcaaggaatttggcctcattgacgactctccttttttttttttttttttttttttttgagacggagtcttccctgtcacccaggctagagtacagtggcatgatctcagctcactgcagcctccacctcccaggttcaagcaattctcctgcctcagcctccagagtagctgggactacacgtccgcgccaccatgcctggctaatttttgtatttttagtagagacagggtttcaccatgttggccaggatggtctctatctctcgaccttgtgatccgcctgcctcggcctcccaaagtgctaggattacaggcgtgagccactgtgcccagccgactctccttctttttgtatatatgttatcttcctttttgccagtaatttttcctagaatgactgcacatctgtcctgttgctgacaacattcccatagaccccctggtgcccatatcaccccgtcagatcccagcagtacttctctttttttgctgttgttgctatttttaagtttcaaaatatgctttcacaaaaaggtttgcagtatagggaggccaaggagaggtttcttcccactatcggcatcttccacccaaagcaacaaacctttgcggtgaggctttgtgcagtctgtcctctcagtctggagtatttctccatccttagtgaccaaagtttgtttctcaagccattaaaaccttttttactaaagcaacgtttaggcagtgtgctccactaaaaacacacttttgtacatttgttgtacttgtgtgtgtccgtgttttggagtactgttaaacatacgtgttaagcatacatgttaaatgcctgtgaatctgtgcacgttgagccttaagcacacatacagcataacaaggtggttgaaaggatgggctttgtagtggagaaacttgagtttgaatgctggacctgcgacttaataaccacatatatgattattattcatcctttcataacatcagtttcttcatctgtaaagtgggaataataagacctacttcctgtgctttttctagggattacttaaatgaaatattcagaatgcttagcccagtgcctagatcatagcagaaaatcaataaatggtagccgccattgttgtagtcatcacagtgtgtcttcaaactttgaaaacttttaagttgagaaaccatttttgaaatgagatctcaggtaatatataaaacaaagtagcatgctctgcttacagagtaagtggggttccaactccacttacacctgttctgcttccccttccccaacccctctctgcttactctctccctgtgttccctcatccttcacaacaggaaaaaaacctgaacaccacagctttaacatacatatatgcagaatttccaaagtttacagcatgacaaagatggacagcagagtttttcatcatttgactatgaccttgtggtaatttttttttcttttacatactgctaagccttccaaaaagattttctgtttcttggttttatgttttcttttagaattgaagttcttcaagatcagggaccacatctctaaattctccaaataatgtctcagaatcttgtataataaaggctgccatttttagggaagctgggaaatgttgtatacatttgcattttgaattaaaggtgtcctcatttccagtgaatcacttattttgaattgataaggttaactaatacatgctgcgtatttgaataacctgttaggaacaatggagaaaaattgacccacttttttgttaagggtggggtgagcctggtccacaaagaaaaacatacctaactagtggcttgagcatggaagtaagaggaactgaaataagctctactgcatcccacctctctgcttcccaagggagctactttagcctaggaccatagtcacacttacttctagaataggggagagttcaggaacaagctataattagatagagaaacacaaaaccaaggcccagcgtttgaacccaggagtatctattagccattggagcagcatcctacaaacaggtgctaaacaaacacatttcaatggtgacaattttgataaattctccacagaaaaatctcccttatgggaggaataaaaaagaaaagtgtttttactcattggtaatttattctagaccatgttattttaaatttcactgaacagttatagaatatatataataaacaaatgtatttatatcattggcaaatgaaatttggcttctaagttttttaaatgtcagaatgtgttttttattgttctcgttgttttgttttgtttgagacggagtctctctctgttgcccaggctggaatgcagtggtgtgatctcggctcactgcaacctctgcctcctgggttcacaccactctcctgcctcagccttccaagtagctgggactacaggcgcctgccaccacatccagctaatttttcatatttttagtagagacggggtttcaccgtgttaaccaggatggtctcaatctcctgacctcgtgatctggctgcctcagcctcccaaagtgctgggactacaggcgtgagccagcgtgcccagccccgaatgtgttgttttttaaaattttaaaactagtaaatgttgtttattaaaatcaagagccagcaaaatattgaaaataccaaaagacataaaaattcattatcctgctttccaaagataatactgtcaacatgttagtttctagaagattgtaaattaatcagcatttgcttaaaaactgaacttaagaaatagatatgttcgtctcttcaaattgagtaaggctgattaacatccatgagatggtagtttgtcattctgaataaaatctaaatatccaggcttggcctgctaggccctgtgtgaggctgtccctccagcctcatgccacactgttcccctcatctgctccctcatcactgtggccttcctccacatcttcccccatcccagctacccactgctttcttcccagaatgctctgtgctgccctgtggtctcagcataaatgtcattctgcagagcagttttctaaatcaggttccctcctgttaccctttgccacagtcccctgccaggtccttcattgcatgtatcacaaaatacatttatttgtactggttttctgtttgtctttccctatcccaactgtgagctctgtgcagcagggccacatgtgtcctgtgtccctcacaaggggctgagccacggtaagcactcagtaggtgtttgctgagtggagtagtggagggacagcaccttgtaggggaggagctggatcaaactggataacctctggggtgtcttccttccatatcatacattgtattctgtgagtttcacaataactcaggcccagattgacagaccatcatcacatggaaggtaataagccttcaggaggcaggttaacatgcgtacattggatgaggaactaaatccaactgtgaaatctaatgtttcattaaataatacaaatatgtgagtgtaatatggtacatattcacatttttgtagagatttccttattgacataaatcttacatatttctttccagtcagagctgtaccttttgccaagagaacagggcatggagtatatacacatagtgtacattcaatacaggacagtggataaagggcaggaacaactcgttcttttataaacaagcattttggagatgctctgtgcacacagtaggcaccaagcaaatctgaagtcatcaggggagccaaataacacatctacagacaaatctatgcaaagcaggtcgtttgaggactgtctttaaaaggcacttgcccctagatgtcactcttaagaagcattttataggagaaaagtctggagcccattcgttgtgttattttaatctaggatgactgtggaaattttcttgccagttttatcaggcccaccctgtttccagttccgcagtcttatccccatgccagcgtatacccaagcctccaacctggaggctcagccacatgcccagtctctatgcagggtcctgactcaggaggtttttaagaacctttattcaaccagagtccatctcttctgtggtctagctctactcttgggtcccacattgttttaactgcttctgtttcagtttctccaccagaggtctctctgtttgttacccagctgctagaactagggccctaatccctcctgtcatttttcttgctggagacttgagtattctcccaagcccagccacagggaccacagagaccttgtaatctgacattcttccaagggctgcagccatctcagcatcatttccggtcactattctctacctccccttcctttgtgtgataaccctcatccttgtctatacttataacctgctaggctggattttctcagcctcctgctctagcctgttatagttaccaggccttattcaccatatccaaaataggacactaattcaacgcacactgactaaatacatactacagtttaggcaccgtgccaggcataaagaaggatcaggtactgcctttggcaaggcaagatattttcccagtttggtccctttcaaatacagttgttccctaattcatcctgattttaaagtagtgaatcttgtccaatattgaacttggcttctgaacattaagcattcatccatcttatatatgcagattatctgtagtgtatcagacactgcattgggcataggtgagacaatagagcatggccccagaacatggcaagaaagctacttacacaactttgtgccaagaaataccttgtgctaagagtgtccacagtggtttgcagagggagcaattaatcctgccctagaggatagaaaagggctattcagagaagcatgtgtttttctcaggccttaagggatgaattcagtttcatttttccaggcagatacagggaagggagggaacatccagacagaaagaacagcacgagcaagtgcatgaagttagaaaagtacatacaatcagtatttaggaacaagaagtatatttacctggtatggatagaaagtggtatttctggaagtgtgtagtagaatttgagtcaagaaaggaaatttgggtccaacttgaagcagtacataggctggattagagaggtggagggtagagcaaagcaaagaagtcatttggagctcattcgattaatcacaaataaccataattaaggtctattataggtcaagcaggagatgaccagttcatctgtcacccataatgtactgagctgataaaggattccgtcttgggatctgcaccccgacccactgactaggccaggctcaggctcccctgtctcagtgtgaagactttcagtactcactatctctccatgttatgcactggaagatatcctcaaagaagggtctgatttcagccatttgtaggagtttgaatatgttggtgtgatatctcccccatatgcagacttgtgcggcttgtcaaactgttaggactttattaagcttgtcaaatttaaattactattctggaaaagatacgaatccaaaactggaaagataataaccttttaattgacatcattctctcaatatttagtttctttcagaacattttgtctaacatagaatattgtcagggacattgtttaccatattacaaaacatactctctctattaagatcttcttgtgaaaattctactggtctcagtttctagaaaagctgtgcttctcctaaatagagatgttttcttttaaattttctgaacattgactacagttaacagattatgtccttttagctagagatatatttgaagacttcctatagcaagtactgtcatgcattgcttaacagtggggatacatacagagaaatgcatcattaggcaatttcgtcattgtgtaaacatcagagtgaacttacacaaacctaggtggtagtcttccacacacctaggctatatgatatagcctattgctcccaggctccaaacctgtacagcatgttacttactgaatactgtaggcagttgtgacacaatgttatgcacttgtgtatctaaacacatctgaacggaaaaggaacagtaaaaatatggaattataatcttatgaaacaactatgatagatgcagtccatggttgaccaaaacattgttatgcagtacatgactgtatataggacttgtgatgtacagttttaaattagcctccttccccaacccattgtggattgtttcctttccttttttcagccaattctaactaatgctattttgacttttgtatctccaaatagtccaccttaaatcctttttggaacaaggctgaaggataaatcacacacacacacacagacacacacacacacccctacgtgcacgctatcagaatattgactaaagtagaatagcttattgtagcatttaggtttctaatgtgcttctagctaaatattcgagaagatgacagtacagcccttctcctggtaaacagagctagtctgagaatcacttttcaagtacttacagataaaaatcctaattcaaactcatcaaatgcatggccaagtaccagacacactcctcttttggatttaccagaaagtgtgctctcatgcactgttaggtctaataatcagtgaccttctctgttttgccaaaataattcctaaagactggctagccaatgcattgatttttattaaaaaaacaaaataacaaaataaaattctctgcctttgactggaatgatttttatccattgtctccttcctctagcagacagaggcaacattactatttaggaaaagtaagtggaggttccacttcatttctagatgaaaatggaggattttgatgttaagtatttcatgtgacctcagacagtctgtagcagccacagctcatcagtggttaataaattagtagattgtatataaaagtagtttgttttcagtttagtgaactgatagttggggcagttagcaaatcaagtaaaagtttgggccctgaaatgataatgaattcctttgttcccaagacttctaagggcagtagctttgtaaaaacaattctttctgttagtactagatgctataattaaggcatttgaatcaacaatgaaattgagagcagatgtactacgtaggctcaatctatttattagctactaatggagaatgttctagctaatggcattaataataatgtaatgttccccacatttgtagtcattaacaagtgcattaaaccaagtcctcgaagtcagatttttcccttactcttcttctctcaataatacaaatccttcaacagtcagttgagaaggagagaatgaggatgtttgaggtcaaggagaggcagccctggcagaagggaaaattacagccagtaacttctgtgttctgtgttttcccctgagctccccaggccacatcctcatagtccctgaaaccacaggcctctaggccaaggtagtgtcagaacactcccacagaccctgtggctgagtccaaaaggcagaaatgaaacttctgggactgagcgggcagggcaggtgctcggctgtgccccccagggtgagagaaccacctgcaggaagccagtgttgctgtatgcttccatcctgcccacctcagtgggccagcaccatgacagcctccctttgacactggttggagtgaggcttatccccaactccaacctacctcaccccctaggcctttactaagagaccttgtgggcagatggtctagagggacagtgagccccttagcgttgaacagtatgtgtattcaataatgcagctcctcgtggtattgattagtaatcatagccaactacttatgtagcacttaaatctcaccacaacaacatgaaatgggtatcattcttattattcttaatctatatttaaaagaggttaagtgacttctccagtgatatatagtttaccagtaataaagccaaaattagaattcattcagcttgatgtgaatctgtgttgttaaccaccacagcacactgcctttcagcaaaggctgattaaagctgcaccaagtctctaagtgtgtacagcccatcagaatctcgacactgtgtttgacaagcatgggacgtgcagttaaactggggaagaaatttctttctcatagaagagatccttgtgtgtgaaaattagaactatctgaataaattagaatcaacagaaattctttatgtgagtgaaatagccttcgagaaaagcaggacagttatttcctttaacgcctctccttgggtacagcagggataggtgaattcctgcatcactgcttaacaagtatttactgagcaccagtggattggtgttataataacttggcctcaggttaatttccctccttgaaaatgttctattaaaaagagtttgaccacacagtgggctcacacagcaggggatttatgtggatcccccagtgtatggaaggacagaaaataattaaaaatcagaatgtactctaattcaaaaccaaaaggcgtccccatctatgtccttgtgaaaattgtgcaagttggcaaattaatgaggctgttgcctggggtgaagtctgcacttagcctgtataattactaagaaatgagagagacctcagtgggtcctacggatgagcaaaagaaaataatttccggacataagtggagtcattaagaatgcaagagcactaatgcactggggccacttccaggggacaagtgatggctgggcagcagcagcaacagcccacacaagtctcccgcttcttggtgaacagggaggaaatgcagaggggatggtaggcaagggagaggactgacgtttattgagccttcactatgtaccggcctccatgctgggcgctttatgtatattgtctcacttagaaaatgccagaatattccatgggttttgtattgcttaggatgatgtgtaccctgcccagccttgacatacagaatgacacaagcctgacctcaattatcattgcagttaccctaccacacacaaatgtcacagacaatatcagctaaaagcaaaagaaaactcactattaatattttgtcctataaatttatattcttttttctatataaatattttgtgttaatttaccaaaatgggatgcattgttttatacctacctcttaaacacttttacatgtttattaaatatccttctacagtatctttctagtagttccaggacatgcaattttaagtactttttgtgaatctttttttatcagtcccctattgtaggacattattaatagattgctttcaagtttccacaattttaaaccatgttctaatgaacatccttatagataaatcactgcaaaattattcagtatttttaaagatagattcctagcatggaagttgctgggtaaaaggatatagatgtttttaaagccaggtttattgaggtatgttttacatagagtaaaaatcaccctttcttttatttttggctgggggtacatgtgaaagtttgttacataggtaaacacatgtcacaggggtttgttgtacacatcatttcgtcacccaggcattaagcccagtacccaatagttatcttttttgctcctctccctcctctcattctctcccctcaagtagatcccagtgtctgttgtttccttccttgtgttcataagttcttatcatttagctcccacttataagagagaacatgcagtatttggatttctgtctctgcattagtttgctaaagataatagcccccagctccatccatgttcccgcaaaagacatgatctcattcttttttatggctgcatagtattccatggtgtatatgtaccacattttctttaatcagcctatcattgatgggcgtttaggttgattctgtgtctttgctattgtgaatagtgctgcagtgaatatttctgtacatgcgtttttatggtagaatgatttctattcctctgggtatatacccagtaatgggatttctggatcaaaatggtagtcatgcttttagctctttgaagaatcgccacattgctttccacaatggttgaactaatttacactaccaccaacaatgtataagtgttcctttttctccacaacctcgccagcatctgttactttttgactttttagtaatagccattctgagtggtgggagatggtatctcattgtgcttttgatttgcatttctctaatgatcaatgatgttaagcttttttcatatgcttattggctgcatgtatgtcttcttttgagaagtatctgtttgagtcctttgcccacttcttaatgggattgtttttctcttgtaaatttgtttaagttctttatagatgctggatattagacctttgtcagatgcatagtttgtaaatattttctcccattctgtaggttgtctgttcactctcttgataatttattttgctgtgcagaagctcttaagtttaattagatcccacttgtcaatttttccttttgttgcagttgcttttggtgtctttgtcatgaaatctttgcccattcctacaaccagcatggtattgcctaggttgtcttccaggatttttatagttttgggttttacatgtaagtctttaatccaacttgagttgatgtttgtatatggtataaagaaggggtccagcttcaatcttctgcatatggctagccagttatcccagcaccatttgttaaatagggagtcttttccttgttgcttgtttttgacagctttgtcaaagattagacagtcatagatgtgtggccttatttctgggctctctgttttgctcctttggtctctgtgcctgtttttgtaccattaccatgctgtttttgtagccttgtaatatagtttaaagtcaggtaatatgatgcctccagatttgttctttttgcttaggattgccttggctatttgggctcttttttggttctatatgaattttaaaatagttttttctagttctgtgaagaatgtcatttgtaatttgatagaaatagcattgaattcctttgggcagtatagccattttaatgatattgactcttcctatccatgagcatggtatgtttttccatttgttggtgtcttctctgatttcttagagcagtgttttataattctcattgtagagatctttcacctccctggttggctatatccctaggtattttattctttttgtggcaattgtgaacgggattgcctttctgatttggctcttggtttggctgttgttggtgtataggaatgcgtgattttttacactgattttggatcctacaactttgctgaagttgtttatcagctggaggagcttttaggcagagactatggggttttctagatataaaatcatgtcatctgcaaacaaagatagtttgacttcctttcttcctatttagatgttctttatttcttcctcttgcctgattgctctggccaggacttccaatactatgttgaatagaagtggtgagagaggggttccttgtcttgtgccagttttcaaggggaatgcttccagcttttgcccattcagtataatgttggctgtgggtttgtcataaatggctctcattattttgagatatgttccttcaatacctagtttattgagagtttttaacatgaaagggtgttgaattttatcgaaaggcttttctgtgtctatggagataatcatgtggtttttgtctttagttctttgtatgtgagaatcacatttattgatttgcgtatgttgaaccaaccttacatcctggggatgaaacctacttgatcatggtggattagctttttgatgtgctgctggatttggtttgcaagtatttgaagatttttgtattgatgttcaccaaggatattggcctgaagttttcttttttgtgtgtttctgccaggttttggtatcaagatgatgctgctctcatagaacgagttggggaggagtccctcctcaattttttagaatagcttatataggaagggtaccagctcttctttgtacatctggtagaattcagctgtgaattgatcaggtcttgggcttttttttggttggtaggctatttattactgattcaattttggagctcattattggtctgttcagggaatcagtttcttcctggctcagtcttgggagggtgtatgtgtccaggaatgtatccatctcttctaggttttctagtttgtgtgcatatttgtagtagtttctgatggttgtttttatttctgtggggtcagtaataacattcccttcttcatttttaattgtgtttatttggattatatatatatttaggctactttatatatatattaaggatagttaagtcttcttgttgaattgaacccattaccattatgtaatgccattctttgtcttttttgatctttgttagtttgaaatctgttttgtcttaaattaggacaaacccctgctttttttctgttttctatttgcttggtatattttcctccatccctttattttgagcctatgagtgtcattacgcatgagatgggtctcttaaagacagcattaccattgggtcttgcttttttattcaacttgccactttgtcttttaagtggggcattttgcccatttacattcaaggtcagtattgatatgtatggatttgatcctgtcattgtgctattagccggttactatgttagcttgtttgtgtggttgctttacagtgacactggtctgtgtgtttaagtgtggttttgtattagctgatagcagtctttcctttctatatttagtgttcctttcaaggtctcttgtaaggcaggtctggtgggaatgaattccctcaacatttgcttatctgaaaaggatcttaagtctccttcacttaggaagcttagtttgtctggatatgaaattcttggttgaagatttttttctttaagaatgttgaatataggccccaaatctcttctggcttgtagggtttcagtggagaggtccgctgttagcctgatggggttcccttgtaggttacctgccctttctctctagctacctttaacattctttccttcatttcgaccttggaaaatctgatgattatgtatcttggggatgatcttcttgtgtagaatcttgcagttctctgtatttcctgaatttgactgtcagcttctttagcaagcttgggaaagttttcatggatgatgtcctgaaatgtgtttccaagttgtttgctttatcctcctccctttcagggatgccagtgattcgtagatttggcctttttacataatcccatacttctcagtggttttttttttcatttcttttttttcttttttctttatttttgtctgactgtcttatttcagagaaccagtcttcaagttctgagattcttttctcagcttggcttattctgctattaatacttgtgattaaattgtgaaattcttatattgtgttattcagctctgtcagacccattaggttcatttttataccagctatttcattcttcagttcctgcatcactttattgtgattcttattttccttggattgggttttgccatcctcctgaatctcaatgatctttgttcctgtccatattctgaattctgtgtctgtcattccagccagttcagcctggttaagaactcttgttggagaactggtgtggttgtttggaggacatatgacaatttggccatttgagtcacgagagttcttgtgttggtcctttctcatctctgcatgtgggtgctcctttaaccagttgtagattgagaacagtcaacagaattcttttctggatgttttcaccaggccaaggctttgtgcagggtctttatttgaagctgacttcttgtccctggtttcagagggaggtatgttagtgaggtatttttggtgttgaagctttggggtatgatccagcaggtggcacttaggcttattggtcggttggtagactcttgcttggttgtgtggctcccccatgttaactcacagttgcagccatgttctctctcaatgctctgaaagtgtgggtttctctcccccttgagtgctgtctgtagatcatgacttggcactcctcggatgcccactgcagctcttgtgtaatctcagtgtttatgttcctttcccaacttggaggcagcagaggaagggactttggtattggttgtggccaagggtcatttgcttgtcacctggggactccaccccagagagatgcaggtcagcagtggctcagtgcaagcagcccaggatggagagtctgtgctgtgggcccaagccaggggtttcctgtcttgtgtcaagcaatgcggggggtgtgtgggatgcacgggagacacactggcctcctctccttgggtcagctgcagcttgctggaggtgtaaaatcaccctttctaggtgtacagttctgtgaattttgacaaatgcatcagtcatgtaaccaccatcacaattaagttatataacatttataagcactttaaagcttttgatgcatgttaatcaaattacctgctggtaacattatatgtattcctatctaccatcagcttataaaatgtgaacattgggtattgtccttaaaagactaaaaaaaaaaaagtccagtttttaggtaaattttccatctcattttaagttactttttttaatattaatgaagttgcattttttttgtaggtttatctgtttttatgtcttacagtgtgaatttttgttatgtttttggcctgtatttctggccaattatctctttcttattgatttttaagaactattagggggctggggttgaaagagtgatctgtcatgtcgcaaatacattttcttttgtcattaagccacttttaatattatgtatagctttttttctctcaaaagttttaagttcctgtagtctcaccatcttttcctcatagagtccaccatggaagtcatcttcataaagtcctttcccactccatgattatttaaatgttttccctttttaaatttaattcatctggaatttatttttggtatatcacatggagtagaattttattttctcccccaaatgatgagccacttgtcctggtcccatttatcaaataatagatcttttccccaccaatttgaaaagccacctgtattatatatcatatttatatacttaagtatgtctctgaactttcccttctgttccacaaaattccttgtctttttgggagaagactacttactggttcgcactgtttttaataatgtagttttataaaatggtttaatatctggtttggcaagtactacttttcattattatactttttcaaaatgttctctcaggccctaattatttcagatgaactttaaaccatatctgagtttaaacacccaataagaatttgtattgaaattttatgtttatagattaatctaagaataatttatatcattataagcagtcttgtcactgagggatgttcaaaaactgactcattgctcttcagagattaaagttttataattttttaagagtataaaaattataaattataaaaattataaaagcataggttctacatgttttatgtgttcatcctaggaatcatgttattgttgttaccattgattttagcatctgtttttgcattttactttccaacttgtggatcctatttacagcattctatttattaatttttataaaaacctagtttattaaaaactacttacagtaatatttgattttttaaagacaattaggtcatttgtaaataataagttttccttcacttttctgattttattttatttatttatttatttatttatttagagacagagtctcactctgttgcctactttggagtgcagtggagtgatctcagctcactgcaacctctacctcccaggttcaagcaattctcttgcctcagcctcctgagtaactgggattacagacacatgccaccacacccagctaatttttttgtatttttagtagagacggggtttcatcatgttggccaggctggtcttgaactcctaacctcaagtgatccacccaccttggcctcccaaagtgctaggattacaggtgtgagccaccgcaccaggcccacttttctgatttcatacttcacttctttttctggtatttcattatttagaattatttttataatttcaaataattcttcacattgtcatattttaatgacatatgaagtaatatattttttaaatcaaaaatagatgttaatgcagtaccttatggtgaattaatccctcagctttagaataaaccttatttggctatggtgtattaatcttttaacattatgctcaatatttattatttgaaatatatatataatcactaactttagttttctttaatatactatctttgtcaagttatggtattaaggttggattattctcatgttgtaaaattgagactcttgcatttttctatgctttggaacaatttaaatggcataaccatacctgttgcttaataagcagacttagctcacctgtatcacctgctccaaagctttttgggggaccatgagccatagcattttttaaagccctctctctcactcagtgttcagaatttgtattaaaatttcaaagttcatttaacaattttgattatcagagtgaaaagctaatgcatctgttttcttagacttgaacagagtataaaataaagatgaaaactaaatctcaaacacatttccatcagtgctttggatttcattagttcttggcaaacattatttacacttacataaagtttattgattccagtatgatgttcaaaagctgactcattgctcttcagaaattacagaaatgtctaccctcaatctcttgggaaagaaactgaattaaaaaggtagagtaagaaataagctgaaacttgtctgtatcaattagttttccttgagcactccctggatatatgcaactacacggaagtatttaagagattataaaaacagtttctcatcaagtttttcatctgaggcagggaccttgatggtttcttctcatggacaggtaactctatgtacatttcagtacatccctgtaatcttcagcctacttgttagttaccataacaacagtaacagcattttcttcttctttatccaggacatctgtgttaaggcttatctagcccttcgtcatcacacaaacctactgatcatcctgttctccatgatgctgatgacaggaatgccccagttaacaagcaaagaagacattgaatatatccgggatgccctcacagtggggaaaaatgaggaggatgctaaaaagtattttcttgatcagatcgaagtttgcagagacaaaggatggactgtgcagtttaattggtttctacatcttgttcttggcatcaaacaaggagagaaacattcagcctaatactttaggctagaatcaaaaacaagttagtgttctatggtttaaattagcatagcaatcatcgaacttggatttcaaatgcaatagacattgtgaaagctggcatttcagaagtatagctcttttcctacctgaactcttccctggagaaaagatgttggcattgctgattgtttggttaagcaatgtccagtgctaggattatttgcaggtttggttttttctcatttgtctgtggcattggagaatattctcggtttaaacagactaatgacttccttattgtccctgatattttgactatcttactattgagtgcttctggaaattctttggaataattgatgacatctattttcatctgggtttagtctcaattttggttatctttgtgttcctcaagctctttaaagaaaaagatgtaatcgttgtaacctttgtctcattccttaaatgatgcttccaaacatctccttagtgtctgcaggtgttagtggtgtgctaaaagcaaggaaagcgagttagtcttttcagtgtcttttgcaattcaattcttttgtcatgtataactgagacacacaaacacagcaggagaaatctaaaccgttgtgccttgaccttcctctgctggtcttgttccagggttatgaatatgaaaaaatagagatgagactttttgtgtcaactctgtccacaagagtgagttatctagtatgattagtatagctttctccagcatggcagcaggaagtaactacagggcctcttttatgcctgacatttcttcccttcctttttccctgcctccctttttcatcaattgcgatgctcccacaactctttacagacttgtgaaatcttcaagaacacctttactctataactcaaaaattagttgaaaaataattacttctcaaggattattagaatcttaggtacttatttgtaaagatgtttagtgacttttttttcaagtatcttattaaaggaggcattctagaaaatatgaattagtttccaaatgccttaattttaaactttggcctgaacagttttttctttttcttaatggaagaagatatttaatatcttaaaaatattccaagttaggaagaacactacttgccttatccatttcccatttaaaggacttttaaactttgacacatccttcagatttcctgaaaataattgaaatatcttactttaaaaatattttcatctctgaaatatctcgttatttattggaggtattgtttaaccttagagagaccattaaattatttataaaatattttgtaattacctgtagctaatacattacatagaaaaaaactatgttaacagtgtctctgtttaagtataatcagatataaatatatacttaattttttaattttaaaaatagatacctgtttgactttgaggtagtccagaccttttctttttttttttttttttaatgtgtgcaaaagcccaaaggttcctaagcctggctgcaaagaagaatcaacagggacactttttaaaaacactcttatcagcctgggcaacacagtgagactccatctcttaaaaaaaaaattagctgggtatagtggtatgtgcctgtagtcccaggtactcaggaggctgaggcaggaggattgcctgagcccaggaggtggaaactgcagagagtcatgatcatgtccttacactccagcctggataacagagcgagaccctgtctcaaaaaaataaaataaaaaataaaaacacccttgcctgcgctccattcccaggttataatttaattactgtgggatgagacccagacatcaatatttttctagattcttcaggtgattctaattcacagccagagttggaagccctgcgtggcctttgaaggtctagatgattcttcttccttgccctttgagcttttccccatctcacaggtatctagaaaaaaactcctcttctttggcaacctgtccttttaaaatcacactctacccacctgtacagaagaccatgccctataatgaaatgtttattcctatctataaatggaggataaacattttgtggcacttctggaccaactattccctactattcttttgaagaaaggcaggaagagtactttctaattcagaagaggatgttttcactattctgataaacaatagccaagttcagaccttgtacagattctttttatttgaattgctgaaataatttattgatgatgaaaaaaagattagagaggaatacatttatatttagcttattggcacatgtgcatacatatttcctcttcaaatgaaccagttctttcatttcattatgctaatatatatatataacatatatatgctaatatatatataacatatatatgctaatatatatatatcacacatatatatcacagttttatatatatatatgtatgtgtgtgtgtatatatatatatatatatcacagttgggcttgattcttccgtattccaaagagcataatttcagttctatagacttatagataaataaaaatcatctttgtgggcttccttcctttactgttcgcagtgaattacatgacgaacaacttctatacctttgaaaatgttctagaactagaatcatcctgctactgggaactacccacagctctatcttcaatgccaggtgaaaacacagatcacaagtcagatgaatcaggccaaagcaacttttatgtatatctaggactggcgacataatttgcagagcccagtgaacagtgaaaatgcagtcccatcattcaaaaattattaagaaattcgagatggcaacagcagttgtcacaccaagcacagtgcccttctgagcatgaggctctgtgtgactgcatgggtccatgagaccagcactgtgtgggtctgaatgatggctttggtgttcagtttagcacacgcggtctaccacgtctgcatgagtggtaaatgtagtgcctgggtcaaaatgttccttctgttcaaatcgaaatacctcatctctatggctctatggctgtacattaggacctagaacagtggcccattgctcttagactggaaccatgtccactaaaataaacctaagcagatgttgtagacctagccccacaggactgcatttagctgcttcagtgacactttgatgaaagtatggagaagtggagacattatagataaaatatatcaattcccagagaaaactcttgacttaaaaacttaactgtagtaaatatatctttttcaggtgatgaattatttttttaaaaaaggttacatataggaattctgcagtataatttggaggctattagtgctatattaatggaaattaattattttttaagtaagtccaaaaaataatctagaaagtaagtttccagagcaaatctgacctagcatttggtatgctaggctctgcttttcatgattttgaaataaatcataattagacttaacaatatggagaaaataaacttgtatttttaagtgttctgttggcttattttctgtttcatccaactcaataattctgataaataaatttggttctagtttggtgcttgtctgcatagtctcaaagattcatttcaggacagctatctggggaacaaaaaacacacaccttggccaggcatggtggctcatgcctgtaatcccagcactttgggaggccaagatgggcggatcacttgagcccaggagttgtagaccagcctgggaaacaacatggtgaaatactgtacaaaaaatctctacaaaaaatacaaaaattagccaggtgtagtggcacatgcctgtagtcctgggtactcaggaggctgaagtgggaggattgcttgagcccagagggtcgacgctggagtgaggcatgattatgccactacactccagcctgggcaacagagcaagaccctgtctcaaaagaaaaaaaatcactattgagggcccaccacctaccagacactgcactaagtactggggattcaaatacggagcaagattgacctagtcccagtctttaccatgtttataatatgttagcgatagctgatacttcataatgggtgcatgtttgttgtgggttgaactttgtcccccaaaaagatatgttgaagtctcaaccctggtgcctgtgaatgtaaccttatttggaaatagtttccaaataaggttataacagatataatcaagttaaggcaaagttatgagagtggccccaacccaagtaacatccaaggtgagtaccatgtgatggaggcagagatgcatctacaagccagggaacaacctggggcaactagcagctggaaaaggcaaggaaggatccgcccctagaagcctccaagggctcatgccctgccagtgctttgattttggacttctagcctctggaagtaaaagaatatgtttctattgttttaagccaccagtttgtggcactttgttatggatctctagggaactaaaatagtgtcagtacccaaaaattttgtggaggcttttattttttagtagggggatcacagagtttatgtaaatacatctcttttctgctgttaacaaaaagatttaattgcatgcaaaatatgtgaagggctaatattcttaatatataaaaaggtctaataattcaataagtaaaagataaataccttatcaaaaaataattcacaagaaaagaaatatgtgtggccaataaacatatgacagcagaccccaagtcatgattgattaaacaaatgcaaattaaagtaagtttattttccctatcagcttagtaaagactggtaaagtccagagtgagtactaattttagagaaagggcactctatcaaactgttgaaagcagtgcaagttgggaaattcatgcatggcattttgacaaaacatcaaaatcaaggtatctattctctgacccagcaagtccacatttaagaatttatcctttagaaattattgcacaagtgtgggaagacttatggtcaaaaataagttgtcaacattctttataataaccaaatttcaaaatagcctaaaagtccttcagtaggagactgaaattacattgaaattacatccatacagtggactcacaatgaagcctttgaaaagataaattagatcaaaatgtattgagatctatgtagatatctatgacatactgaggagtgaaaaaggtggttacaggactgtattatgctccgattatatttgagttaaaatgtaggcttatatatgcatgaaaaggctgggaggatgtatttacaccacactgttaatagtaattttttttttttgagatggagtctcactctgttgccaaggctggagtacagtggcactgtgtaggctcactggaatctccatttgggttcaagcaattatcctgcctcagcctcccgagtagctgggattacaggtgcccaccaccacgcctggttagtttctatatttttagtagagatggagtttcaccacattggccaggctagtcttgaacccctgaccttgggtgatccacccacctcagcctcccaaagtgctgggattacaggcgtgagccaccgtgcccagcaaatagtgattttttttcttttttacctcacatttatttttttccattgagttttaggaaatgactttatattatttgaatttataaggggaaaaagttatatcttttcattttgaaaaacaacacagtctgcataataattatatcctttagcttacatcatgactcatttaaagctcagaaaatttggtttctcaaaggaaaaaaaattatgtgaagtcaataattattaagtagtggcatcaaagctattgtcagaacttcttggtgtaaaaatgtccatgtaaaagtttcctgctttaccagccacacctggttttgatctgttgtactgctaaggctggccttgatttctcccctaaaatagcaatgcttttggagaagggcctctaaggatgttgtctattaatcagtgagggatgccttggctcgtgcagctcttctcagatctgcagacctcatgcagccagttggccatgcggagctctctagctcacatctgaggtcccccttggaggtgcagacagcctcattttcacttctcatgaatgtcagattcttttctaagcatttgctcattagtatgagtaaagctcattgcctgctgcttgggtaagaattttctctctggggctggactctgagtctgcatccataatgcacttggcatctgtcttggggaccgtaatggggcacagggatataccaaggaacacagagtccatttgcagcacctcagtggcgattctctacctctcacagcagatggacagccatctgagaagttttatactcggagaatcaaactcagaatcttttgattacacgtaaaagttaaaatgggtccttactacctggcagagatccacccatcattatcaccactgtgtgcaaggtctgtagctacacagcacctcccatcaccagatgtgtatggtggccaaagctatgctggtccccagcaccctccactctgcacctctcctttgcatcactaagcaccctgttctacaaaaacaacaacaacaacaataacaaaaacagaaaaaaaaaacagccctgttactactgagggcttcctccggtcaaatcccatggccacacatcactgccaaatccctgacctctcccaggatctgctctccccaatctatggttcagagaagacagttcctcatttttgaagcaactccttgctcaggcactacctgcttaaagtggcagggcacattctacaggctttcagcaggtagatggatttgattactttaatctgtgcagatttaaaggagtatgagactcgtgagatcctggagaaaactcagagtgagcatgtgtggctgtggacacaaggtgaccttaagccagcaattcggggataatctattttagagcctgagcaagacactgcaagggcagttaataggtaagatagaagtaaagagtggtttaggtggctttggcattagatcatttcaaattcaagtaccaattgtcacttgaacaagctgccaagtttcagccctctcctctgtaaactagggaggacagtatagtacctgctttacagaattactgtgctgattaattgaaataatgaaagtgaagcattaagtagaattctggccaagagttactgctcaataagtgatcactatcatttctatattctttttaaagaaggataaaaaatctcaagaaattaaagccaaaagttcaatggcatcacccttggagtgtgacttttaggagtactttaaatgatgaaaatcttaacaattttctaagtacagtatcttctcagtaggacttcaaaggaaaaataatttccattctctgtcaacatcagataccaaggaatcttctaaatagcaaccttctctgatgagttattctaatcaatgcaaattagttcctgggtctgggcttaaagaaaattagagaagctagaatcaattgacaatgctaccaactcccatttgctttttgaatcagctttatggaacattgcatgaataactttcaccaattttaaatgtagaatttgaggagttttaataaatacataaacccatgcacctaccactatgttcaagataaagaacaattccatcacgccagaaagttctctcatacctctttgcagccaattctaacccctaagaaccactgaattgctttctatcactatagttttgcattttctaggattttatataaatggaatcctacaatatgtggtcttttgtgcccagcttctttcacatagcataatgcttttgagattcatctatgttgcctaaataaaacataatttaggaaggctcagtttctggacagatttgctgcagttcattctagagccaaatgccaagtttcatttttaattgtctgctgtgtatgattatccgtaccagtggctcctgctccattttagagtattaagagacctcattattattacattaccttgttgctatttatacaagatattaatagtaggtgataagaagctttcatttcagaggctttattttctcggatttggtttggtttggtttggtttgagatagggtcttgctccaacccaggctggagtgcagtagtatgatcatggctcactgcagtcttgactgcctgggctcaagcagtcctcccacctcagcctcccaagtagttgggacagaagcatgcaccaccacactcggctaatttttttatgttttgtagagatgaggtctcactgtgttgtccaggctggtctcaaactcctgggctcaagcgatcctttcaccttggcctctcaaagtgctgggattacaggcatgagccacaatgcctggctctgctctggttttaaaatagtgtaggaatagaacacattcttcactactgctaaaaaaaaaaatcccctcacagggccagcagacagaagagcacaggaacacttgaagtcagcagagaaccttaaagagaacttgtggagcagtttctcaaacttcaccatgtacatgtatcacctggggttgcagactctgattccacaggtctagggtgggctcttaggttctgcatttccaacaagctcccaggtgaagccaatgctggcagtccccaggccacactttgcatagcaaggctctgtaggacatagaggcagattcagtgaatgaggaaagtcaaatcaacaagagggctgaaaatatgtaccaatctgtgttgcgcaatacttctcagagacatgaattgtcatcatacatgatgaactacacacatacatgcatcatcaatctcttttttcaaatggtgcctcaattttctcagccataaaagaggcctgataatacctagctctgtgggaggtagacccctaatatggtcctcatgatcttagcctcctggttctcatgcctttgcgtgatccccttcctttgagtatgaactggacctgtcaacttgcttctaacaaataaaacatgacaaaggcggtacaatttcacttccaagattaggttataaaaagcctgtgactttcaccttgcaggcattctctagctctcttttgaacctgctcagcttgatggaggcccttgccatgtagtgagatgctctgtggaaaggtctatgtggcaaggaacccagggaggtctccagccaacagctcgtgaggaatagaattctgccagcacccgcactggtgagtcggggtgggtatcctttcaagtcaagccttgggagagacccagagctatatcatcctgctaagccatccctggattcctgacctatggaaactatgagataataaatactgtggttttaggccaccaagtttggggataatttgttatgtggcaataggtaactaatacatttcagagttttcatgaagattaaagaagacaaacacattaatgtatgggtaagaacttagcatagcgcctagcacatgggagttacttgatggtgtcagttaaatctaaaaacagccaagtcacaaacatcaccagtacttgtaaacagcacctgcagccagtaaactaaggataatccatgtgtataaagtttgctagtttccccttgtcaagaaactttcagacccaaaagtctgactaatacaaataagtaaaaagaaacaactaaatgtccacaggtgtgttacatatatgtagacaaacccacttttaaaatgtaagattgggccgggcgtggtggctcacgcctgtaatcccagcactttgggaggccaaggtgggcagatcacctgaggtcaggatttcgagaccagcctagccaacatagtgaaaccccgtctctactaaaaaaaaacacaaaaaattagctgggctggtggcagatgcctgtaatcccagctattcgggaggctgaggcaggagaatcgattgaacctggaggcggaggttgcagtgagccaagatcatgccattgcactccagcctgggggacaagagtgagactttatctcaaaaataaaaataaaataaataaaatgtaagattgttttttttccccctagatcttggagcaagatcaagtgccccagcaggtactcaggcaatgatgatgatgatgataatgatgatgatgatgatgatgatgatgatgatggtggaaggggagctcccactcagctgtgttttgtaaaatgatgatcccactttttcttctcatttcccctctcctaacttctagtttattcaaagaagcaagttcaatcgcaagcatcaagctaaatggaaactatcaagaaacatttaagggaagtcagtcccaggcttaaagctgctactctcttaatagcaataacagccattcatcctcagctagaaagaaagaaaaggatcagcattcagacagctcttgcagaagccctcaaaaggcctgaatgattgttagccatgcttttgcttctgccttcatttagattttagcaaacactgccacagatcactcagaggtagctaaaactggctagggtggctaataagatgttgccgagagctggagtgaagtcacagatgagagcattgaaaccagtggttgaaactggctcagtaccaccaaaacctctacgaaaatcactgtgaaagcctctaaaaccaaatccacattcagcagacatttattcagcgtcgattatgcatgtggccctcacccatactagatcatcctgtggaaacaaaaataagtcaggcactgtctggtggagggaacaggctcatgcacacttgactataatagaagaaaatctgtgataaatcatgatctactgatgcccactctgttctaggcttgagcatgggggcaggaatataaacaagacctcttgactaggaacacaagaccgattgtgatgtgttatattcaaggtataaataaagagctcttacaaaggtggtaagagcttttccaactaagggaccaggaaaggccttctagagaaagtaacatttgaggtaggtcttgaggtatgactaggatctcaacgtgtgggtcagagcattccaaatggggtgagagtgagagcagcaagacaaagacagcaaggggtgaacatgcaaggtgagtcaagaaataccagtagagcactatggcaggaaagccagcttaatgctgaaaagtagaagcaaaggttacaaggaccttgaaactgaggagaggaggctggatttattctgcatgtaatagaaaggcattaataactgttaagaacaatagtgatatggccattcgttagtaagaacactttaggtggctagtaactgaaacctaattcaaattggcttaagcaacaaagaatgtattggttcatttaactgggaagttcaaagatgcatctggcttcaggctcaactgatgccaaggaataaaatgatgtcatctcttggctctactttcctcttcttgatttctttctcaagggagttctttccaaagatgtggcaaagatggcaaatcaaatcagcttaaggcttaatcctaatagcttagcctctcttgggagaagagattgcttcttccccaatagttccatcaagatcctggactgagtctcatgtgataactttggtcacccagtacaaatatgaacaccatggccagggaaatacattgcctatccttggagacagagagtagggttggcaccatccaagcctcattaactcatttacagcaggaggggggtggtacttaaaggaaaatctaagtgctgttttcaaaagaagaaatggttgcaaatctggcaaaagaaactgttcattaaaaaacagaaaaaaattattccagcggcaatctgttgaagcaaattgagagagaggccgggcgtggtggctcatgcctgcaatcccagcactttgggaggctgaagtaggtggatcacctgaggtcaggagctcgagaccagcctggccaacatggtgaaaccctgtctctactaaaaatacagaaaattagcagggcatagtggcacgtgcctataatcccaggtactggggaggctgcggcaggagaatcacttgaacctgggaggcggaggttgcagtgagccaagatcacgccactgcactccagcctgggtgacagagcaagactttgtctcaaaaaaaatagggaagagtatcccagaggcagggaaaactctgcaatagagtagacaagagacaaaatggtgtgaatcaggacaggatcatgggcatggcatggaccaaatagttgttcaggacttcacatagagtgtctagtgatcaaaagagaagtagatttcggaatcgtctttgtaataaatatgatctgggggggcatatggtacaaagtcaaaacttgatttcttctatatagcatgcttctacccatgttaactaagttcaggtgaccttaatgggttatcatggtttaccggatatcagaacaagcacaacctaagacaacttgggttgaagtcagacaaacattatatacacaggtctactgaaagaaaaaaaaaattattctttcatattacctgtggatttacatttctcttcaatttcctttaaaaagaaatgacttaaatttcaacactaggattataaaatccatagccatatatgtgacataagaactctattctgtgtattactaccatagcccaaaatggaagaatgcaggattctcttttcatcaagaaagtactagaagcagatgggatggggagagaatctgggacatggggagtcctgggtccaccctggggcaagacatgccagcctcctggcttcctgattcttatctggacaaagaagaagtagagctggactttgccaaaggtccctttcttgtctaccattttatgatcctaaacccaaaagttccccaaacctgggagtttccttcacagggaaaactttgaatctccctgactctgtttccctagccaacctgctctgtgtcagttctacaaaaagccctatggtcactgtcatcaaaaaaatataataccacatggttgggaagcagcattcctggataggtcaccagccacctccagtgtgaagagcatggccacagtcatgccacccacccctcagatggccagggcaggaggaagccgccattgcagtcctataatgtagaacatggagcacagcacagcttagttcagaaatggcaggcccaacaaccagcaagccctgcccatttggaaagaaatggggtaaaggatggttctagcaaagctcaatgtttttatgaggggccttttggttggaaataatggaaaatcactctcatgaagaacaaagatggggcactggcttctaaggtggccaaataggaagagctccagtctgcagctcccagcgagatcaacgcagaagacagatgatttctgcatttccaactgaggtacctggttcatcacattaggactggttggacagtgggtgcagcccatggacgatgagctgaagcagggcagggcgtcacctcacccgggaagtgcaaggggtcaggggatttccctttcctacccaagggaagccgtgacagactgtacctggagaaagagtacactcctgaccaaatattgcacttttcccacagtcttagcaaccagcagaccaggagataccatcccatgcctggctcagcgggtcccacacccactgagccttgctcactgatagtgcaacagtctgagatcaacctgcaacgctgcagattggcagagggaggggcatccaccattgctgaggcttgagtagctcacagtgtaaacaaagaagccaggaagcacaaactgggcagagcccaccacagctcagtaaggcctactgcctctatatagtccacctctgagggcagggcatagtaggacaaaaggcagcagacagcttctgcagacttaaacgtccctgtctgacagctctgaagagagcagtgttctctcagcgtggcattcgagctcagagaatggacagactgcctcctcaagtgggtccctgacccccatgtagcctgactgggaaacacctcccagtaggggccaacagacacctcaaacagatgggtacccctctgggacaaaacttcaagaggaaggatcaggcagcaatatttgctgttctgcagcctccgctggtgatatccaggcaaacagggcctggagtggacctccagcaaactccaacagacctgcagctgaggggtctgactgttagaaggacaactaacaaacagtaaaggaataacatcaacatcaacaaaaaggacaaccacaccaaaaccctatctgtaggtcaccaatatcaaagaccaaaggtagataaaaccacaaagatggggagaaaccagagcaggaaagctgaaaattccaaaaaacagagcacctcttctccaaaggatcacagctacttgccagcaagggaacaaaactggacagagaatgagtttgatgagttgacagaagtaggcttcagaaggtgggtaataacaaacttctccgagctaaaggagtgtgttctaacccatcgcaaagaagataaaaacctgaaaaaaggaaagatgaatggctaactggaataaacagtatagagaagatcttaaatgacctgatggagctgaaaaccatggctagagaacttcgtaatgcacgcacaagcttcaatagccgattggatcaagtggaagaaaagatatcagtgactgaagatcaaattaatgaaataaagagagaagacaagattagagaaaaaagagtgaaaagaaacgaacaaagcctccaagaaatatggaactatgtgaaaagaccaaatatacatttgattggtgtactggaaaatgacgggcagaatggaaccaagttagaaaacactcctcagtatattacccaggagaacttccctaacctagcaaggaaggccaacattcaacttcaggaaatacagagaacaccacaaagatactccttgagaagagcaaccccaagacacgtaattgtcagattcaccaaggttgaaatgaaggcaaaaatattaagggcagccagagagaaaggtcgggttacccacaaagggaagcccatcagactaacagctgatctctcggcagaaaccctacaagccagaagagagtggaggccaacattcaacattcttaaagaaaagaactttcaacccataatctcatatccagccaaactaagcttcataagtgaaggagaaataaaatcctttacagacaagcaaatgctgagagattttgtcaccaccaggcctgccctaaaagagctcctgaaggaagcactaaacatggaaaggaacaaccagtaccaaccactgcaaaaacataccaaatggtaaagaccattgatgctatgaagaaactgcatcaattaatgggcaaaatcaccagctaacatcataatgacaggatcaaattcgcaaataacaatataacccttaaatgcaagtgggctaaatgccccaattaaaagacacagactggcaaattggataaagagtcaagacccattgatgtgctgtattcaggagacccatctcacatgcaaaaatgcacataggctcaaaataaagggatggtggaagatctaccaagcaaatggaaagaaaaaaaaaaaaagcaggggttgcaatcctagtttctgataaaacagactttaaactaacaaagatcaacagagacaaagaaggccactacataatggtaaagggatcaattcaacaagaagagctaactatcctaaatatatatgcacccaatacaggagcacccagattcataaagcaagcccttggagacctacaaagagatttagactcctacacaataataatgggagactttaacaccccactgtcaatgttagacagatcaacgagacagaaagttaacaaggatatccaggaattgaactcagctctgcaccaagtggacctaatagacatctacagaactctccaccccaaatcaacagaacatacattcttctcagcaccacatcacacttattctaaaactgatcacataattggtagtaaaacactccacagcaaatgtaaaagaacagaaatcaaaacaaactgtctctcagaccacagtgcaatcaaatgagaactcgagattaagaaactcactcaaaacttcacaactgcatggaaactgaacaacctgctcctgaatgactactgggtaaataacgaaattaaggcagaaataaagatgttctttgaaaccaatgagaacaaacaaacaacataccagaatctctgggacacatttaaagcaccatgtagagggaaatttatatactaaatgcccacaagagaaagcaggaaagatctaaaattgacaccctaacatcacaattaaaagaactagagaagcaagagcaaacaagttcaaaagctagcagaaggcaagaaataactaggatcagagcagaactgaaggagatagagataaaaaatacccttcaaaaaatcaatgaatccagaagctgattttttgagaagatcaacaaaatagaccactagcaagactaataaagaagaaaaagagaggacgcaatcaaacagatgcaataaaaaatgataaaggggatatcgccaccgatcccacagaaatataaactaccatcagagaatactataaacatgtctactcaaataaattagaaaatctagaggaaatggataaattcctggacacatacacctgcccaagactaaaccaggaagaagtttaacctctgaatagaccaataacaggttctgaaattgaggcaataattaatagcctaccaaccaaaaaaaaagtccaggacaagacagattcacagcccgaattttagcagaggcgcaaagaggagcgggtaccattccatctgaaactatttcaatcaatagaaaaagagggaatcctccctaactcattttatgaggctagcatcatcctgataccaaagccaggcagagacacaacaaaaaaagagaattttaggccaatatctctggtgaacttcaatgcgaaaatcctcaataaaatactggcaaaccaaatccagcagcacctcaaaaagcacatccaccatgatcaagtcggcctcatccctgggatgcaaggctggctcaacatatgcaaatcaataagtgtaatccatcacatatacatagccaacgacaaaaaccacatgattatctcaataaatgcagaaaaggcctttgacaaaattcaacagcccttcatgctaaaaactctcaataaactaggtattgatgggaatgtatctcaaaacaagaagagctatttatgacaaactcacagccaatatcatactgaatggacaaaaattggaagcattccctttgaaaactggcacaagacaatgatgccatctctcaccactccaattcaacatagtgttggaagttctggctagggcaatcaggcaagagaaataaataaactgtattcaattaggaaaagaggaagtcaaattgtccctgtttgcagatggcataattgtatatttagaaaaccccattgtctcagcccaaaaactccttaagctgataagcaacttcagcaaagtctcaggatacaaaatcaatgtgcaaaaatcac

SEQ ID NO: 136 - DNA, 38678 bp, Human
  misc_feature (1)...(38678): n = A,T,C or G
cccgcttccccgggctgggccgtcaaggcggggactgggagtgtccgcgtcccccccagcgacccccggttttagttaccccctcgcccaaaggcagggagaagtggaagatctgggcctagatagaagcaggtgtcatgcacttgacatgactgatgactacaaactttggacgattatttttggggggaggatgggggacggagatgagtctcgctctgtcgcccaggctggagtgcagtggtgtgatctaggtgcgctgcaacctccgcctcccgggttccagctattctcctgcctcagcctcccaagtagctgggattacaggcgtctgccaccatgcctggctaatttttgtattttcggtaaagacagggtttcaccatgttggtcagactggtctcgaactcctgacctcaggtgatccacccaccttggcttccccaggtgctgggattacaggcgtgagccaccgcgcccggccggattcttctttgtgttggattgcacacctgtacccgtctcctcactcccccatcgttgatttcctctccccaccctacccctgcaattaaagtgcattttctttggaaactttttctagatctttgaaataattggaaacctctggtcttgctatgcgttagtcacaagtcagtgtgctaggacagtgatacgcagaagaaaaagacaggcagtagctggtgaaagggaatgctgagttctcccttgtgaatagggacccccccgaccccccaacacacacacacacacagacggccacgctgctaggcttctcacagtctcccaccctgagcaaccctggggatttgctgctaatgcaaggaacagtgcctaacacaggctcccagtctctgcttgtttaaagatgcatgagattcagaatcaatcactaaagtaactggatttacgccacagcaaatagaactgggagtatgttctgtaaagatgaaaacctgtgggacttgtgagactttggattttggccacttgcgctggtgtgccctgtggcagctgaatgagtgccaaacatggggggctgacagtggcctggccttgagatggccggacccggaccagcaggtgtgactcattttccctgccctgcctggaaaggggttcgaggtatttaccaccttcccagtagtgatgaatacacagaaagtaacatccctaggtcattctgagctccttaaaatggaaaataagaggccggacacgatggctcacgcctgtaatcccagcactttgggaggccaaggagggtggatcacttgaggtcaggagttcgagaccagcctggccaacatggcaaaaccccgtgtctactaaaaatataaaaattagccgagcgtggtagtgcacgcctgtaatcccagctactcaggaggtggaagcaggagaatcgcttgaactcgggaggcggaggttgtagtgagctgagatcatgccactgcactccagcctgggacaagagcgaaactccgtctcaaaaaaaaaaaaaaaaaaaaaaaaaaacagaaaatgagaaactttccccaaacagtattacacggtgacttgggcaaaactgactctccaccaagagacacttgactgtagttttcctggcagggagagcatctttgaggtctctagtggcccaatctgttgccctcagattacctggtgtcatgtagggtggaggacagctgttgtttgccacgcgttcctgacagaaataacccttccagtcattcaccatgagcctgactggtagagactttagcaatggggaaataccgtagactgttccatcaggacaatgctgggcctgcagtccccagggggcacccacttacttagccaaaccccagacgtttcatttaaaagcagaagtgaaaggaagaccaggttcctgaaagggttattctgacttaatctggctataaaaatgctattggctgttatttggcatggccaaagtgcacccagaatgtcttctctctccattcagtgcacgcgttactttggctaaaaggaggtgagcggcactctgcccttccagagcaagcatggagcaacaggatcagagcatgaaggaaggggtgagtgtgttgctcagggaaaggggccaagagcaggcttggctgccagggcctgtgcagccttcctggagagtcgctggggggctcctggtgttgcagagggaactctgtgttgggagggattatggtggggagagggggaaagtcttgtccagcaggtggtcttttatagggaggagagaggtttagagacaagtgctctgtggaaatcattctactggaacagcctttaacagcaggatctgtaactgaatggaagagacccaaaggattcatttgtcccaacttgaaccaaacatgttagctgcaaaatccttctatggttggtgagatgtttcgctctgctttcgttttgcttttggcttcagggcagttaattttttcagcaagtaacatagctgagctgcatgaaagcaagataaactcagaaaaggcgttgcttgatttgaatttagttcagatctgtcacgtaggtttcctgccttttagatcctgaggctcccttgttttagagaggaaagattttcatggactcctgcaacgtaattgcagtttactttctagattcccttgattgaggaaaatgcataatgtcagaaaagtaacactgacttattaacactttataagaatttgcatttattcatcacaatagcatctgcttatatttggagtggaggaaggatagtgcacatttttgcaaaacagcatttgttcaggcatggatgtgagaccctcaccataggcagactggaaacatgctctgtagcacatagattaagagtgggtcttgggaggctgaggtgggtggatcacctgaggtcagcagttcgagaccagcctggccaacatggtgaaaccccatctctactaaaaatacaaaaattagccaggcgtggtggcaggtgcctgtaatcccagctactcaggaggctgaggcaggagaatcacttgaacctgggaaacagaggctgcaatgagctgagatcacgccattgcactccagcctggtcaacaagagcgaaacttcatctcaaaaaaaaaaaaaaaaaaagagtgggcctgggaagtagcagcccccaggattcattcctgctccatcctattctagctgtgggacttgggtaagttctttaactcttcagtgcctcagttttctcatttgtaaaatgggagtaataaccataccgcctcatagggtgctggagcaattaaatgagataatgcatgtaaagtacctggcacagagtgagttccccgtaaatgttactacttttctttctctctctctcgcttttttttttttttttttttgacacagagtcttgctctgtcacccaggctgaagtacagtggtgcgatcaaggttcactgcaacctccaccttctgggctcaagcgatcctcccacctcagcctcccaagtagctgggattacaggcatgcaccaccacacccggctaatttttgtatttttagtagagatggggtttcaccatgttggccaggctggtctagaactcctgacctcaggtgatccgcccgcctcggcctcccaaagtgctggggttacaggtgtgagccaccgcgcccggccatcgtaaatgttactacttttcaatcattctttaggctggtttctccacctccgcgtgatttccatttggcactggctaacgcttcgttgtaggggctgtcttgtgtgttataagatgtttagccgcgtccctggctctaccttctagacgcagtagctccctcccccaggagtgacaaccgatgtccccgagagggcagaatccactcccagccctcaactgagaggcactgctttggagtctactcagccccttcgcttgggtcatcttgtttgtcttacaactaagaaagtgttagacaaatcaagtgtcatcacctccattttatagaaaagaaacggaggtgatgaggacttaggtgtttggggtccagggaggtcctccgctgtccagagaaaggcacaactgccacgttccccacgtccaccaagtccagctgcagaaaggaatggaaacacccccacgtggcaggccctgaaactgagtaacacattgcgaaaggaaatgtttcagatggccacatgcgagaggcatgggctgacccagctgcctgctgcctcagccctccagggaaggaagcctcctctgggccagagggatgaaggtggggatgggcttcccgctcctgagagcagcctgccccttggggagaaagctggggcgtgctgggcttcccaaaacactctgaaggaagcgatcccaatggtctgtaagaatccgggaaatcattaagtgcagccgagaggggatgtaggagccaaggagaaatgcgggggcaggcgaaggctacagaggctgcgcggtcctgggaggagggcgtctggcagtatggagccagctgcctgcccctcagtggttgtgtggcagtggcctcactggccttttctcttctttttctttctttttcctttttttttttttttaattttgagacagggtcttactctgttggccaggccagagtgcaatggtgggatcatagctcaccgcggccttgaagtccggggctccagcaatcctcccacctcagcctcccgagtagctgggactacaggcatgtagcaccacccttggctaatttttaaatattttgaagagacggggtctcactatacccaggctggtcttgggctactgggctcaagtgtgccttctgcctcagcctcccaaagtgcttggattgtaggcctgagccactgcactcagccctgcttttctcctatgtagagggcaaacactgacatctatcagatgtgcaccaaggactttctgccaggaagaaaagactgttggtctgaaagaaaaaaaaataaaatggattaggaaaagaaaaaggtacaacaaggtattttacaactacataagaattgagggccaggtgcagtggctctggcctataatcccatcagtttgggaggccgaggcaagcggattgcttgagcccacaagtttgggaccagcctgggcaacatggcgaaacttggtctctacaaagtgtacaaaaattagctgggcatggggaccgtgcctatagtcccagctgctctagaggctgaggtgggaggatcgcctgagcctgggaggtagagtttgcagtgagcagagatagtgccactgcgctccagcctgcgtgactccagccagagtgagattctgtctcaaaaaaaaaacaaaggattgttgaataaagttccccacctcaataaaaagatgccgaagtgctttggaaaataaagacacatttttgtggagtggctccaccagcaactagttgagtatcctagagcaactgacacccctctgtgctctccgggtcctcactgatattcatttgtaattaatggattaattaacacatttgtaacacctactacagaccaggcatggtcctaagtgttctataccagtgaactcatttattcctgtggtggtatcattatcctcaaaaaaaaatttttttttgaggcagggtctggctctatcacccaggcaggagtacagtggcacaatcacggctcattgcagcctcctgggctcaagagatactcctgccttgtttttaaattttttcgtagagacgaggtctcactatgttgcccaggctggtctcaaactcctgggctcaagccatcctcctgcctcggcctcccaaagtgctgggattataggcatggaccaccaggccaggcccattatccccattctaaaggtgaaggaactgagaagctcagggagttgcccaaggccacacagcccagcagagccaggcttcgagcccacactcctgggctccagaaactgtgctccaaaccaccgcagcggctgacgatgctcatctctccctgcccctcccactacctgtttgtgaaactgagttcaacagtgtgataaagtgacatagcttgaagtactgatcctccatgagcgctaactactccggggtgtttgcattctgactgcagattcctaacaaggaaaagctttgaactgagagaatgtctctctgacaacagaaacttcaggatggatttctaagggagatggtttgggcttccttcccagtgaccttgaatcgtaccctgtcagaaggtcagccttgaggattgtcaacctaaaaaaagaaactgtagcaaaatgaatgtagagagtgtactggggccaaggttgaggactgtagccctgggaaacactgggaagtactttggagagcataggagaagttcaagtttttaaagaaaaaaggacaaatcaggagaggagtgattacaaacggtgtttgttaggaattctcactggtttagagaaatgacattgatttagtgataggctatacatttttttttttttttttgagacagaatcttgctcttgttgcccatcctggagtgcaatggtgtaatttcagctcactgcaacctccacctcccgggttcaagcaattctcctgcctcagcctcccgagtagctgggattacagacgtgtgccaccatgcccggctaacttttgtatttttagtagagacggggtttcaccatgttgtccaggctggtcttgaactcctgacctcgtgatctgcccacctcggcctcccaccaaagtgctgggattacaggtgtgagccaccgcgcctggcctacattgttgactgtagagtatgcgctgtggtgtccggtgtatggcattgttaggctaatttactgctacttggtggcaacactcagtgtagagtccacatagcaggcagatgacttagctcacgtgggaataagatgtgactgctgctgtatttcagtgctttgctggcccggtcatttaaaggggtacacatcccccaaaaagtttcttttctttcttggggtggtcgttattactaaagtctcaaaatgttctctgtattatgaaagggaggaagctggtttactgacagcatgaggaatgtggtttctggttttccctgaagcacagctcagcgtcttggcaacctccttagcctctaaggagagaccctcccggtcacggctgggggtcactggggcttctcattttaacaagctggccagagacccgcacatcctcttcagcccctcccttttccttatgccctaatccagcccagtaccaaattctttttgttctccctcctggaaagcaaaaaaagaaagaaagagggcttaagccttctttctactatgtgccttttaaaatgtagtactgcatctttattgagaatatatctcaataccatacaatttcacccctctaaagtacacaggcccaggctggcactgtggctcacacttataaaaccaacactttgggaggctgaggcgagaggattgcttgagaccaggagttcaagactagcttgggcaacatagcaagaccctgtctctataaaaaatgtaaataggccgggcgcggtggctcacgcctgtaatcccagcactttgggaggccgaggcgggcggatcacgaggtcaggagatcgagaccatcctggctaacacggtgaaaccccgtctctactaaaaatacaaaaaattagccgggcgtggtagcgggcgcctgtagtcccagctactcgggaggctgaggcaggagaatggcgtgaacccgggaggcggagcttgcagtgagccgagatcgcgccactgcactccagcctgggcgacagagcgaagactccgtctcaaaaaaaaaaaaaaaaaaaaaagtaaataatagcctgatgtgttggctcacacctgtaatcccagcactctaggacccaaggcaggtggatcacttgaggtcaggagtttgagaccagcctggccaacatggtgaaaccccgtctctactaaaaatacaaaaattagccaggcgtggtggcatgcacctgtaatcccagctatccgggaggctgaggcaggagaattgcttgaaccgaggaggtggaggctacagtgagctgagattgtgccactgcactccagcctgggcgacagagcgagactctgtctcaaaacaacaacaaaaaaaatttaaataaataaagtatacaggctgggcatggcagctcacacctgtaataccagcactttgggaggctgaggcaggaggattgagaccagcctgggcaacaaagtgagactctgtctctacacacacacacacaaagtacatattaatatataaaagtatacaatttatcaccaaagtgaaataagccaggcacgggaagacaaacactgcatgatctcacatgtggaatctgaaaaagttgaactctctaagtcgaactcacagggtgagaagtggtgtctcatgctgatttttatttgcatttgcctcatgggatagcaagtctttttaatttgcatcctcagtagtcctcaaagctggtacttttaacccctaccgtggcccgttccattacccaagtgcccatctgctgtctgttggcctctgcagtaacctggtctcccttctgctctgcacgtagtagctggagtaatttatttatttatttattttttttttgagacagagtcttgctctgtttcccagactggagtgcaatggcgtgatctcggctcactgcaacctccatctcccaggttcaagcgattctcctgccttagcctccctactagctgggactacaggcatatgccaccacgcctggcttatttttgtatttttagtacagatggggtttcaccatgttgctcaagctggtctcaaactcctggtctcaagtgatcctcccgccttggcctcccaaactgctgggattacaggcgtgagccactgtgcccagcctggagtaatttttttaaagttcaaatccttccatcccactccttggctacagagcacatggagggaacagatggagtgaatatggagtgaacacccagtcttttctgtggccctcaccccggtttgccctcctttccccacgctccagccacactggccaaattccagatgctcaaaggttctgagctccgcctgcctcaggccttcccacatgctgttccctctctctgaatcactctcttctccctcctctcctcagctgaaatgttgctccccagacctctctttttaaccactcctgtgtttttcttcttagtacttactacagttacagtttattacattctcatgtagtttcttaatgtgtgtctttaccattgacaatagtctgctgggggcagctgtcttgcttacccgagggtactgtgcttcctggagtccagttagctggtcatgcatatttgtttaatgaagttggctggaccggcagggttagcgagaacccacctagaataactttgctactcccaggagagtgagccatgatttctactgcgcccacagaatgtgcctgtggcttgaattcagggaggcagtgaaagaatggagggtgaattgaatgctctatgctcagagactctatagcctgatcatttagtcgctctgatctctcctccatagtctctctgatcatttttgctgggatcccatcaaagcggtcagggagctggctctccatggtgcctggcagaacccccaactctggggcatgagccctgggaaccagccagctccaccagctgggctgtgcttgttggctgtgctgctggccagaaccccacccctgaccccaaaggacttcaaaccttagggcactcatcagactgagggagtggtcaagagctgcacttggctgtgtgaatgaagctggttgcactttcgtcttactgagaagagaattagaaaagaattttttttttttttttgagacagggtctcattttgtggcccaggctggagtgcagtggtgcaaccatagctcactgcaaccttgaattcctgggctcaagtgatcctcccacctcagcctcgtgagtagctgggaccacaggcgtgtgccaccacacccagctaatttttaaaatttttttgatagagacaggatttccctatgttgcccaatctggtctcaaactccagggctcaagtgatcctcctaccttacttagcttctcgaagtgctgggattcaagcgtttgccatcacactcagatagaagggattttttcttttttctttttttttttttttgagacagggtcttgcactgtcacccaggctggagtgcagtggtgcgatctcagcttactgcaacctctgcgtcccgtgctcaagtgatccttccacctcagcctcctgagtagttgggattacaggtgcacatcatgcccagcaaatttttgaatttttagtagagacgaggtttcaccatgttgcccgggctggctgagaactcctgggctcaagcagtctacccatctcaacctcccaaagtgctgggatttataggcatgagccgtcgtgcccagaagagaattttttaatcaacattttcttcccttcccctcacccccacccctctctctttgtctgtaacaaaatcaagcagtagaacagctataggggagggatttttgtctgtcttgtttgttcaccgctatatccccaacacttagagcaatgcttgttcacattgggcgcccaatatgttgaatgnnnnnnnnnnnnnnnnnnnnatctctcctccatagtctctctgatcatttttgctgggatcccatcaaagcggtcagggagctggctctccatggtgcctggcagaacccccaactctggggcatgagccctgggaaccagccagctccaccagctgggctgtgcttgttggctgtgctgctggccagaaccccacccctgaccccaaaggacttcaaaccttagggcactcatcagactgagggagtggtcaagagctgcacttggctgtgtgaatgaagctggttgcactttcgtcttactgagaagagaattagaaaagaattttttttttttttttgagacagggtctcattttgtggcccaggctggagtgcagtggtgcaaccatagctcactgcaaccttgaattcctgggctcaagtgatcctcccacctcagcctcgtgagtagctgggaccacaggcatgtgccaccacacccagctaatttttaaattttttttggtagagacaggatttccctatgttgcccaatctggtctcaaactccagggtggatggaaggccacaaaagagtccagatctgtaaacatggtttctgcaggaggtgtactgtttacgcgacatctcccaggctgtctcattgtcaagagtggactttcatccccaaaacgttcatcaggaaagaatttgtgaggattctaaaaaagattaaaaaaaaaaaaaaggacatttattagcagatttcataagtggaaatttataggctgagagaattaagtgaggtacttaagaaaaccacagtcagcaagaataaaaagcataatatatttttctaggccagaagcccaagaaaaaaatcaccttagttatagtacaaaggcacagagtgcagcctaggacacagccatgaaagaaagctgcttgatcgaatgctcctcaagcaggtcactcatctcagattatgtgataatgcaaaaactggtaataaaaccaaactctaatatgtctttgctaagagattaacattaaatgccaaagggagaaaggaatacaactgaggatgttctagaaactttctgacaagacatctatgcctgctctgtctgaaataaaaactacaaaatactattcattacccattatacatgactaagtctgaccaatattttggtaaacattataaaagaatatgtcatgcaatttaaggtaccaaattcagacacaatttagaatggcaaagggaagtgatcctcctaccttagttagcttctcgaagtgctgggattcaagtgtttgccatcacactcagatagaagggattttttcttttttctttttttttttttttgagacagggtcttgcactgtcacccaggctggagtgcagtggtgcgatctcagcttactgcaacctctgcgtcccgtgctcaagtgatccttccacctcagcctcctgagtagttgggattacaggtgcacatcatgcccagcaaatttttgaatttttagtagagacgaggtttcaccatgttgcccgggctggctgagaactcctgggctcaagcagtctacccatctcaacctcccaaagtgctgggatttataggcatgagccgtcgtgcccagaagagaattttttaatcaacattttcttcccttcccctcacccccacccctctctctttgtctgtaacaaaatcaagcagtagaacagctataggggagggatttttgtctgtcttgtttgttcaccgctatatccccaacacttagagcaatgcttgttcacattgggcgcccaatatgttgaatgattgaatggctgaatagacgagtgaatgaatgaatacacagagcgaatcagatgggaggtgagccaagcctattgtgtgtgcatatgtgtgtgtggggggtgggctgtgtgtgtgtggggtgggctgtgtgtatgtggtgtgtgtgtggggtgtgtgtgtgtggggggtgtgtgggctgtatgtgtgtatgtgtggtgtgtgtggtgtgtgtatttctgcctatgtgtgtggggggtgggtgtgtatgtgtgtggtgtgtgtgtggggtatgtgtgtggtgtgtgtatgatgtgtgtgtggtgtatgtatgtgtgcatatgtgtgggggtggggtatgggtgtgtatgtgtggggtgtgtgtgggaggtgtgtgtgtgtactggaggcatgtgggggtgtggggtgtgtagtgtgtgtacatgtagggggcatgtgtgcgtgtgtgtatgtagtgtgtgtacatttggggggcgtgtgtgcttgtgtgtatgtagtgtgtgtacatgtgggggggcgtgtgtgtgtgtagtgtttgtgtacatgtggggagtgtgtgtgtagtgtgtgtaccatggggggtgtgtgtattgtttgttacatgaggggcgtgtgtgtagtgtgtgtgtagtgtgtgtattgtgtatgtagtgtgtagtgtgtgtagtgtgtatgtagtgtgtgtgttgtgtgtgtgtatagtgtgtgtgtattgtgtgtgttgtgtgtgtagtgtgtgtgtgtagtgtgtgtattgtgtgtgtgtggtgtgtgtgtactgtatgtgtgtagtgtgtgtgtgtagtgtgtgtgtgtgtgtgtgtgtgtgtgtagtatgtttttgctcttcaccagggctccttgcaggtgctgctcttcagaggttcactccaccccatctggggccccatgacaaggcaggaatgatcattgtttctctccctttctggctcctcacttacctctctcaagacatcctctttaggccgggcacagtggctcatgcctacaatcccagcactttgggaggctgaggcaggaggatcgcttgagcccaggagtttgagaccagcttggacaatataatgagacccctgtctctataaaaatatattttttaattagccaggcatgatggcatgcacctgtagtctcagctactcgggaggctgaggtgggaggatcacttgagcccaggaggttgaggtcacagtgagctataatagcaccacagcactccagccagggcaagaaaagtctctgtctcagaaaaaaaaaaaaaaaaaaaagattctctgtagatttagataccgtgggatagtgcttgtcttgtcactggagggccaagcatgaacctgtgttacctgtgaaagggggctctctggccaggcgtggtggctcacgcctgtaatcccagtactttgggaggccaaggcaggcagatcacgaggtcaggagattgagaccatcctggctaacacagtgaaaccccgtctctactaaaaaatacaaaaaattagccaggcgtggtggcgggtgcctgtagtcccagctatttgggaggctaaggcaggagaatggcgtgaacccaggaggcggagcttgcagtgagccgagattgcgccactgcactccagcctgggcgacagagcaagactctgtgtcaaaaaaaaaaaaaaaaaaaaaaaaaaaagaaaggcggctgtccatcagagtagatggaagaaggtcctttgatggcaagtcagagagcagcgtcccaagctctctccaacagcagattcacctctgcagctagacatggtcgtaattaatcctggcaaacactctggtagggagtgtgattgtcctcatttcagagatgaagaaactgaagatcctagaaattaagctgaaaagtggcaacaggtagattcaaaactgaggcctgtagattttaagcccgcagctctttccatgtctgtctcctgctcttcattactaatgaatttcctcttgtcattaaagattgtctgaaaggaaattttcagtggccaaaatagctaaaattttctctttttctctttgattttctgggagtttatgtttgagatggtgcaagagcacatttgctgcagttggcaaatgccccacgtggcaggaatgtcacaggagcaattcaaacagctgcagtagctgcagtgttagagaagtaggtttcagcttctctctgatccagtggttctcaaatggagcacttccccaccaggggacacttaacaatgttggaagacatttgggttgtcgcagctggggagaggggtgctactggcaccatgttcacaggatgctgtaaacatcctgctgtgctcaggacagcccccataacaaagaattatcagaccccaagtgtcaaaagtgccatggttgagaaagcctgtaacccaaggtgggttgagggtaggtttcaaggaatggagtagtctcaagactatggatcttcagattctgttacatctttctacgaaaccgaagtaaagcgggagggccctggaaccctggggctgcttcctgacctaagctgtgatctctgcagaggctgacgcttgtgcttgccctggcaaccctgatagctgcctttgggtcatccttccagtatgggtacaacgtggctgctgtcaactccccagcactggtaggtcactgtggtgagcaagatgtggggaggacgtttggagcagcccattgcctgggtgggactggccagcgtggggctgttcacgcagtgggtcctgaagcaaagggagagggaaacaccctccggacacagcacagacccgagggaactcgcagacacaggtctcttgggatgggccaggtctggatggacacacagtgggccgggctctaggagggggctcagatcttctgtggccttgctgtttagagggaatccgggggggccaggggtctcccagctgattggaaaattggagtcatccctttctggctgagaaacacccagggtggtttgctgctgagaggcttcccagccctcccggtgggtgcccacccttctcactgctcctgaagctctgtcctgcctcccatcaccccccggttaataaggttggtctctgtgtgcccaggttatttcattgggtgtcctaacagctaatgttcttcttgcaaaaccggatcaaattattttggtgttctgttttgctttgtctcctagctcatgcaacaattttacaatgagacttactatggtaggaccggtgaattcatggaagacttccccttgacgttgctgtggtctgtaaccgtgtccatgtttccatttggagggtttatcggatccctcctggtcggccccttggtgaataaatttggcaggtaagggaaggtgaatttttaattccctgaaactcatagacccccatcagagctaaaatacaggcctacaactgaaatccttaccatgagactaagataataaccactgtggtcatttttcttttttctttctttttttttttttttttttttttaatttttgagatggagtcttgctctgtcagccaggctggaatgcagtggcgcgatcttggctcaccgcaacctccgcctcccaggttcaagcgattctcctgcctcagcctcctgatcctgggatcacagatgtataccaccatacccagctaatgtatttctagtagagacggagtttcaccatgttggtcaagctggtctcaaactcctgacctcaggtgacccacccgcctcagccccccagagtgctgggattacaggcgtgagccactgcgcctggccggtcatttttattttctaatggggtcagaaaagaagatcagacattgacagtgtttggggacctaggcagggtctcaggggttagaagcaggggtggccagggatctacaggccctcgggcagacccggaaggagccgtgtgtgcttgtggagacccaggacttgcttctgctcatactgcccttttgccccacagtgtcatctaggacatctctcttgtgacaccagcctcgtgaacaaaggggtcagggctgtatctttgcccctatttctagaaacattagaaatgccatattttatttcaaaaaagtgtccttaagatgtcacgctcccccgtataaattccatggacattatggaagacctagttagaaagagaattttagaggtccccttgtccaacccgtctagggatgaggagcacgtggggctgagtgaggtcacagatctagtgagcccagagtaacccagactctgactcctcctccagtatttcaagaaaagaatctgagaataaaaacacacagctgggcgcagtggctcacgtctgtaatcccaacactttgggtggcagaggcgggcggatcacctgaggtcaggagttggagaccagcctggccaacatggtgaaactccgtctctactaaaaatacaaaaattagccgggcatggtggtgggtgcctgtaacccccctactcgggaggctgaggccggagaattgcttgagcctgggaagcggaggttgccgtgagctaagatcgcaccatcgcactccagcctgggcaacaagagcgaaactccgtctcaaaaaacaaacaaacaaaaaacaccgctgcagctttgggatctaacatcctcttgagagattagtgttgaacccacagttttccctgtgggccctcatggagcagaacatccctccagtcagaatcagacctgccggacacttcttgagttaagagcacgccgcttggcccacagatggagctgaaggttgctaattgagctgtctacttaggagtctgataaacactatttggctatttgccgttttcttaagtatttgtgggtgttatttatttctttattttttgaggtagagtcttgctctgacgcccaggctggagtgcagtggtgtgaaattggctcactgcaacctccacctcctgggttcaagccattctcctgcctcagcttcccaagtagctgggattacaggtgtctgccaccacgcgcagctaatctttgtatttttagtagagacagggtttcaccatattggccaggctggtctcaaactcctggcgtcaagtgatccacccacctcggcctccccaagtgctgagatgacagaggtgaaacactgcatgtggccagtgttatttaaatagcaactaacttttattaatgagttcctatgtgccaggcactgtcctgactgtgtttagaggtactattacaatcctcactttatttttatttatttatttttgagatggagtctcgccctgtcacccaggctggagtgcaatggtgtgatctcagcacactgcaacctctgcctcccgggttcaaacgattctcctgcctcggcctcccaagtagctgggattacaggcgcatgccaccacacccagctaattttttgtatctttattagagacggagtttcaccatgttagccaggctggtctcaaattcctgaccttgtgatccacccgccttggcctcccaaagtgctgagattacaggtgtgagccaccgcacccggctaatccccactccattttaaagatggggaaatggtgcacagagagacactgtaacttacccaagatcacacagctgggaggtggccaggactccaacccaggatgtttcacttctgagcatgagcaagtaatgtctacactctacttttgttacttagggaaaatatcttctcaatctgttgctttatttttttaatcatacatatagtaccttttttatgcaaaattttaaagtcttcaagtggtcaaatttatagattttgcttctcaactgaggacacttacaaagcaaacactataaatatatatgtgtgagacagggtctcactctgtcacctaggtgggagtgcagtggcatgatcacagctcattgcagccttgaactcctgggcttaagggatccttctgcctcagcctgctaaatagctggaactataggtgtgtgccatggtgctcagctcattttttagtttttgtagagacagggtctcactaggtttctctggctggtctcaaacttctgggctcaagcaatcctcccaccttggcctcccaaagtgctgggattacaggcacgaaccgctacgcctagcctcttctatatttttaaaatttatttcacaattttgttcttccagatagatctggtgttttattttgtatatattgagtgatgagagaaaactaattttattttatttttccaagtggaaagtcagttgctttcaaatttatcttagttattcatgctcctttactcttccatttaaaattttaagtcagcttctcaaaatcccggaagaaagattctgactggcattgctctgaatttataaattaacctgaggaaaactgacatctctacaatgttgaccttgcccactcatgagcaaactagagctttccattgtcttcaggtcttcttacatgtcctccaataaagtttcatcgtaaaggaccaaggatttagttttctttatcctgggagtcactgtggttccttgtctgaagtttcatgtctttgtcatcagttctgagactttttcagccaatatctctacaaatattgcccctccccgattttctccatgaagttcctccgtgtctttgaatctcttatatttcccatcttcttacctctctcgggtgctttctaggtaatttctgcaggtctaccttcctattcattaattctctcttcggatgtaataaacctgctacgtttttaatgattatatttttcatttcaataagttctatttattcgtttttaaaatctactttctatcattgttttagataacttttatagttttttgttctttcctatagtactatttttattttatttttttatttttttgagacagagtcttgctctgtcacccaggctggagtgcaatggcgcaatcttggctcactgcaacctctgcctcccgggttcaagtgattatactgcctcagcctcccaaatagctgagattacaggcacctgccaccatgtccagccaattttagtatttttagtagagatgaggtttcaccatgttggccaggctggtcttgaactcctgacctcaagtgatctgcctgccttggcctcccaaagtgctggaattacaggcataagccactgtgccctgcctatttaaaaaatatatatataaatatatataatatatataaatatataatatatattaatatataaatatatagataaaatatataatatatataatatataaatatataatatatataaatatatataatatataaatatataatatatataaatatatataatatatataaatatatataatatataaatatataatatatataaatatatataatatataaatatataatatatataaatatatataatatataaatatataatatatataaatatatataatatataaatatataatatatattatatataaatatatataatatataaatatataatatatataaatatatataatatataaatatataatatatataaatatatataatatataaatatataatatatataaatatatatannnnnnnnnnnnnnnnnnnntataatatatataaatatatatagtatataaatatataatatataaatccaatatataaatatataatataaatatataatatataaatataatatataaatatataatataaatatataatatataaatataatatataaatatataatatataaatatataaaatatataaatatataaatatatgtaatattaacatataaatatatgtaatataaatatataatatatattatatataaatatatattatatattaatatataaatatataatatatattatatattaatatataatagagtaagaccctatctcaaaaaatatattttaaaaaatatttttaaaacatatatatatatattttttttttgaaatatggtcttactctgtcgcccaggctggagtgcagtggcacgattgtggctcactgcagactccacctcctgtgctcaagtgatcctcctctctagtagctgagactacagggatggggtcttgctatgttgctcagtctggtcttgaactcctggcctcaagccatcctcccaccttggcctctgaaagtgctgagattactggcaagagccaccatgtcctgccattaaaaatagactttattaaagagcagttttaggctcacataattgagaagaggctatagagacttcccatgtacctctcctccaatacatgcatagtctccccctttatcaacatctctcaccagagcgctgtatttgttacaaatgatgagacctgcattgacatatatcatcacccaaggttcatagtgtacattagggtttactcttgatgttgtgcattctatgggttttgacaaatgcgtaatgacttgtatccaccattatagtatcatatagagtagtttcactgccctaagaatcctctatgctctgcctagtcaccccctccctcctctctaactcctggcaaccaccgatccttctactatctccatagtttgcctttcccagaatgtcatatagttggaatcacatagtatgtaggattttctttctttctttttttttgagacggagtctcgctctgtcacccaggctggagtgcagaggcacaatctcggctcactgcaacctctgcctcccatgttcaagcaattctcctgcctcagcctcctgagtagctgggactacaggtgcacgccaccacacccagctaatttttgcatttttagtagagacggggtttcaccgtgttggccaggatggtctcaatctcttgacctcgtgatccgcccacctcggcctcccaaggtgctgggattacaggcgtgagccaccgcgcctggcccagattggcctcttttactaatatgtactgaaggcttctccatgtcttttcatggcttgaatatttcattgtctggttgtaccacactttatcggttcagtaccagaggacatcttggttgcttccagcttttggcaattatgaataaagctgccgtaaacatccatgcacatgtaagtttctgtgtagatatacgttttcagctcctttgggtaaataccaaggagtatgtgattgctggatcatatgagtacagataagcatatgtttaattttataggaaactgccaaactgtcttttaaagtagatatatcattttgcattcccaccagcaacaaatgagggttcctgttgctccagcatttggtgttgtcagagttctgggtttttgttcttctgacaggtggtaccttattgtttaatttgcatttccccgataacacatcatgtggtgcaccttttcatatgcttatttcccatctgcgtatcttggtgaggtgtctgttaagatctttggcccatttttaaattgggttgtttgttttctttttaagttttaagagttctttgtacattttggacaacagtgcttttagatatgccttctgcaaatattttctcctagtttgtggcttgtcttttcatcctcttaacagtgtctttcacagagcagaaagttttaattttaatgaagaccagcttatcctttgtttgtttgtttctttctttctttctttgtctctctctctcttttccttcattccttccttccttccttttctttttttccctccttccttcttctctttttctttctttctttttgcaataaagctttattgtgatttattattgttataaaattacagacaattgctcaggaggggtgtactaccttaaaatgtccacctccctccttgatatgccactggttcctatctttagcttgttctttgtgaattgacctactattctgagaggccctttcacgtgagcaacttcagaccagaattgttggtttacctcttcctccctggaatttcatcagtccagttgacgctgtatgtattttgaggctgtgttggaatcgtctctgtttatgatagttatatcttctttgccattatttcttttacttttatgtaatgcatataacacctctgtgttttatgacatttttatctcaaatcatattttgtcaggtattaagactattacccaacttccctttttgtctttattggctaaagattttatattttctaaccttctgtctttcattttaaggatcaattctttctttcatggattatgcctttggtgttatatctgaaaagtcatcgccaaacccaagactgtctagatttttttttcctaagctatcttctaggagttttatagttttgcattttatatttaggtctgtgaccactgtgaattaatatttgggaaaattctaaggtttgtgtctagattcattttcttgcatatagatgtccagttgttccagcaccattttctttccttttttttgttttttgtttttgagacagggtgtcactctgtcacccaggctgagtgcagtgacacaatcacatcttgctgcagcctcaaacttcctagctcaagcaatactcccgcctcagcctctccagtagctgggactacaggagtgcaccaccaatagtgcccagcaaatttttgaattttttcttttttttttttgagacagagtcttgctatgtcacccaggctggagtgcaagtggcataatctcagctcactgcaaactctgcctcctgagttcaagcaattctctagcctcagtcttctgagtaactggaattagaagtgtgtgccaccatacccggctaattttttttttgtatttttagtagaggtggggtttcgttgtgttggccaggctggtctcgaactcctggcctcaggtgatccacccgccttggcctcccagagtcctaggattacaggcgtgagccactgcgcctggccaatctattatttttttctagagatggcgtctcactatgttgcccaggctggtctggaacttctgtacacaagtgatcctcctacctcagtgtccaaaagtgctgagattacgggcatgagcacggcacccagcccagcaccatctttttgaaaagactgccttttctccattgcgttctctttgctcctttgtcaaggatcagttgaatagacttaacgtgggtctatttctggactctctgttctgttccattgatctatttgtctattcttttttttttttttctttagacagagtctcgctgtgtcacccaggctggtgcagtggggccatctcggctcactgcaacctccgccttccaggttcaagcgattctcatgcctcagcctcccgagtagctgggattagaggtgcgtggctgtagtagagacgacgaggtttcaccatgctgaccaggctggccttgagctcctgacttcatgtgatgccgcccgccttggcctctcaaagtgctgggattacaggcgtgagccaccatgcccggcctgtttgtctattcatttactagtaccacgctgtcttgattactgtagctttatggtaagccttgaagtcaggtgatgttggttctccaatacagtactatttggattccttattttatgacactaatcattttaaacattttatagtccagtctgattctgttgtctgaaggtgtgctgttagtataagcggctctcacgtgtggcaagtttctcagtgtttaggaatgctggagctccactcgctgacagcttcgtccatcatgagggtcctcatcatgagggctccattgcgagaggcccctccagagaagtttgctttgcttctgtcaggatctccagggtaggcttgttcctgacttcaatgggaaggctttccaagttttattaagtgtgatgtttgatataggttttaggtagatttcctttatcagcttaaagaagttcttctatttatagtttgttaaggctggttttaaaaaaaatggctgggcgcagtggctcatgcctataatctcagcagtttgggagactgaggtgggcagatcacttgaggccaggagttcgagaccagcctggccaacatggggaaactccatctctattacaaatacaaacacttagctgggtgtgggggcacgtgcctgtaatcctagctacttggaaggctgaggtacaagaatcactttgacctggcagaccgaggttacagtgagctgcgatcactgcactccagcctgggtgacagagcgagactctgtctcaaaaaaaagaaaggaggaaagaaacttaggccaacttttaaataaacaaaaatttaaaaatcataatggtgttaaattttattgacttcttttgctgcttctattgagataatccgatgttttcccccaatataatgtttgtttacttatttatttatttattttttgaggtggagtctcgctctgtcacccaggctggagtgcagtggcacgatctcagctcacggcaacctccacttcctgggttcaagcaattctcgtgcctcagcctcctgagtagctgggattacaggcacctgccaccagtgggccctgctagtttttgtatttttagtaaagacagtgttttaccatgttggccaggctgatcttgaacacttgacctcaagtgatctgcccacctcggcctcccaaagtgctgggattacaggcgtgagccaccatgcctggccccaatataatctttaatatggtgaaatacattgaaatatttttgtatatgctgttgaatttaatctactaagatttcatttaggattgtggcatccacgttgacataagtgagatggacctatacttttcttttcctctaatgtccttacccaggacaattttggggttggctttcaagattacaccaaaattataaattagctaatgatttcaaaaaccctttactatatcttaatacagagccctttctccattttcaccactgacgccctctggactgtggtcatttccatttgctccccacactgagcgtattcccacaccaggccatgcacttgacctgtatcagtctcaggtcccagagagctaaacgcacagcagtaaagctgctgtaactgctggagcctatgcagaggagacactccagaaacatttcttgaatgaaagagtgaattcttcagcaaaactaactgatattttgtcctctgcagaaaaggggccttgctgttcaacaacatattttctatcgtgcctgcgatcttaatgggatgcagcagagtcgccacatcatttgagcttatcattatttccagacttttggtgggaatatgtgcaggtaaacaatgctatgctgtattgccattctgtgagggtcgtcaaggaggaggacaacaggttcccagggactagaaccaatctgtgatgtctgaagcgtgtagaaagcgttcctatacctctgctgtgaaacagatggttgagccctacctggttctcaggtgcagagctttactgtgatgtttcctacaaagaaacatctttgaaagactgaaatgcagaatcttaacctgggaagtgtcattccaatccaatcctttatctcaatattttctcaactgcaggtcatgaccagttagtgggtggtgatgtctgtttagtgagcagcattttctttttaaaaatagaatagctgagtgcagtggctcacacctgcaatccagctactctggaagccgaggcgggaggatcacttgaaaccagcctgggcaacacagtgaaaccctgtgtattagtctgttttcacactgctgtaaagaatactccccaagactgggtaatttataaagaaaagaagtctaattgacttacagttccccatggctggagaggcctcaggaaacttacaatcatgatggaaggggaagcagacctgtcttacatggcagcaggcgagagagagagagagagagagaagggaaactgccttataaaaccatccgatctcatgagaacttggtatcacaagaaaaacatgggagaactcgcccttatgatccaatcacctcccatcaggtcctcccttgacacatggggattacaatttgagatgagatttgggtgaggacacagagccaaaccatatccccatctcaaagataaataaatatatatataaatcaataaataaaatggaagaggcagtgttacgtgtagtaaagataagtattgcccacttttgtttcacatacacacacacacacacacacacacacacacacacgagaaccaggttgcagtggaaaatgtatttctgtattttttactgtgggtgagagtcaaaaaagcttgagaaacaatctaatgtatgaattccactaccagaaaggtgctaacagtgccacattttaagttttatagggcaatttaaagtttgccaagggcgtactgagttctattcctgaaatgcccacctgctgagcgggtgctgactcgctgagtcctctcatctaacaaactgggaggtgttttttcctaatcccactctgttgcttccaagcctaggctgccaggctgtacagtggtgattttagaaaactctcccataattgcttcacactgaggagagatgaggggtagagccgtgccagtggctttccctgagttggcatccttagtaggcagtatttctcactgccaggtggggagaggcatctaggatggaagctctcagggtcctacaggtgcagagtgggccccttgagggagcccctcccaggtgcctcactgcctccctccagtcactttcccaacattgccaaggaactctcatttgttccttccaaacgcagggatagggacaaatggataatttggctggctgtccataaacccctcagctaggattaattggcagtaacagagacgtgaaaaaaagatgagaagacatttcccaaacagagactaagtcatgccaaagggaggatggtgagccccatggcaaacttcacttagtgctcggctttccctgagagcacctggctgggtctctgccatcttttttttttttttttttttgagatggagtttccctcttgtcacccaggctggagtgctgtggcatgatcttggctcactgcaacctctgcctcccgggttcaactgattctcctacctcagcctcctgagtagctgggattacagctgcccgccaccacacccagctaatttttgtatttttggtagagatggggtttcactatgttggccaagctagtctcaaactcctgacctcagcctcccgaaatgctgggattacaggcgtgagccaccatgcccggccggtctctgccatcttgccctgacctgtgggttttctctgcagtgggctcaacattttgaaaaatacattcctaaaagttgccaccagtaagcaggtccaatcacttttctattgaccattaacaatacagaattgtttccagcagagaaatattaggctccaatagataacaaatcagttaaaaatcccagcctttactctaaagtcagcagttctcagtttttggtctcagacccctttacacacttaaaattattgagggctccaaagagcttttgctcatgtgggttacattgatcaatatttactgtattagaaatggcaaccgagagacatattaattcattttttaaaataagcctattacatgaagagtggccttgtttgacatttttgcaaatctctttaatgtctggcttaatagaagacagctgaattctcagatgtacttctgggtcaggtcagttgtgatgtggcctggcaagaagtctctggaaaactcccatatgctcatgagagagagagaatgaagagcagatatcatctctggattattatgaaaatagttttgatctcacagacacccttaaaaggtctcgggatccctgggtcctcagatcacggcttgagaacactggccattaggggcataatccatttgccaacagtttttcacatacctccagcaagtcagcaaagtggatcatcaagctgtgtgctgcttagacactcattttaaaaccacgcatatggccgggtgcagtggctcatgcctgtaataccagcactttaggaagctgaggcagttggatcacttgaacctgggaggcagaggttgcagtgagctgagatcgcannnnnnnnnnnnnnnnnnnnnnnnnnnnnnnnnnnnnnnnnnnnnnnnnnnnnnnnnnnnnnnnnnnnnnnnnnnnnnnnnnnnnnnnnnnnnnnnnnnnnnnnnnnnnnnnnnnnnnnnnnnnnnnnnnnnnnnnnnnnnnnnnnnnnnnnnnnnnnnnnnnnnnnnnnnnnnnnnnnnnnnnnnnnnnnnnnnnnnnnnnnnnnnnnnnnnnnnnnnnnnnnnnnnnnnnnnnnnnnnnnnnnnnnnnnnnnnnnnnnnnnnnnnnnnnnnnnnnnnnnnnnnnnnnnnnnnnnnnnnnnnnnnnnnnnnnnnnnnnnnnnnnnnnnnnnnnnnnnnnnnnnnnnnnnnnnnnnnnnnnnnnnnnnnnnnnnnnnnnnnnnnnnnnnnnnnnnnnnnnnnnnnnnnnnnnnnnnnnnnnnnnnnnnnnnnnnnnnnnnnnnnnnnnnnnnnnnnnnnnnnnnnnnnnnnnnnnnnnnnnnnnnnnnnnnnnnnnnnnnnnnnnnnnnnnnnnnnnnnnnnnnnnnnnnnnnnnnnnnnnnnnnnnnnnnnnnnnnnnnnnnnnnnnnnnnnnnnnnnnnnnnnnnnnnnnnnnnnnnnnnnnnnnnnnnnnnnnnnnnnnnnnnnnnnnnnnnnnnnnnnnnnnntgatccacctgcctcagcctcccaaaatgctgggattacaggggtgagctacagtgtccagcaggaggaatttaaacttcaaaagccaggccaggcacggtggctcatgcctgtaatcccagcactttgggaggccgaggcgggtggatcacctgaggtcgggagttcaggaccagccttgccaacatggtgaaaccccgtctctactaaaaatacaaaaattagccaggcgtggtggcgggcgcctgtaatcccagctactcaggaggctgaggcaggagaatcacttgaacctgggaggcagaggttgcagtgagctgagatcgcaccactgcactccagcctgggcgacaagagcgaaactcgcatctcgaaaaaaaaaaaaagccactttgctctgattctcgtatcagaactggctggctgggaggtcctagtggagtcattttaaagacaaaaatagagattgctttccaccaacgtacaggtaaccccatctcttcacaaacctcctgaggtttgaccctttattaatatccttcaccaagatgctcttgctgctaagtggctcttgttaagtggtgaggacacagcctcccacttcagctcccaggaggccttcctttcctctgcagccctttgccctgggcctgtgaggtgttgctccctcttcccacctagacatgctaagagctgctttaaagactgcccctctttgctctgcaaatgaggaagaatcgatattaatgaactgtgatgtctcttttcaaatactgagcagagacatctgtgggtagaattgccaaacaggaaaacatggcctcaggtaccctcctatctcagttctatcaaataccccgccatcaacagcagctccaacctctgctcactccaaactctgttcctgagagcctcccttcagagacccacgtccctgagcctccatttgactcaggatttggtacctgatacttggactagtgaaacttcctctccatccccagcctctggatgtgcttttaggagaattaaatagggcaatatatgtgaaaatactttggaagctgcaaaattaaattctgcctatgtttttttaattgacatcaggcaacacgtcattctataaaatagagtaagttttccctccaccagattcaagtatgatgggaatatttacaagtttaaatactggggattcagaagtagtccaggcattacagaaatcccagaaatgcagatattccgtaatatgtgttgacattttaaatgcttatagagacatataacttgttcttaaaggtgtatgaaactatctctgcattggtttatttactgttcctataaggtaaagctgggggctaggggtcctgggccatacacacatacacacacatacacacatgccatatatatacatacacatacacatgccctatacacacacacacacacacccaggccacacacacacccacacacacacatatatatacacatacacacacacacacacacagaggccatatatatatatatgtacacacacatgccatatatatatacacacacacacacacaccaggccatgtccatatacacatacacacacacacacagaggccatacacacacagacatacacaccatatgtaaatacacacaggccatatatatcatgcgcgcgcacacacacacacacatatacatatttttagtggaaacggttccactatgttgcccaggctggtctcaaactcctgaccccaagtaatctatcctccccacttagcctccccaagtgctgaaattacaggcacgagccatcacacccagctgccttgccttttatgaaacagaccctcctcaaaaagcagaaacgtgagtgggtctagactcaggccagggagcgggaaggccgtagatccagctggccagtgtccccagatgatatgggccaaagcaagggcccctgtgcatgagctcctttgatctgtttctctttccttaaagtataaagggctaagaattaaaagaggtgtttgctttctcctttgcagttttgagagagttctggcccaaataatgttattgctaagaatagtatacttgaagacagcttgtccctgccagactaattttttctgatggtgtttctatttcacctcctcccaggtgtatcttccaacgtggtccccatgtacttaggggagctggcccctaaaaacctgcggggggctctcggggtggtgccccagctcttcatcactgttggcatccttgtggcccagatctttggtcttcggaatctccttgcaaacgtagatggtgagttcaggacatctcgggagcacccccaccccttcaccactacccttggccccctccttgtgttccaaagccaccaccacaggacaggactttctgcagactggtctcttctaacaggctggatgtccttggggggcccatcctgtcccgagccaacatagcaggccatggacaaaggcgcgataagggactggccagcgtttactatctagtccctcttaggagatggatgaggtggctttgagtgatgggcttccctgcctgctcagcagctgtccatatggaggcccgtggcatagcaatgacagccaccagtgtgccaggctctgtgcttggggcggacccagcatcagttcataggaccctcccagcaacgctgctgcctgggactcagtgattatcccattttgcagaccagaaagagaagtaccaggagtgagggtggcctggccccatgggggaggtggtgaggacatcccagaccctgcctccaccttccccaagacagcctggggcctggcatgcggcaggtgcacagacacctgtaaccggggttgtttttgcacgactttccctttaaactatcatcagtcatcccgtcagccaaaacataagccagttcccgccagggttctacacaccgtctgcaagtcagtcaagtggatcatcaagctctgtgctgcttagacactctctgtagaaagtgcttaccgtgagccaagtgccaagtcttttttagtaactcatgtattcctcagaacagccctattaagcctgtaccagtatcatacccattttgcaggtgcatcacaggtacagagagattggaagactggtccaaggtctcatgaggatgcagacccagcggcacagacctaggtccctgtttaagtaccacatgctcctgcctctccttcactcctgcatgtgttggggacacttacgccaaggcgccgcgttctcattaggagctgggaccagaagtgaataagccaggttcctgtctcagggagctccatagcaggactcagaaccacacacggccctctaggcatttgtgaagctctgtgcttcatttttttgctttgcctctagttttgcctttgcagtaccaatgcagccagcccatgtgtcccctctatgtggaatgttaacgatattcccactgtttctggtgtcctttctgtaatcagagctgccgtgaccattccagttcaggcatcctggtggcctggcttctctgggcatagagctgggagtgggcagttgggtcaggccgggtatgcccagctcctccagcccctgcaagactgtcctctgaaggacacggggacgttctcaccagcacatggtattaccggcctcgtcggtgtggtctgtctgatgggcgcaggggtgcgtcgctgctgatccctgctgcaggtgtttcccgagtgtccaccgtcgggagttgctgttcttagggctgggaaagctgtgccctcctggagcctgcaccccactcaggatgacggggctggggccggctctgcagagggcgccttcggggtggtggggaggccgctggtgccagctcgctgccttcctcccaggctggccgatcctgctggggctgaccggggtccccgcggcgctgcagctccttctgctgcccttcttccccgagagccccaggtacctgctgattcagaagaaagacgaagcggccgccaagaaaggtaacgagggctctggcgggggcggcctccaggttctgctccccagccctggtccgacggtgccgcttctccccagccctacagacgctgcgcggctgggactctgtggacagggaggtggccgagatccggcaggaggatgaggcagagaaggccgcgggcttcatctccgtgctgaagctgttccggatgcgctcgctgcgctggcagctgctgtccatcatcgtcctcatgggcggccagcagctgtcgggcgtcaacgctgtatgggccgggctgcggctcgggagctggggagggctcggggggcgcggggcgcaggtcctggggcgccgggcgtgggtcctggcgccgaggccgcctcctccgggcagccgcccagccccgcgcttgccttgcagatctactactacgcggaccagatctacctgagcgccggcgtgccggaggagcacgtgcagtacgtgacggccggcaccggggccgtgaacgtggtcatgaccttctgcgccgtgagtgtcctgggagctgcccacagcctccacccaaggcccctcgggccccacgccccagcctcggcgccgccaaaagggcagcccgtggccccaaaacgtggaggaccagccgctactacagaaactctgtgtgggaggtggccccgcaccagcccctcacacttggggctgccgagccgcaccgggcccggggccaccacctgaccgggatgtaggcgtgcctggaccaggcagcgcccactgctgggtggctccgagcccgggctacccggagtgaggctcggccacctcgggatgggagcaggctccgtgggggcagcgtctccggtgcatgcagacatctggcctcccgagggcaggaatcctgaggctcagggttgtgggattaggaggccctagagctgagtctcaagggtgggcagctggggtcccgcatcacagccacagccgacttcccgctggctgcccaagggcatgtcttgcacatgtgaatgtgagtgtgcgtgcacatgggtgggcacccggtccgcccagctctcctcacagctgccccattggagggggctggagggaggtgaagctgggcctctcccgcctgagccctgccaccctcctgtaggtgttcgtggtggagctcctgggtcggaggctgctgctgctgctgggcttctccatctgcctcatagcctgctgcgtgctcactgcagctctggcactgcaggtgaggacaggccagggtcccaggagcccggagctgcaccaggaagaccagtgcccctcccatcctgcgcctccacctgccttaaaataaaaggggtcacaatgagctgttttagcaaatacaactggccagacatctggggaccgtgtgtcctgccagctcatagcccacgttcagctgatttcccagtggctcatcgaggtggcactgctgggggaggagccaggtgccatcctccacccaccagggcaggttggccgccccctggggtcccgtcctagcttgtctgctccaggtgaaccaactgctttctctccacaggacacagtgtcctggatgccatacatcagcatcgtctgtgtcatctcctacgtcataggacatgccctcgggcccagtacgtacccaaagctggcctcagggtgtcacaaccccccctggtcccagaagctccgggctggagctccttagagataccagggatggccaatgcagcctggaaatggcatctcttcccccgtccaccgcaagggggtgggtggcacataatgagagcgaaatggtaaaatggtggtgtgggtgggaacacacagactgtgcaggcagcagagtgggcctaacgggtggttgctggcctgccatccctgtacactgccgtttgccccctacgtgctgccccacatgcccaagagtcctggagacgcctctgtcctggggccagctacctggtgggtctgcatggccaggcctgggatgctcgggcccgctctgccttcagggaggctgctctcctccccctacaggtcccatacccgcgctgctcatcactgagatcttcctgcagtcctctcggccatctgccttcatggtggggggcagtgtgcactggctctccaacttcaccgtgggcttgatcttcccgttcatccaggtgagtggggcccggggcccacgctcaccaccagatccccatgcagtacagtgcgagcccctgggcaaaccacgtcccacacgtgtcacctgcccctcttcccgcaggagggcctcggcccgtacagcttcattgtcttcgccgtgatctgcctcctcaccaccatctacatcttcttgattgtcccggagaccaaggccaagacgttcatagagatcaaccagattttcaccaagatgaataaggtgtctgaagtgtacccggaaaaggaggaactgaaagagcttccacctgtcacttcggaacagtgactctggagaggaagccagtggagctggtctgccaggggcttcccactttggcttatttttctgacttctagctgtctgtgaatatccagaaataaaacaactctgatgtggaatgcagtcctcatctccagcctccccaccccagtgggaactgtgcaaagggctgccttgctgttcttgaagctgggctgtctctctccatgttggcctgtcaccagacccgagtcaattaaacagctggtcctccactttgctggttcagccttcgtgtggctcctggtaacgtggctccaccttgatgggtcaacctttgtgtggctcctggtaacataacaacaacagttactatagtggtgagatggaaggaatcaaattttgccagagaaactaacttggtggccccgacaggtcttccggggccatgggcatttgtttagagccaaattcatcctcttaccagatccttttccagaaatacctgtctaggaaggtgtgatgtcagaaacaatgacatccagaaagctgaggaacaggttcctgtggagacactgagtcagaattcttcatcctaaattattttgttagtggaaaatggaattgcttctgtgtagtcaataaaatgaacctgatcacttttcaacaagacgtgctgctgttctttgagcaagtagaaggcaggaggaagttccctgctcattcaggcagtgttttttttgtttttatttttgcttttttttttttttttaagacggagtctcgctctgtcacccaggctggagtgcagtggtgcgatctcagctcactgcaaactccacctcccgggttcacaccattctcctgcctcagcctcctgagtagctgggactacaggcgcctgccaccacgcccggctaacttttttgtatttttagtagagactgggtttcactgtgttggccaggatagtctcaatctcctgacctcatgatccgcccacctaggcccctcaaagtgctgggattacaggtgtgagccactgcgcccggccacttcaggcagtttgactgcacgagtgtcagttccttgagggcaggggcttggtcagttttgtttatgcctgaatccccagcatctcgaagagggcctctggaggctgaggtgggaggattgcttaagcctgggaagtagaggttgcagtgagctgaaattgcaccctatactccagcctgggcaacacagtgagatcccatctcaaaaaaaatttttttaattgggcatggtgacacgcctttggggtcccagctatttgggaggctgaaatgggaggatcgcttgagcctgggaggtcaaggctgccctgagtcatgattgcatcactgcacaccagcctgcatgacagaatgagaccttgtctcaaataaataaatacatgtaagattgaggaagcttccaaatgtcctcacatatgtaatgaaatcttgaggagtcttaaaatcttgagactgtggtgggggaggaagggaaaaggaacagggtcttgatatggtttggctgtgtccccacccaaatctcatcttgaattgtagctcccataattcccatgtgttctgggagggaccctgtgggagataattgaatcatgggggcaatttcccccatactgttctcatggtagtgaatcagcctcatgagatctgatggttctgtaaggggtaacaccttttgcttggttctcattctctcttgcctgccaccaggtaagacgtgccttttgctttctggcatgattgtgaggcctccccagccatgtggaatggcgagtccattaaatctctttttctttgcaatttacccagtctctgatacatctttatcagcagcatgaaaatggtctaacacaggtctctccccaaaaatatagagagctggaggtttttcttagagatatgaataaagggtgtgagtgtgagtgtatgtgcaaaaatatggataaaaccttgaaagtgctgaatggcctgtagcaagaagtgatgtcttctcatagatgggtggcagaggctggtggccgggagagagagcagtgggacttgggagcactttttgtgggtatgtaatggagattccaccagcaacaagctaaaccactcacaagcgggcccagaggaagtaaacagaacactgtggttgaaccatccttggccttctgcagcaaggatctgcagcctggaaggggcacagaaacaaccaaagatgaaggctctcagagctgaggagaggccaggtcagaatatcagaagtcaagaaactgcagcacctctaacacaggggaggctatgaagttcatggttctggatgtctgctccctgggttcaaaccttggtcctgccacattagttgtgcaacttggaaagttacttggcttttttgtatctcagtcttctcttctgttaaatggcactaataataaatgtctcacatgtccattgtgagaattaaatgactttatatgtttttggtgtttggatcagtgacatgtatttagttttcttaggtacttttcagtgcttgggaataagcattaatcttgaggacaaataaactcacaaataagatacagtgagaggccactctgcatgtatactaggattgagcaatctag

SEQ ID NO: 137 - DNA, 18994 bp, Human
tctctgtatgaccattatttagcatagcgcttggcacacaataggtgctcaggaaatacttgttgactgacactcagctgtcagtttcctcacctttaatatcagggtgttttcgtttggttggttggttgtttggttttgtttttgagacagggtctcactccattgcccaggctggagtgctgtggcactgtcttagctcactgcagcctctgcctcctgggctcaagtcatcctcctgcctcagcctcccaagtagctgggacctcaggcatgtaccacattgctcagctaatttttaaattttttgtagagacaaagtctcactatgttgctcagcctggtcttgagctcctgggctcaagtgatcctcccaaagtgctgggattacaggcataagccactgctccttgccctaatatcagggtgttaatgtctgtctcataaatattattgtgagggtggagtcagaatgggagcaagccacagtaggtggacaataaatgctattattattatatggtcagagccaactgaggactgaggcctctccgaagtggcgacttgaggactgtttagagttggataggtttcatggaatagggagggcgttccgggagggaacagcctgagcaaaggcatggaggacagaactgtaaaggcagtaaggaaacctctgtggctggatgaagagtatggcttgggataaccctgtggttagaaaggcagactggggccagatcagggagagccttgaatgtcaacccaacacatttaaacttaatccttaggcagtagggagccaatgaatgtttttgaacaaaggtggcaaccgaagaaatagtattttagaaagttccatttgatatggatttactgtaattagccaggatcgtgccactgcactccagcctgggtgacaagagcaaaattctgtctaaaacaaaacaaaacaataccacaaaagcatgtcccctatcagtgaaaaaagaaaaagagttaagggtatacctccaatacagacatattcttttttttttttttttttctgagatgtagtcttgctctttttggccaggctggagtgcattggcaagatctcggctcactgcaacctccgcctcccaggttcaagtgcttctcctgcctcagcctccccagtagctgggactacaggtgcccaccacgatgcccagctaattttttatttatttatttatttattttgagacggagtctcactctgttgcccaggcaggagtgcagtggcatgatttccgctcactgcaagctccgcctcccaggtacacgccattctcctgcctcagcctcctgagtagctgggactacaggtgcctgccgccatgcccggctaatttttgcatttttagtagagatgaggtttcaccatgttagccaggatagtctcgatctcctgaccttgtgatccgtctgcctcggcctcccaaagtgctgggattacaggggtgagccaccgcacccggctaatttttgaatttttagtagagactgggtttcactgtgccggccaggctggcctcgaactcctgacctcaaatgatccacctgtctcagcctcccaaagtgctgggattacaggtgtaaaccaccgcacctggctctagttcttattttttgtgagaaataaagataaatacaggatccagtctaatgttttcttccacatcccattgacaaatgactaatcggcccctctcaccccaagcttctgggggcttctcggggcaggtggagctggtggccatcctgcaggctgctggggatctgagaagaactggagttgagattcttcccccagtggcctgggcctagcaggggagggtcgtgggctgtagcacctcccacagcgcggccaggcctccactccttgagcagggggaaggggggtgaagttgagccgagattagcaggagtcgggagggaggctcctagacctgcagagaaaggggtgcgataggcaaaggcaccatgcctctgcgggatgaaaccctccgagaggtgtgggcctctgacaggtctggaaggcccccagttcgtggcacctgaaccctggggggcctagatggagggatggggagtgggtgggatggggagggaaggggaagggagacaggctgatccctttgctaccctcagtgggcatgaagaagaaagcctgagcccggaggccccgcggcgccccaaacaggtatgccaccccacttggaaaggaagcagaaagatgtccccgctgtgcgtaaacccacgcagggtagggggtctaggggtgggacaggtcccccttagcagggtctgggggttgcatgtctggagatctggggggagaaagggctgtttgggggcttggggtttccagggaaggaatagggactttggagcattggatatggccacgatgcatggaaggggtcatcctgcctcactccaagaagggggctgcagttccccccggataatctgcggttatttctggcggctcaagggattagagggggatgggcgggcctcagcgcccccctttccttcctcgacctcctcttgacccccgttccgcagcgacccgccccggcacagaggctaaggaagaagaggacggaggcccccgaatccccctgccccacgggatccaagccccggaagcccggaggtgggcggggtgcagagcccgggtggacccccagggtgtgggctgcggaagggaggggcttgagggccggcgcgggtgtccccgagccctggaacggggtgggggaggagggggcggggagtgatgagaggggagggattggggttggggttggggttggggttggtgtagaagggggtggcgttggggtagaagggggtgggaagctgaatggaagccggggagaagtgttgaaagtggaaacccaagcccaggggagatccctagggtgaggagcccgagggggtgcgcccaggcttgggggtagcgggtagaggcgctgcctcgcggacccgcggatgggaccctgtctgaaccccgcatctcggctcagctgggcggagggggaggccgcgggaggagccttccccagacccagcccaggcccgggcgccgcagacggtctacgccaggttcctcagggaccccgaggccaagaagcgcgacccccgggaaacctttctggtagcccgtgccccagacgcggaggacggtgagagagggccccagggacgcgggtgagggggcggtggagctaaggagagaaggggctggctggacgggaacggcccagagaggcagaaaacaactgtagtcaaatagcccccacttttctggccttatctttgagccaggtattgtgctaagcaccaactatgagagggtgctttgttccccccctccaccattgtacagatggagaaactgagtcatagagccgttaagggtttttgccttaaccagcagttaggagccagaagtagcccagatgggtctgactcaaggtcagaaacagacaaggtcagggagaagcacagtggatgcagggagatggggaaaggaggcaaggcgagcgtgtaaggagaggagggtctcaggaggagagagggagggcatttccccaggacaggattcctccaaccccagccactcccctgatttgcagaccctgaaggctgccagtcaccctcattcttctgggaaggtgccaggtctccggttcttgtttcagaagggcaggctccccttctggtgcccatgcaccacttcccagcagtctggaggaactgggctccccagataaggagggcccggctcaaacccccattatgaagagtttctacctgcagaggaggaggaggaagaggaggacgaggaggacgaggaagaggaggcagaggaaaagaaagagaaaatccttctgcctcccaagaagcccctgagagagaagagctccgcagacctgaaggagaggagggccaaggcccagggcccaaggggtgggtgctgagggtgctgagagagttcacagggaagcagaacagccctgtccttggagggcttggcgtctcactgagacacagcgattgaggcctcaaaatgaacccagtgctgtgaccggagggtttttcctctgataatttctccccacgatggtccttaaggacacagaccaatatatgcctccacccctggccccactgcccctgccccttgagctctgtgaggcagaggaggacagaggattctagttttctttgtgatttttgtttagtttttgttttaactcagtggaaattgttatcatttttataaaagtatcaaagtgattacagtaaaaagaaatcaatgaatcaatgctgtgatggtgtcctggcctgggcacattacctgttagggaccagcagcctggcctagagctaggaccttgggcctctgaagcagagatagcacactctgtagtggtgaccagagaaggtttcctggaggacatgggacaaaaggcaggattcagaggctcggttagaaggcctggtgttcattcattcgggaactgcttgttaagctcctggtctttgtccagagcttttttggcctcagggaaagaaaaaccaaaatgagcagaagtcaatacaaaaattagccaggggtggtggcgcgcgcctgtaatcccagctacttgggcggctgaggcacaagaatcacttgaaccctggaggtggaggttgcagtgagccgagatcctgccactgcattccagcctgggcaacagtgagactgtctcaaaaaaaaaaagaaaaagaaggcaggctgtgggcccctgtcaagctttcagcctccctggggactataggcaggacaagagggttggaaggcagccttcagccccagtagacaccttctttgcctgacccccatcttccatttccaggagacctgggaagccctgaccccccaccgaaacctctgcgtgttaggaataaggaagctccagcaggggaggggaccaagatgagaaagaccaagaagaaaggtgagcccagcctagggaggaacaggggactccagttgcggtgggggttgtgacgctttcacatccacacatgcagggtctggggaggccgacaaggacccctcagggagcccagccagtgcgaggaagagcccagcagccatgtttctggttggggaaggcagtcctgacaagaaagccctgaagaagaaaggtggatggcaagggcttctggtgtggtgacatcttgaggtggtcctgggggcggggagctagagggtccttacagcatacaagacagtgctaggtaaggagtttgccgggtctagagtcagacaacgtgcagggcatcttgacccccgctttgatagctatgcggtctcaggcaggtgtcttagcctttttgggctctaataataacatggggtcgactctcttgtggttgtggggagcatccaagtgagacatgggtattggaagcactttgcaaaccagggtgaggagttcacagccttgtttccccctccacgctcaggcactcccaaaggcgcgaggaaggaggaagaagaggaggaggaggcagctacggtgataaagaacagcaatcaaaagggcaaagccaaaggaaaaggcaaaaaggttggggcccagaggggcagggggctgaggtcccttcagggagcagaggcaggggcctggacttgggagcctagagggtgggggcttggagccacttgaggttagaaccttggctccccctcttgtgacaggatataaggacaaaggaaaccagatttgtgcaaacagaggaggcgtttgtggggtcaccaggctaggactggccatgcaagggccttatgtcatctgggctctctgaggcctcccctctggagcataaccatcagacagccagagatgtccccacgcccccaccatgttttctgtgccagggaggaggagcacacaggcagagaggcagatgagtactgactgacagtcagctgcaccggttgttaaaatgtttccaccctacagccctgagctccccaggcgctttcactcaccttacccaggacctcccaacctcccagcaactaaacactccagcaacgaaagggttaatactgcccatcaggagcctccctgtttctcctccaagcttaccagtatgcatctccatggcgaacaggttgttaaatattttgaatattgcccctgctcccaaacaggactcagacaccaacacacaaaagctggagtaagcaggagagggaggtccaactgacagaaagtaacaaaagtcttcaaggaacaggtttctcccagtgggaagatcaccacgaggacagggcctggattttagctttgtaggtttattagtttgtgcaggagtggtcaggtctagggggactgattcacattaaccaagatcaccagatgctgatgtacaaactgaaaggccagtttactgtctcccagaggggaatgtaactgcagaacagccttcagtacagtaggctcttgaaatttgcagctgctgaagtgtttgaataagttctggctttctccacatcgtgttccaaacatagtcttttgtttcccaggtttcttctggaacaacctagagtagagaacaggtgatcacttgtccctgagctgagggttcactgctctacatcagcctccctcaaacacactgcaaacctgtgctcaacaaaaacagccatggccaggcaaagtggctcatgcctgtaatcccagcactttgggaggaggaggcagatgggtcacttgaagtcaggagttcaaaccagcctggcgaatagtagagatggtgaaaccccatctctactaaaaatacaaaaattatcggggcatggtgatgcgcacctgtagtcccagctacttaggaggatgaggcaggagaatcacttgaacccaggaggtggaggctgcagcgagctgagatcacgccactgcattccagcctgggcaacaagagcgaggctccatctcaaaaaaataaaaaataaattttaaaaaatggccaaccacagcacatctttgtggattcttcgtggctcccaaatagcattgaaccctcaaatgcacacacccaggctggcagtccatgcttgcctctgttggaaaagttgggcttagactcttggctcccttcctgtgagggatagaacatgaggacaaagggcaccaggtttgtgagaacagaaggggctgttgtggggtcaccaggccaccctagggctttatgtcaccaaattgttcttaggagtttctcaatgagcaaagtgagcttacatattcattcatgtgttaactatgcattgctatgtaacaaatcaccccaaactgagcatcttaaaacaacatttactttcttattcaatttctgagagccagaaatctaggagtggcttagcagagtagttctggctcagggtctcggaggaagctgcagtcaaaatgtcagctggggcttcggtcactctgaaggcttcactggaaatgaaggatccacttctaaaatagttccctgtggtaggtgttagctggagatctcagttccttcctacagggacctctcctggaggctgcttgagtgttcttttttttttttttttttgcttgagtgttcttatggcatggcagccaacttctcccaaagtccaagagacagagagccatatagaagccacaatatcttttatgacctaaccttggagtggcccatgatcacttctgccatattctactggtcacagggaccaaccctggtatgcagtgggaggagactacacaaaggcacaaataccaggagacaaggatcactgggtgccatcttatgataatgaatatcatcttgactatggtattcattatttactatacgctaacaataagagtagcagctaacacttccatagtgcttagaacacagcagtccattctgttagccccacttcactgcctgagacagtgtgcaaaggagggaaggtctttctaaaggctctggacctcataggagattggacaaaactcatgccccagccccacctcttactagttatgtgaacttgggcaagtgacttaacttctctaagcctcagtttcttcatctatacaatggggatgactaccgcagtggggtgataagaggatgaaatgagtaaatatttcgaaagtacttgaaactatggcaccctgatagaatttatgcaagcgtgtgttaaatacataggtaaggtctgtcccaggtatccacccctactatacctacttctcagatgagaaaattgagttacagtgtggtgaaacttaacagtgaagacagttagtagtgaaactaggatttgaacctagacagtctggctccagagtgtgtgctcctatccacaagctaagcagaatcaaaataaatcacagagctccccagagcctcctaacttggccgtgccgggctgccagggagcatgaggggcagtggcttccccgcctccagggatgcggcccctgctctagccagcctctctgttctctccgcacacagaaagcggtgagttgtcctgccgggctgcccgtgtctcagcactgggacctgctgggagcgggggagctggtgctctggggctgatgtaccctctgcccccacccagaaggaggagagggccccgtctccccccgtggaggtggacgaaccccgggagtttgtgctccggcctgccccccagggccgcacggtgcgctgccggctgacccgggacaaaaagggcatggatcgaggcatgtatccctcctacttcctgcacctggacacggagaagaaggtgggtggggagaggcagcagaggagggagtgtggagggatccggcatgggggccacgggacaaacgggcctgatttctccctgcagctcacctccaccccttcccaccttctcttcccatcctctcacctgtctccccttttccccaggtgttcctcttggctggcaggaaacgaaaacggagcaagacagccaattacctcatctccatcgaccctaccaatctgtcccgaggaggggagaatttcatcgggaagctgaggtggggctgggcttcctggggctggggggacttgggtcagcaaaaggccatagcccgtcatctctgtcctgctgtgcctggtagagcacccaccacagtgggcaccctggaaacgtcccctagcctagggcctctcgctttgatgtacatagatcatgtggggagcttgttaaaatggttgagtgtgtggggtgggcccgggagtctacatttttaatgagcacccaggcgatgcccacactgctgccagcccagggcctcacttggagcagggcataagttccacgagggcaggcactgtgcctgccttgtttagggctgaattcctagcactgaacacatattagctactcaacaagtatttactgatcaagtgaatgaacatatattcagcactatcctgtgctgtcttcccatacatctcatctaatcctcaccacaaatctgagagctgaaggaaggggatgcctgagtcaggccttatttcttaaatgtatgtatttaggctgggcacagtggctaatgcctgtaatcccagcattttgggaggccaaggcgggtggatcacctgaggtcaggagtccgagatcagcctggccaacatggtgaaaccccgtctctattaaaaatacaaaaattagccaggtgtggtggcatgcacctggagtcccagctacctgggaggctgaggtgggagaatctcttgaacccaagacggggaggttgcagtgagctgggatcatgccactgcacttccagcctgggtgacagaccaagaccctgcctcaaaaataaatgaataaataaatgtatgtatttaacaaaacttttataaggcctatttatgtgtcaggtgtgattctaagtcacttccaggccaggcgcgatggctcacacctgtaatcccagcactttgggaggctgaggcgggcggatcacaaggtcaggagatcaagaccaccctggctaacacagcgaaaccccgtctctactaaaaatacaaaaaaaaaaaaattagcccagcgtgctggcaggccctgtagtcccagctactcaggaggctgaggcagaagaatggcgtgaacccgggaggcggagcttgcagtgagcagagatcatgccactgcactccagcctgggcgacagagtgagactcagtctgaaaaaaataaagaaaaaaaaagtcacttccaaatgttaacccattcaatcctcttattgtccaaatgagggaaatgctgttgctcagcccattttatagatggggaagttggggctcagagagtttaaataccttgcctaagatctcacagctagtaatagtaagagatggagttgggattttaacactgcctagtctccttgtagattcagcccttttttttgttttgttttggagactgggtcttactctgtcgcccaggctggagtgcagtgatgtgatcaaggccatggctcactgcagcctcgacctcccaggctcaagtgatcctcccaccttagcctcctgagtagctgggactacaggcacatgccaccgtgcctagataatttggcaggtggggggcagagggcgggtgttttttgtagagacagcgttgtctgccatgttgcccaggctggtttccaactcctggactcaagcgatcctccctcctctgactcccaaagtgctgggattacaagcttgagccaccatgccctgggttgggccagcatttaaaaagacctctgcatagggggaagcctggggcaggggacatgaattgctcagtcctaactcacccccacccttgtaggaagctctctaaactgcttggctgtgtggaaggggcctggggcagggatgtaggatcccctcagccccaccccaagctctaccctgcttgcaggtccaacctcctggggaaccgcttcacggtctttgacaacgggcagaacccacagcgtgggtacagcactaatgtggcaagccttcggcaggagctggcagctgtgatctatgtgaggactccacctgtcccccatgccaggctgctccccttacaggggctggcctcacaggcatctgtttccttcccaggaaaccaacgtgctgggcttccgtggcccccggcgcatgaccgtcatcattcctggcatgagtgcggagaacgagagggtccccatccggccccgaaatgtgagccccgcacctccctggcccctggctccctatgtgagaaacaggagtcggggctcagcttaggaaatagccaactccctgagcacatccatcaccctccaacacaaattcattctggccacctagggaatggacttgggctttttgtaattgaattcactgaaaaaccacaatgggctttttggttgtttttggagtttacatcaaattcatatattacatccattcatatcttcattgaccacacatattgagtgccaagtattatcctaggcacctggaagacatcagtggacaaaacaaagatctgcacccctgggccaggcgcggtggctcacgcctgtaatcccagcactttgggaggccgagatgggcggatcacgaggtcaggagatcgagactatcctggctaacatggtgaaaccccgtctctactaaaaatacaaaaaaattagccgggcatggtggcgggcgcctatagtcccagctacttgggaggctgaggcaggagaatggcgtgaacctgggaggcggagcttgcagtaagccgagatggtgccactgcactccagcctgggcgacagagcaagactccatctcataaaaaacaaaacaaaacaaaacaaaaaaaccaaagctctgcccccctgaagctggcattctagtgggaggagagtgacagtagacaataatcgtgataaataagtaaattatggagcatactggaaggtggtaagtgctatggtgaaaaatgtcagaccaggtgcagtggctcacacctgtatccccagcactttgggaggacaaggtgggcggatcacttgaggtcaggagttcgagaccagcctggccaacatggctaaaccccgtctctactaaatatacaaaaattagccgggcgtggcagtgggcaactgtaatctcacctgtttactcaggaggctgacgcagggagtattgcttgaacccgggaagcagaggttgcagtgaggcaagatcacgccactgcactccagcctgggcaacagagcgacactctgtctcaaaaattaaaaaaaaaatgttgccagccatggtggctcacgcttgtgaccccagcattttgggaggccaagctgggcagatcacgaggtcaggagtttgagaccagcctggccaacgtggtaaaatcccgtctctactaaaaatacaaaaattaactgggcatggtgacaggcgcctgtaatcccagctactcaggagactgaggcaagagaatcacttgaaccccggaggcggaggttgcagtgagccaagatcacgctgctgcactccagcctgggtgacagagctagactccatctcaaaataaataaataaataaataataaaaaataaaaagaaaaaatttaaaaagaaaaaagtcaaacaggggaaggtagataataagtgtgtaagtctcaatattaaatatggttgtcaaagcagacctcaatgagaaggtgagggagtgagcctacagatatctgggggaagagcacctgggcagtgggaagagccagtgcaaaggtcctgtggcaggaggggccctggtggactggaggaaccaccaggtgaccagtgtggctggggggagaggaggtcagagaagtgaggggtagacagggtctttaaaactgatttttgctctgagagaaatgggaagctacagcagggttttgagcaaaggagtgacatgacttgtttttgtttttgtttttgttttgagacggagtctcgctctgtaacccaggctggagtgcaatggcctgatcgcaactcactgcaacctctacttcccaggttcaagagattctcctgcctcagcctcccgagtagctgggattacaggtgcataccaccatgctcagctaatttttgtattttcagtagagacgcggttttgccatgatggccaggttggtcttgaactcctgacctcaagtgacccacctgcctcagcctcccaaagtgctaggattacaggcctgagccactgtgcccagccttttttttttttttttttttttctgagaccgagtctcactctgggtctcactccagcccaggctagagtacagtggtatgatcatgacttactgcagcctcgacctcctggcttcaaacagtgctgcttcctgcctcagcctctcatgtagctgagaccctaggcacatgccaccatacctggctagttttttgtagagccagggtctcactttgttgcccaggctggtcttaaattcctgaagtgatcctctcgtctcggcttctcaaagtgttgggattatatgcgtgagccactgtgcttggcatgacttgtattttaaaaagcaaaagttgttttgcgtgtgtgtgtgtgtgagtttaagatggagagatgttctggagagacgtgtcagtcccgtgctctgctctttagcactgcaggtccagtgagtccaggatttaagagactctgggtgactcgcatgccccatcctcacaggagactgatgtcattttactcatttacaatgaaagataataccccgtcagctgatcacacatccttccctgctggaaagtcacggcccaggctgatctgcagggcaccagtcatgggaggctcagtcttgagggttcactcagcctgtgggccccacagttgtccttcctatgcctggaataaacacacaaatcccccagaggcagcatctcctgcccttgtttgggcccagtaagaaatgcctggtgctgtttcgggtctctcttttgccaattacagtgcagtgggaggaatggtaagagcaaggtgtcatggaaactcagagctgagacatctaaatcagatggggggtcaggaaggcttcttggaggtgatcttgagtggactcactctaatccatgaacgtgagcaggcgacaaggaaactcaagaaagaaagatcttaagggcacattatacagaccctgctccttcctttcagaaactctcctccaagtacactttctcttaactgcaatttacctatccatctccccagctcaactgtgtgccctttgcaggtccaagattggctcatcctgtcattaggtactggtgtgtgtctgtctcctaagaccacctgggtaccaatggcatggagcgcctatgtgccagatgccccttgccattttccagccctccgctttgacatcccagagacaaagccccattctcacagatgtgaaccctgtccacaaggatgccacagatgccaagcctattctcagataccctaatggatgaagatgtccaggccacacccctgtgcacacatgcccaggccccttctccggtcagtcctgagccatctcagccatctctaactgtcctctccctgtctactcccctggggcaccccaggctagtgacggcctgctggtgcgctggcagaacaagacgctggagagcctcatagaactgcacaacaagccacctgtctggaacgatgacagtggctcctacaccctcaacttccaaggccgggtcacccaggcctcagtcaagaacttccagattgtccacgctgatgaccgtgagtacctgagggcccaggtctggctcttctccaccacccccaggatgctgaccttcattcaagctcccctcaccccctcacacacacacacaccagcctttatcccgagagctgggacatcccacagggtcactctctcctccataggcactgacactgtgctctcaggagcctcagatattctaagcaggtgtcttggggctcatcacttcaggttcccattccagcattggccagagcagtgggttagatactgggacattctggataagattgtgttgaagggagggttggctcctagagtctgaaaaccacggacagcccaactcctctttgttcaaagagagtgctgaggctcagagagggcagccctttgcccagagtctctcagcaacttcaggaagttacactggccctcgaaatttatttcacaaaacttacacagtgtttactatgtgccaggcactgttctcaggattttacagataactgaatcattaaatcccttcaacgtccctgtgaagagtgccattattatccctatttggcaggaaactaaggcacagagaggttaagcaacttgcccacggtcacatcactagtaggaggtagagctgacagtctggatctccagtggccatgctcttaatctcttcaagatggttgccttttaggggcagggaatattaagcatttttgagtgcctactctgtgtcttctctcaagtgaggtcaaaggactaccctggaagactcagggaaacaaggtgtccctgttacaagccttggttggaaaggcttccttcccactagggtgaggaagtttggggatggaagggtatctcccataagtctctgggttcacagggttggaccaacattgagcgagccccaactgcatcctagggatgtgcccccagtgccacctgtcctgtggctgtgggactgctctccagatcacgtttctggtggagcctcgtccacctgagtttgggggtatttttagcaacttcctgtccctatggatcctgggggaggtgctgaggttggggctgggaacctggatcattgaagggagaggtgcccagtgaggctgaggaagggaaccaggggctagtcaaggggtggagctggggtctaaggtgggacttcgtggctggggataggaggaaagactgtggccagaaacaacagagaatttgggaaggaagaatgctgggcttggataaatttgacagggtcctatagttaatcaggtgcgggctctaggcatggcctgtggcagcagcagaaaggcaaggtccctgcccccaggagattatagtgtgactgcaaagccacgtggtgctggtgtggagtgagatagaagaagggatgggtgttgagtaactgagatggtggctgagggttggagccccaaggcaagggacagactgcccccaaggttgagggcactgtctgccaggatgggggtccaaggaggtctcgggccgcccccaccccgtcttgtgtccatagccgactatatcgtgctgcagttcggccgcgtggcggaggacgccttcaccctagactaccggtacccgctgtgcgccctgcaggccttcgccatcgccctctccagtttcgacgggaagctggcctgcgagtgaccccagcagcccctcagcgcccccagagcccgtcagcgtgggggaaaggattcagtggaggctggcagggtccctccagcaaagctcccgcggaaaactgctcctgtgtcggggctgacctctcactgcctctcggtgacctccgtcctctccccagcctggcacaggccgaggcaggaggagcccggacggcgggtaggacggagatgaagaacatctggagttggagccgcacatctggtctcggagctcgcctgcgccgctgtgcccccctcctccccgcgccccagtcacttcctgtccgggagcagtagtcattgttgttttaacctcccctctccccgggaccgcgctagggctccgaggagctggggcgggctaggaggagggggtaggtgatgggggacgagggccaggcacccacatccccaataaagccgcgtccttggccaagcggagcggtggttcctcagcgcgtgcggagaacgaggcggcaggaggcgtccgaggcgcgagctggaagtctcaacccccgtcccactcctgcccaggccccgggcgctcccgcgtcccctccccgcgcccgtcgcgggtcctaccgaaactcggcggccgcacagcgtcgagacgccccccgtgggggcccggggagccggggcgaaagggagggtcccggaggtcggggaagagggagaaagggagaagaaattcgagaaactagccacgcggggagaaccagacaaaccgggtcccggcagggcgggcgcagccgccagggcggagccgggtctggggccccgggagtggggggcaggcccgcgagctggagggtacgctccgccttggcggctcgggactagggtggaggggccgggagccccggggcccgtgcgctccggctctgccgggctcctcgtgacgcggcacccacggcccccggcaccgacgggagccctgcccgcgaggcgagggctccgccctcggccccgccccaggccggagccccaaattccggcgggtgcccgggagcggggcgaggcccggagcgcagggggaggaaggcagctccgcacgggcgggcgaggagcggggcgcccaggcgcgcgccagccggggtggccgggtcgcgaggccgcggggtaggcggcccgagcgcggctggacggccccgcccctcccggccagcaccgccccctgcgcgccccgccccctccttcccgcagcccccacccccgccccggctcctcaacacaaactttccgtcccgctcgctccctcctccgcgctcggcgcctcccgctccagcccggctcattccgcacattccggccagccccctccccacgaccccccttccccggccccccttgcggctccctcgggcccggcggagcggcccggccggagcgcccccgcgagctcggaccaggtaagccgggcggacgccgggaggaggccccgctcgggagaggtggtttggttggtcggctgggctggctggggggagcgacactcgagggggactgggtccccgagctattgtccagccggagctggagccccggatcggggtgccgggaagtttagagggaagggggaaaatctctccgggaagccccgccccccgccctccccacccccccgcgacggggacgagttggtccgggaaggtggggaagccggggagaccgtgtcccctgtgccgtcgcctgtcccgccgtccgtgcttggggggtcggggcggggatccgggggccgcacagtgtggagggcctgcctgccaccctggagctcatatccggggcgcccagtcccgggccccgccgccctttggactcccggcccgcgcgctcccggagcccgcccggcctcagctccacgcaggcctcgggcccggcctcccagcgcccaggccggtttctgcgcgcggtgccgcggctgcgctgggttgtggagggtgtctgggaccaaagccgcgcgccccggccgtgtgtcccctgagaggcagggaggggctcacgttcccttcagttctgccgcctgcgtcggggtgctgattcagagttccagccctgagcgctgtgagcttggctcggaggggtctggatttggggccttttcttccccacacttgctcagggcccttgtttagacttgacaaggtttgagggtggctggtctcccgcttcctaccccggtccccaccattgtctgtcatgccctttattcctgctaggggagggagggctgggagcgctggtctggatctgttttccagcccagctgggccctggggcagtgtcattgagaccccgctctgtcaactttcctggtgaggggccctgatccagggctgagagattctttcagtgcgagggggaaggaggccttggggcggacttctcaggggctgtcttcttctgtgtcttccctctttccaggtaggggca

SEQ ID NO: 138 - DNA, 7928 bp, Human
ataaaccattggcagcagagggaatgttattgaatatttgtaatatctgggggacaacccaaaccaatttctttttctcttaaattatagcatcaaaaaggagccatttattcaaatacgtgtgttctgtttctaacagagcaaattcttaagagggcagaaatatggtttatttttatgatatacatattgcctagtttactgttggattttataaatagtaccctttgccatatcaaccctagagcaagggtgaactgacattccattctttcagagagaaatgctgtatttctctcctcctctccctccattcctctttgcaaacctggtcactcctttgataattcacgacccatctccaccattaagagtctaaaatcctagtcaagtaataactggggtggtgggggagagagggagagggagagggaaagggagaaggagagggagagagagagagagacttgaggaggttgcacttacactccggcagtttttccagaaatgagggaggcagtagttcttacttttgtgatgtcaacttgtagactgaaatgcatcaaagctcctcttcttcttcttgttgacgcgagggatgtgaaatgtgctctagaatatgcattcagcgtggtcctttgttctaggtatgagcttttctttttctaaagtttttcggtctcgctcaaggaaaggaaagcaatattttgagattcttttaaaggcaccttccaaagcatttcccacagaaaaataccttcacagcccaacactggttatttcagtaagaatcgagtccaattttttccaatatggctgtatacattgcaggcccccaaatttgtgctttcatagtcatcgttaatcaaataggcagaaacactgtatttagggaacctgtgtttcgtgggctagaagtgcattctgattaataaagatcatgttcattttgaatgcatcgctgttattcgtgtgcctcagagtcgcgggcttctgtcaggggtgcagcgggctcgggagtgcctgcagagcggtgggaagcagttctgagcgccctggtcgtcaacccgttttcagggggtgccgacactttctcccaagaagctcgatccgccgccttgtgcggctggaaagaatgaaccagactgtgacaggaacagagaatttatgtgattgacagggagtaccagggcacccgactccatcccgggtcaccacggctctgggatttgcacgagtttaccaccaccattaacagctatttgcgtaaggttgtttaccgcctgagagcgccacaagccgacagcgaagccactttgggaccccagccacgccccctctcccctctcccctctcacccctccctcccgccaaactaatgatttcggggctgccttcttgccggaccctcccattggctcctatcccaaccaatcagagccttgcaacagtttcacctggctcccgcttcccaaataaacaaacaaactgtcccgcgactgtgcccgctctgcaccctggcgccgcaggcaggcactgcttgcgctacgccccctcccaccacctcccaccaatggggccccgactgtggcgccctctcccgaccctgatagccggccgctttctcctccgcccctccaggccttctcccgccccctcatgccttcctggactccctgttagaatcagcttggccagagagcccgcctcctcctctcggtcctcccttggcccacaggcctggagattgaccgggaggatttggcacagccggaggtggctccgcctcccgagcccgccgtctcctcccttgctcacctctactggtggccgctcgcgcccctccattgcgccggtagcaggatccgcagcggccgccgcgtgaggctgtggtcacgtgttgttttgcccgctgtcgtgcgctcagagtggagtgggcgggggcgcgggccaaggcaggagggggctggggcgggcagacgagggtagacagcctcttcccccaaccctccctttcctgaattccccctcctcctcgctcaccttaaaaccatcgtgcatcaccatggcgagttgctccttcactcgcgaccaagcgacaagaagactaagaggtgcagcagcggcggcagcggcagctctagcagcagtggtgaccaccccgcttctttcctcgggaaccccgaccgcactcattgggaccgggtcgtcttgtccgggagccatgtggctctccacggccactggctcccggtcagactccgagtccgaagaggaggacctgcccgtcggggaggaagtctgcaaacgcggctacctgcggaaacagaagcatgggcacaggcgctacttcgtgctcaaactcgagactgctgacgccccagctcggctggaatactacgaaaatgccaggaagttccggcacagtgtccgcgccgcggcggctgcagcagcggcggccgcctctggcgccgcgatccccccgctcattccaccgcggcgcgtgatcaccctataccagtgcttttccgtgagccagcgagcagatgcaaggtaccgacacctcattgctcttttcacccaagacgaatacttcgcgatggtggccgagaacgagtcggagcaggaaagctggtacttgctgctcagccgcctcatcctcgagagcaagcgccgccgctgcggcacgctcggcgcgcagccggacggagagccggccgcgctggcggcggcagcggcggcggagccacccttctataaagatgtgtggcaggtaatagtcaaacccagggggctggggcacagaaaagagctgagcggcgtgttccggctgtgtctaaccgacgaggaggtcgtgtttgtgaggctgaacaccgaagtggccagcgtggtcgtccagctcctgagcatccgtcgctgtggacactcggagcagtatttcttcttggaagtaggcaggtccactgtcatcggtccgggagagctctggatgcaggtcgatgactgtgtggttgcccaaaacatgcatgagctgtttttggagaagatgagagccttgtgtgcagacgaatacagagcccgctgccgcagctacagcatcagcatcggcgcccacctgttaaccctgctgtccgctaggaggcacctgggcttggtgccgctcgagccgggaggctggctcagaaggtcccgctttgagcagttttgccacctcagggccatcggcgacggggaagacgagatgcttttcaccaggcgcttcgtaacacccagcgagcctgtggcccactccaggcgaggaagactgcacctgcccagagggcgcaggtcaaggagagcggtttcagtgccggccagcttttttcgccgcttagcacccagcccagcacgtccccggcaccctgcagaagccccgaacaatggagctcgcctgtcttctgaagtgtctggttctggctctggcaactttggggaggaaggcaatccccagggcaaagaagatcaggaaggaagcggaggtgactacatgcctatgaacaattggggctcaggaaatggccggggctcaggaggtggccagggctcaaatggccaaggctccagtagccatagctcgggaggaaaccagtgttcaggcgagggacagggatcccgaggtggtcagggctcaaatggccagggctcaggaggaaaccagtgctctagagatggccagggcaccgcaggtgggcacggttcaggtggtggccagagacctggaggtgggcatggctcaggtggtggccagggacctggagatggccatggctcaggtggtggcaagaactctggggggggcaaaggctcaggaagtgggaaaggatccgatggtgatggtgaacgtggaaaatctctgaagaaaagatcctattttggcaaattaactcaaagcaagcaacagcaaatgccaccacctccaccacctcctcctccacccccaccagctggaggaactggtggaaaagggaagtctgggggaagattcagactttatttttgtgttgacagaggagccacgaaagaatgcaaagaagccaaagaagtgaaagatgcagagatcccagaaggtgcagctcgaggtccccacagagccagagcttttgatgaagatgaggatgacccatacgtgccaatgaggccaggggtggccacccctcttgtaagctccagtgattatatgccaatggctcctcaaaatgtctctgcttcaaaaaagcgccactctcgatccccttttgaagattcaagagggtacatgatgatgtttcccagagtgagcccaccacctgctccgagtcctccaaaagcacctgatactaataaagaggatgactcaaaggacaatgacagtgagagtgactacatgtttatggctcctggagccggtgcaattccaaaaaaccccagaaatcctcagggtggctcttcctccaaaagttggagctcctacttctctctaccaaacccttttcggagctcacctttgggacagaatgacaacagtgagtatgtgccaatgttacctggaaagttcctggggaggggcctagacaaagaagtctcctataactgggaccccaaagatgcagcttcaaagccttcaggtgagggatcattctcaaagcctggagatgggggatcaccttcaaagccttcagatcatgagcccccaaagaataaagctaagagacctaaccgactttcttttattacaaaaggatataaaatcaagccaaaaccacaaaagcccacacatgagcagagagaagctgacagctctagtgactacgtcaacatggacttcactaaaagagagagcaatacaccagctccctctactcaaggactaccagattcgtggggcataattgctgaacccagacagtcagccttttctaattatgtgaatgttgagtttggagtgccatttccaaatccagcaaacgacctctcagatcttttaagagctataccacgtgccaaccccttatctctggacagtgctaggtggccacttcctccccttcccctcagtgctacaggtagcaatgctattgaggaagagggtgactacattgaagtaattttcaactcagcaatgacaccagccatggctcttgctgacagtgccattcgctatgatgctgaaacaggtcgaatctatgtggtcgacccattttctgagtgctgtatggatatttctctctcccccagccgatgttctgaaccaccacctgtagctaggctgctgcaggaagaagagcaggagagaagacgcccacaaagccgttctcaaagtttctttgcagcagccagagccgctgtctctgcttttccaacagacagcctcgagagagacctttccccatcctcagccccggctgtcgcttcggctgcagagccgactttagccctcagccaagttgtagctgcggcctccgcgctcgccgcagccccgggcatcggcgcagcagccgcagctgctggatttgactccgcctctgcccgctggtttcaacctgttgctaatgctgctgatgccgaagcagtaaggggagcccaagacgttgccggtggctcgaaccctggagcccacaacccatctgcaaaccttgccagaggtgataaccaggctggcggggctgccgctgcagctgccgctccggaaccaccacctcgcagtcgccgggtgccaagacccccggagagagaagattctgacaacgacgacgacactcacgtgagaatggattttgccagacgtgataatcagttcgactctcccaaaagaggtcggtaattttagaattaatttccctaaagtgaatggtcattgtctaatgattcgatgcgctacagtctacagtgttagggatactatttcattaactggtgctattcgacatggagtatagaattcagttttaattattcacaaatgcctttttgatctttgcaaaaatttgtttttatctaatcaatttctttatctggacagaactgattatcatttaaacactggttctacttttttaggagtagttaaaacgcagacataaaaagcataaggatacttttaaacatccttccccatcatttaatgataatgtaaagcaggatatcgtaaattgggttccaccaactaattttcaaatcaacaattaaaagctgcttttctgcaaatgcccatatttaagtgtaggaatttaataagagcacagactattaagcagtaataatcaactatttatgtttagggaggataattttctcctctgaaagttactttttaaagagcagtcgttgttgtgctagtttgctgtgatttaccaagaaagttaaatctcaattgttaacgtgaatgtctggggggaacaaaacataaataatccaaaacaggaggtgattaaaagaagacagtatttggctctggaatgtgtttgtgtgttgattttctttttgtttttacacaggataaattccagaaaccttgagtgttccttttctctgtcactagtaatgacaggcaagtcacatttgctgtgcctcattttcttcttttaaccccccacccttctaaaagagggtgtggtgacaacttgagaatggatatgaatattatttcaaaggtttaaaaagcagttaaaacatttaattcatatatcttatgggaaatcaaggaaagcaagataaggctggaggaagacctgactccaggggcagcttaccctggaatggtggaagtttttaaagggctacttttccaaaggaagaagtaaggaagagtaggagctgtcagacttggaaacaagacttagagtaattctactgtgtacaacattgtggaatgttgtcatcagtgtgtcttgaaacattttcaagagatgattgcagaggatgatgtctccatagtctcaactaccttgcctcttaagtagaatatgcttctttcccagtgaagggaagggatggaccccagcagttttcattccagtagtcagtttagtgaagatttttgctttgcttgctttgtggaatgcttttgtgattggatctctgcccactgtgcttgatcaggcagaacaagtcgggcactgatcacaacagtcacctaacaagctccctatttaatgcaggtgtagcccccccacatcccctttttctccctgctatagaaaacttgccatacacaaactcacatttgcagcgtggacacattaaagagtgatcattaaaacaacaaaaggatgctttggcttgccaaaggattcaattcagacctcttttaaactgtgagttccctccccaacacacacacatacacacacacacaaacacacatgatcaccactgctaccataatcatacgtttaaaatatataatttcatttccaagtctttaatccataataagattttcaagagtagatctactttattctgtagaatatacctgaaaattgatctcaatctattgtttgagtctaactattgaagacaccatttataattttgatgtagatgatacacagttgcctgtgtccctgtagtactttcaaaaggaccagttttcatagaggtttattttaagaagtttaagatttaaatagtgaaatcttactgttccttgaataaattctgacttcccaaggaatacctagacacaatgatcattattttagcataaattcctgatttatgactttgtagctattttggagatttaacattctgtaaatgcattgtttattgaggaaattcctagctttattgagtgactttagcaaggaagctctatctcacagggaggcaggcgcttaggttgaaataagagaatcaacgtggaagcactttggaatgttaaagcactttacaaatgtaagatattt

SEQ ID NO: 139 - DNA, 5833 bp, Human
gctagtgcaatggccaccccttctttctccctctgctctctaaatgtccttgaccctcaacttcccaacaatgacttcccatccctcacttccttcctgtgtgatctccttctctggagatcccttactgcctttctctctttgcagccacctctcaaatcccagaagccaggatgttacatgtgcaatttccctgcaaggtgccttaatttggttttcctaatggcatcttaaattcaacatgtccagaatggatcagtgtcttccctgaaaaccaattccatctcttgaccattttctctaagtcactggggctaaaatttagagggccacttatttctgacagctccctccccacatccttgggccctccccacatccaatcaactcctgtctgaaatgtgacttgtaaccgcccctcccttgccattcccactgatagcactttacttattacttgttacttcttgctgggccacagaaacggctggactcaccttcctgtctctggtttatgtgccattcagagaaactctgagacatcacctgacgaatcattgtgatgctcagcttgcaggatcccacttctctactcagggacccccagtacttccccgttcttactgaataaagtccaaattctacacttcagtgttctagccccttatcacgtgggcggtgaaacctttggctgcatctcggacagctcatgggcaggtcccctctgctgtcacacccagagttaggaaggcctcaaattcactccctgcacacttgcttccctgtctcctggcaaactgctttctctttgttcttaactctgcctgggaaaatcttccccatccttgaaggcctttctccactgttacccctgcatgaagacctcactgaccccccaaaaagtgtttgacccagaacactttggcttttgcttataatatttacctctgacttggggcacgtgtttcattctctatttgagtgtatgctctttgagggtaggaatgagtgactgtctggcctaccctgaatcttgactctcatgaatcaagttttataaattgactcaaaataataagttagagttacaagaataaggtggtaacggtggttttataattcagaaataatccttttaaaaatgtaaaaaatactctaaaaaagtcagctgtagaggtttgctcgtggttgccaaggagcaaagactttcagagagcttaactccagtgggtttgagcctctttctgattaaagcatcagtgccaatagcattggatccctccaagaatgtggtgtttgggactttaccatcatttgtttgtggaattgtgtgtaggtctgaaaattcaggcctgtggggaactaactttgaattttgataaatgactttcgtggtcagttcgggtcacccagctacactctgttgtgtatattttggcacatctgctcttgaaagatatgattatatgtaactccaacaaatatatcaaaagtgtgttttaatttttttgccttttagatttaatgaaccagttcctaagagaaccctacatgtttctttagaagacctaaccaattgatactgcattatgacaaaccctctaccagaatttcctcattcattcaaaattatgtttaaacccataatgtccacattctttttttttttaacatgaggagacatcataagaaatgaaacaacagtttgagtcagggcaacagagtccaagtttccttccaagaggccaagttgttttagcagaaaaggacattggcgccaaaacccacactaggtccaccggcagcaaacacagaatggtgccctcactctaggaagctggctgttccatatttttatactagatttaaggtttaaaatttcatgttggtgttcataaatgcaaacacacaagccagcaaagaaaaaggagagttatttagtttatattttcttctcccatcctttctctctctctctctttctatgcaaatgtttcaatcacataggtttgaccaaatagctgcgtcttacaccattctcctctatgtaaagatgtaaagcaactctgcacttttttttttttttttttttttaagacaaagtctcactctgtggctcaggttggagtgcagtggcacaatttcggctcactgaaacctctgcgtcttgggttcaagcgattctcctgcctcagcctcccgagtagctgggattacaggtgtgtgccaccacacctaatttttgtatttttattagtcagggggttcaccatgttggccaggctggtcttgaactcctgacctcaggtgacctgcctgcctcagcctcccaaagtgctgggattacaggcctgagccaccccgaccggccatgcacttggttttgagagcagcacagtggcggtctgttctccctgcccgcctgctccagggagaggagttgcttgctcccttacagccctcacctcccatgggaccctgcaggtgctgagggctcaggcgcagctgctgccagtcgtcacagccatctcatccattccagagttgtaaataggctgatgattccgttttttgttcccagagctgtatatccagtggcctcctggagtcacctactgggatggctgatgatctccaaaagtgtcaacactgtcccaaactgagcaccccgccccacagcagagccccgccccagcgcctcctgttctggctctatggcaattccctcttcccagcggccgcagcaagagtcgggtcccctgcgccctggcccagcccctgccgcccctgcctggcctggatgttggcaatggtggtttcccagtgccctgcccccaccctttcccttacccctttcagcccgttccttactaagaagccaccgcaatgttggtgagaaagtgggtcagatgtgccacagccttaggccgcttcaaagtctaaccacgtcctgaaaaccttctggtttggttcccagctcctgctccgatctcgcctctatttgaaaaccaccatccccacatcggccacctctcagtcaccccatcctctggctcacccccgagaccgctgccaattggggggacccgtccatagcacggatggcgctgcttccggcacctgcgccgcccgagggtctcctggccatggcctgggggtgccaggcagccgtggccaccgcatcctccctcagtgctccccacggctctcaatgcgctccccaagtgctgaccacgcgcgcccccacggctccccgacagctccgccacgccctccccacggctctccacgctctccccaagtccccaacggctcccccaagcgctgcccacgctcccccacgactcccccactccctctccacgtgctccccacgtgctcagaggagcctggacaggtggatccgggttgccccggggactcattcaggggtgagcacaccttgtacttttccctcgttgtttccctccttcccctcctggaaatgcctcctgcggaaaccactcaaacccttgtctcaggaccatggcaggggtctcctttcttacagggctggctgcttcctcagtcaaggcttctttggctatttacttatctaaaatgaaaactccagccatattctcagtatttcatagcctccttttccatgttgttctcattctttaaagtactacctatttcacctacttgtagtgttctctgtatccctctcctaccagaatgtgacatggacggtaatgtcagccttcttcactcctggttaagcagacttgagaaaagggcctggcatacagtaggcattcagtaaatgctttgtgactctgtcgagaggtgacagcatgctggcagccctcacaggccttgctcgctctcggtgcctcctcggcctcggcgcccattctggccgcgcttgaggagcgcttcagcccgccgctgcactgtgggagccccctcctgggatggctgaggcaggagccggctccctcagcctgcggggaggtgtggagggagaggcacgggcgggaaccagggctgggagcggcgcttgcttgcgggccagctagagttccgggtgggcgtgggcttggcgggccccgcactcggagcggccgggcagtgaggggcttagcacccgagccagcagctgcggagggtgcgccaggtcccccagcagtgccggcccaccggcgctgcgctcgatttctcgccgggccttagctgcctccccgcagggcagggctcgggacctgcagcccgccatgcctgagcctgcccccgcacccccgccgtgggctcctggcggcccgagcctcccctatgagcgccgccccctgctccacggcgcccagtcccaacaaccgcccaagggctgaggagtgcgggcgcacagcgtgggactggcagacagctccacctgcagcccccgggcgggatccactgagtgaagccagctgggctcttgagtctggtggggacttggagaatctttatgtctagctaagggattgtaaatacaccaatcagcactctgtatctagctcaaggtttgtaaatgcaccaatcagcactctgtgtctagctgatctggtggggacttggagaacatttatgtctagctaagggattgtgaatacaccaatcagcactctgtatctagctcaaggtttgtaaatgcaccaatcagcaccctgtgtctagctaatctggtggggacttggagaacctttgtgtctagctcaggattgtaaacgcaccaatcagcaccctgtcaaaacagaccaatcagctctctgtaaaacagaccaatcagctctctgtaaaatgggccaatcagcaggatgtgggtggagccagataagggaagaaaagcaggctctcccagctagcggtggcaatctgttagggtttgtgtctgtcgtgtggaagctttgttcattcgtcttttgcaataaatcttgctactgctcagtctttgggtccacactgcttttatgagctgtagcagtcaccacgaaggtctgcagctgcactcctgaggctagcgagaccacgaacccaccgggaggagcgaacgactccagacgcgctgacttaagagctgtaacagcttaccgctaaggtctgcagcttcactcctgagccagagagaccaggaacccacctagaaggaacaaactccggacatgccgcctttaagagctgtaacactcaccgccagggtccgcagctgcattcttgaagtcagtgagaccaagaacccaccaattccagacacactgtcatcaaaaagtgggatatctttttaaacagagataacattgcagaatcttggagttggaaatagacctcagctggggtttagtcctgttttctcctcagagcagaagtcctgggatgccgttctggactgattgtcagttttttctcctgtccttgagctattctaatgccagacattcgtggctttacacagccaggctttcagttagagaacttggttagctcaggtcaacaaatgctgctctgagaacactgactcccatgtggggagactctgcacctggagctccgggagagccggctcaggcctcttcctgctatccagggaactgcagtggcgttggagggccttgctggggctggggctggggagaagggattccaaccctactgataattcgtttggaaacaccgggctgtggatttcagaagttcttgggcagcctgattaccactggcagtgagccggggacgaagccgaagctatgagtgacagacggaaagaactgggggctttggtgaaccagagaacacttagctcctccagccctga

SEQ ID NO: 140 - DNA, 160274 bp, Human
ctgctgagaacaagagatgtcaggtgtcattaaagcttctgtgaatgaggatgaagaacttgtctccagactttgtgttttatggaaactatacattcatattttggcatagaatagaccttcattctccaagtatctggaaatatttttaaagaaaatgtccacaggtgatctgtaaacaacacacctatgaaagatttgcataataaatataacccgttaattgtaactcttttgcctctgccgtgtctggatggtttcccatgagcgacatgaacagaggccactttcttgacacggtttgcaaaccgcgtgggcaatgaggaaccaaagaatatgttttgttcaaaaaggtcgattttaagaaaaatagtatatgatctctctcctttgtcctcatttctaaaacagccaacaacttgtttttcaaagaacctttcagcaagatattcagaaggagaaaactgagaaagtttagtaaatccgatctaaaaagaaaaagaaaaaaacacctagccctttgatctccctggcattgttattacagccttaaaatatcagccaaccctctggtaggaaaagaaaaatcttacggattaagtaactatttatctcacgatgataattacttgtttgacctgaagtcactcattcctgaaaccacgagttaaattgttgagatgtttttaaaagccggcgctctggctatatttctggtgaacaaatgcctgaccaagaagatcagcgcatctgggacgggtctgagacccacttctgcaagtcgaaagctaaagggtatgggagggagaaagggaagttttccatcaaatacatatctaaagaggtacttaaagactaaaaccacaggtagctggcacggatgggaacggaaaaccattccccctcctcttcccagaactcttgctgagctaggtggtcaggagcgtcatggtagaatataaccccagaggcccaaggtgcagtttgaagaaacggtggcggcttcccctagtggtgtggcttcagagctgctcctaggaagccatttaattccctttaatgatatttccagccgttttctggacctcatgagctcaggatgaaatcagcattctagggtcagcaggcttctccctgctaccacgtgtccagaagcacttccacaagccagggttgacatcgcccaagacgaggcgtgacccggggcgggggaggggacttcgcccgcgtcgcgtgaaggatgccctggccttgggctgcaggcgcggacccccgggggctccccagggtgtaggaggcggagactgatccgctctagccccgagcggtccagcgcggggcgactcgcccgcatagtggagattccggcatgaggcggcggcagtcaccgcctggctgccccgcggaggcccgggagagccgctgcggtctcgggaggccgggctttgggacttgctggcccgaccgccagtcgccctggggccttgggaacagggaaatgcgcgcgccgaggcggtggcggcctcgctgctttcagttttcattgagtctgctggttactgtttaacgtccccacccacgtttcagtttgtttagtaaatcgatcggactgtgagagtcaggccgctgccctgtcgccattgagcaaagctaatattctcccagcatatggtctaaaatctttgctagagatcgggaaaaagaaacaaacaaacaaacaaacaacaacaaaatccttaagcttcctctcccaagtccccccatccccacccccacttcccacctcctcgctttcagcaaacttcccagcctgggaaaagtgcggcgcgggacagcgcggcggggtgggtgggggacctgctgccgggagatgcggcggcggccgcgcggctgactgcgactcgggagctccgggagcggcccgcgcaggtaagtttctccgccgccgcccggggcccgggctggccgcagcgcaccgccccggcggctgccgggcaggaggagcctcggttcccctcgggcggctgaaggaggggctgagcctcaggacccctaggccaggccgtgttgaaagcagataccccgaggcctcgcccagcctgcgctggagggaagaaggcgctggaggtgcggcagcgggcagtggggggaccggggaattgaaaggtgccagtcctctaccttagaaaagaaagaaagagagaaggagagagagagagagagaggagagagagagagagagttgtatttgtttgggtgcagagaaagctttggtggctgtagcgggtcatgtgattcccaggtctctggggggtcttccgtgtaagtacttctgtggcctggggcaaggccaggacaaatggatgttcgtggaccctggaggtctgtgggtaggtgcttggtcctgcagcatcaccccatgcatggcctttgctcaagtctcagcttccatccatctctcatggacacatcttgggagtgggcatctgccggtgatgccgttgggggatattttaaatatagtattgagatcttcctagttaactttgggatgaaatgtcctttggaagcttagttaacaacgtgccagttaagcaataaccgttctgtgtctaactgaaataagccagcacgtgataagatcttagaatggaatgaatatatgtgcttcatacctgatgatctgtgcttataaatcttgctcggaactgagtcaaagcactgtacaacaagcaaaacaatcagcatgagttttcacttgcgggcaagggcaagagaatacagaatccagaagctcaaaagtgaatgggatgtcccggaaactaaacactcattgagagcaccatttcctggttttgtttttgttagtttcttctgctttctcgttaattttacaggtttcccttctctctttagaagcggttatttgtcattaaacattcttcctgtctagctgtcaccgtttttccttaggagtcctcctgtccccacctcctcaccaccactccctctcttttcatgtcctgtggatactctcactcaagccacctgatctgctgtgtggtcgaagtaggtgaccaagtagtgttgggctctttcctggtatcacttgaaggtgtggcaaggagagggaggtggtggtgagtggtggtaaactgctcatttttcacttttcaaaatggagtggaaaattgagagccgtttgtcttcccatttctcctaagctccagttatgggcccacaaataaggacatttttccaaagtgctttatgaaggttcaactcttttagtaaagtgtgtttattaagatctcacaaatattgcatttttaatcacggttataggcatatgggatagcgcaaatttattttagggattgctaagattaaaaaaaaatactcctcatgcaaataataagtatttgtttttgagtgccctggtctttttttttttttttttttttttccgagatgaagtcttgctctgtcacccaggctagagtatagtggcacaatctcggctcactgcaacctctacctccccagttcaagcaattctccttcctcagcctccagagtagctgggattacaggcgcccaccaccacacccggctgatttttgtatttttattaaagatggggtttcaccatgttggtcaggctggtcttgaactcctgacctcgtgatctgcccgtcttgacatcccaaagtgctgggattgtaggagtgagccaccccacccggcctgtttttatttgttttaaattcttgttttttctataaattctgaaggtaatattttctcataaaacaacatcaaaatcgtagtaaaatagaaaaagagccccctccccattccactccatgtagtgtaacttctgttgatgtttgggtttgtgtttctctaatctctatgtgtataacacagacagttttattgttttaaaatttgaatggttcatatcatactagtattctgaaatttatttttctttaatatttttcaaatacttatctgtcaatatatacagatttttttttaaatgtgtctacccaatgtaaccagccagtgtccctcagaatattcgcttggatttttcaatttctaagtattacaaacaatgatatgaatatctatgtacattatctttgcatgggtactgctgaatatttattctgagaagagaattgttggcaccagggagatgtttgatagatattgccaagagcctttctaaacacccacagtatatttcttgtaccatgcttgccaacactatataataatgatttatttagaatgttgtcaatctactgttgaaaaattgattcctcattgttgggaattatataaaccagtcccagaacatctgacttggggagttcgggaatttttctttaaaaatataataaaatgggaatggaattaaatacacttgaatataccatcttattctgagcttgtaaaagaatctaccgcatttgttactaactatccatttactgaatggctggagatactgatacatgataatgagcatttctagattgcaaacatgtggaccatgtttgcaataacaacatgttgcagttgtgattttgtggtttgtaactacatgttttccttccaaagagaagattcacacccctagggcaaaagtatgattttaaatgaggtgttatagctctgggtcctttaaaaagttatccatgcaaatgaaactgggtatgttgttgaaacaaacacagtcttgcaattacttctctccaccatcctcaaaggtatttatacctattggtgtcagtcctgacactcatatagagacataaggaactctgcaaatatggcttactcttattcttatgttttaaagaatacgcacgcacacacacatatagatcaggtaattcttattgaatacttaatatgcactaggtactattgtaggcaatttatatgccttttgctttttagattcttataacaatcctgtgctgttcatattaacattcttcctactttacagacggaaaaagtgaaccagagagaaatgaaataacttgactaaggttacacgtttacatgggatagagctggggattcaaatgaaggcacgtcagctctaggtcgtgaacgtaactatggctgctccatgtcctcattgagttgcttgctgcacaaaggtgcctaactgagcagaggaacggttgaaacctttacactacccacaaaccaaaccatgtccctttgttcttggctgaatattccctggggaaggcacttttctaggccacagaatatctgtaagaggtatcagcacccttgctgctgttggataatttgtaggagctacacagacctattggtttccatatgtatctttgtaactcaatactatttacctactcattatgggtagaacttaaataacagatttgccttattgcctgttcttccctaccttatattttaaaacatgttgacagagtatgctctttacatgatagaattagctgataacatctgatgttcccctgaaaaccttttattttatcaagatggtttcctggaaaacgaatagggagttcactttttttctttttgtgtgacactcaacattttgaagaacatgaaggtctttaaggatgactagcttcatgggaagctgcgtggtgtataagtcacaagggcaggcctcgttgtcagatggcaaggtttacatcccagcccagttattcactaaatgggaagggaggggtgcttgggcaacctatcctctttgaggtccaatttcctcatttttgtaatgtttgcaattataatacctatgccatataattggtagggtaattacatatgctaatccatgggaaacatttagaacagtgcctggcacattgagtaccaggtatgtgttctgtgttgctgttcttatggtagagtgagataatgcatctacagcactgcttgacttgttgtaagttcttaataggtgttacttgtttttattgatcttctctctagagattattatatttatatacacaaagtacttataacttcagaaaattgtggaccgctggaaacctgtccaagccctctaataggccttggagatgtattgatgaataagaaagagagtctctaatttcttggagctttcagctaagcagtgtagagaaaaatcacaccaagtatagttccatggctggaacattggctttggagttattcctacctgtgtgcagatctcaattctgccgcctgtcagttgtatatcccagagcaagtcatttaatgtttcttcagattaaatagctatgaaatgagaaaatagttcttactttcaaagtacatatggataaattcttgcattatttaaattaagcattttgtctgttgaatgtttgacacttcctacactctatttcagtatagaagaatcatatttataaaggataacaaaaaaattgacaagaaatctaggcagcttttcccccatctcatttaaaagtatcattatttaatagtaggatatcatttaaaagtatgataacacctggatctgacaatttaatgttttaagtattttgaatctttgttcccgtgggcttatgcactgtcttgtgctttgcttatgctcttggctgactgaagattatggactgtgttttagaatttttttttttgcattttcttatttcagacatcatagttacaggttccaaataaagttaatatatattattttagcaggaattaagttatagggtctctacacggtacctggaatacaaatataagtatcactgcaaacagtgataatctaccttgaagacaaacataaggtgacactattatattaggataacagataattataattagtataataccgtggaaaacagaagcaaaaagggtacatttagcttgagtagcctggagatatttcagggaagtgttaatgacttctgatgagaacttgctgagtagagaagaattagaaaagtatttggggcagaggagatcagacttgcagtaggaatagtagcaagagatgaagtggggaaggaacactgggccagattctaacaatattgaatgtgggtaacaaggattggacaatgtctgcaaggcaccgggaagccatcacaatctttaagcaggttgagttaagattttttttcttaagattgactggcagcattttggaaaatgggttaaagacagaaagaaagggagaggagaggaggacaggagagggcaagggagggaaggggaggggaagggaggggaggggaggggtggggaggggaatagtgagaactacgatagtggccagtggcaatgaaggtgagaagagattagaatctgtaggtttcaaaggtatttaaactgaattgatcaattatagaatatgtaagatgaaggagtgagagagattgaaactgacctacatttttatatttctcagcaatgacttagaaacaactctttcctaaagttctcctgtctggctggggatacctataaaaaaaaattattggctgggtatggtggctcatgcctgtaatcctagcactttgggaggctgaggcgggtggatcacttgaggtcaggaatttgaaaccagcttggtcaacatgatgaaaccccacaaaaaaatgagcatgggcatggtggcgggcgcctgtaagctcagctacttgggaggctgaggcaggagaattgcttgaacctaggaggctgagattgcagtgagccgagattctagcattacactccagcctggacgacaaagagagactttgtctaaaagatttaaaaaaaaataaaaaaattattattcaccatgctaagtataattgttgagtcctggggaagtattattaaaacctagtgaaaagccaactcacttttcctggagtaggttaagaaattaaatataaattctttatttttaagtcaggtttattgagatataatttgcaatcagtaaaacccctttttatgcatgtgcttcagtgagttttgacaaatgtatgtagttttgtaaccattaccacaatgaagataaagaacatttctgcacccatccccctcaaactccctgtgcctttttgtaatttttccctccactacaccccaggcaaccaccgatctgatttccgtcattaatgttgccttttccaggataatatataaatggaatcatatactatgtacccttttatgtctttttttttaatttagcataattattttgagattcattcatcttactttgtgcatcaggagtttattcctttgggggagaaaaaaaaaccttggatttatgaggtgttattgacataccataaacagcgtatatttaaagtgtacaatttgagaagttttgatatatgtatatacccatgaaatcaccacagtaaagatagtgaatatagccaacacctccaaaggttttctaaagctcttttatacactctttctcctgttccttgcattcccttccttccctgtcccaaagcaaccattgatctactttctggacctgtaaattcatttgcattttctagaattttatatccatggggtcacacagtattattttgtgtctggcatatttcactcagtgtaattattttgatatgcatttatttggttgcatgtatcaatagttgtttttaaaaatattttttgctaaatagcataatgttgtatagatattctgcaatttgtttatccattcacttgatgaacatttggcttgtttccaggttttggctatcacaaataacgctgctatgaactttcttgtatcaagtcttggtgtgtacacttacatttgtcttatatgattacctaggaatagaatggttggatcataggcaaagaattaccaatctggtttccagagtagttgtcccattttacattcccaccagtagggcttgagagtttcagtttctttacagcctaaccaacacttggtatgatcagtcttctaattttagacattctaaaagatataagatatttcattgtgattttaatttgtatttccctaatgactaatgattctgaacatcttttcatgagcttatgtaacataaatgattatctttggtgaagttttgttcaaatcctatgcagtccccttcttttaaaaactgagttgtttgttttttttcattatcaagttagaagagttctatatatattatagatatcagtccttttcaagatatgggttttgaaaatatttctccccacatgaatttattcttatacaagggataggatttgatcaagagaaaaagggtaaagatattatattcataaatgggaatagcatgtacaaaaaaagaaataaaaaattggatttatgaggcctcaatatggagtaaaatagaaaaaggtgatagaaaatgagttttcaaaaataaagagtagcctgaatataaagacttatggaatttagactctttttgtgagcaccaatactaataaatatcaatacaacaacaatagttatactaagaattgagcattgcagtttatagagtgtttttatatacacggtctacagtgtttccccctggatcaatttgctttagtcctgtgacaactatgtgaaggcgcagagactcggggccatgtgaagtcaatatcaaatataggtttttggggtttaagccaatgccttttcaaccagtgtgtgcacgtgtgtgtgttggggggtggggggcatgtatatgtacatttaatggagtgtgaggaaagaatgacagctggattggtctacaaaggctcagaagggcactttcccaatagggcaggggagagtgtcctgctgagctctggcaggtggtacaataggttctgataaagtttgggttgtatacccgtactttaaaaatgacaattcacagttattatagaatggttcacaaaaatttcaaaatctcagaagatattttagattctgtgaattttttttagttgtcttttatttgtaacctgaccctagataaataaagtaaaattatatgttagttaatttgttaagacaaaaataatgtgatcaagttcttttctttatttttaattttgttgttttatttttaatgtctcatgggaattcaaagaacttactttttcaaacacagtccttttgttcagtatattctgatttcattgtcttgctcagggctctgccctgacttttttctgcatacggctgacatgcaattagaacatcagatcaacttcggaaacatgaataaaaattacctgctgaatagactcatgatttggacattttcttttttttcttcagtttttgaacttacttggaagctttgaaatgtcctgatttgctgtgttttcaaaattttcacccatttttaactcctataggttctttttatggtaaagtaccagtggcttataaccgagagaaactgaagtctacttgccagtgtgtggcttctccatattaaaatgctgtacccttaaaaggaaggtaaaaatgattttaatagtaattatgtttaatatgctcatacacattactgtatgttatttgtgcctcttttgtgtgatcagttcaaaatcactttaagaaaactgctgaagtattgtacagcatgtctatgtagacttcgcatgggacctgccattttctcacagataaacctagaaggcttgagcttcttttaaaataaatttgcataatcattctgtttatgttcatattacttaattagtttggggtgatgaaaaacacatgcaggttttggagttaaatacacgtgattcaagcctgcagctttgagcatgttagcaaacttcctgaagctctccctacccagtttactgtacattgtgagacataaataagatgacatttaaagtgctcagcatagagtctggcaaaaggtggatgtacttaataaatgtgtaattgcttgctatcttgactcttctttatattaatatttctatatatttattccgattactgtaggtttggtacacacacatacgagcatgtgcatggtcgcacgcgtgtgcgcacacacacacacacacacacacacgctgctgtgactagtcagcattctgttatttttattttttatagatgagggtcacccaggctgaagtgcagtggtatgattatagctcactgtagcctcaaactcctggcgacaagtcatccttctgcctcagccttctgaatagctgggattacagggagttaacatttattcagtttatgtgtgctagatactaaatgcttcacatatattaaattgtttaattctttcaataactctatacggtataagatattgttatctccactatgctactaaggaaactgagtcaaggagatgttatgaatacccagtgagactaaataattagtgtaagcattaaataggaaccaaggccattcgtctccagagcccagtttcttctgataataacttaaatactaataaggtcttatgctattaatctcatctcagtttttacagtatcttctaaagctaaaaatgaaataaggtaattttatttttctcctttgtgttctatcaattatttatatgaagcatatgaatgatttcactgaattcaatttgagcatctattaggtgaaaataatttaactgatatttcatgtgtaaataaacaatacggcagattgacttctgagacgtgttagaatagattttgtaaaaccctgaacatgaaattttaattgaaactaatttatgaaatcaggaataaaaatgataatagtcacatatttgatcaaatagaagctggtgcttatggtattaatttttatctagttttgcacgataaattttgaatacttagttaattataaatgtgtgtgtgtctacacacacacacacacacacacacacatatattttaggtaggagtgttagtttgctagggccgccataacataatgggccacgtactgggtggcttaaataacagaaatttatcttttcacagttctggaggctagaaatttaagattaaggtttcagcaggcttggtgtcttctgaagcccttctccttggcttgcagatggctgcttcctcctggtgtcctcatgtggccgcccctagattggtgtgctgtctgtgtcctgatctccttttataaggacaccagtcatattgtatgagggcccaccaacttgacttcatcttaccttagttatttctttctgaggtactactgggggttaagactttaacatatgattttgggagggacacacagttcagccaataataacagggcaaccataaaatggttttgtctcattagaagcttggatgttttaaatcttccttacagtctatgcatatatttgttttcgactatcaattaaatcaactcggttcaaacatctagaatcaaaaccatttatgtttacttgtagaaagctttcctctctcctaacagtcatatcctcatccacactttcctcatatttggccttagtatattccccctttgacaagtccttctggctaggacaaatggcaaaattgatgtggcttgaggatgatatccggagtcactgaatatatagaaagaagaatctttcatgaataacctagtgataagtctctctctctctcttttttttttttttttttttttgagatggagtttctctcttgttgcccaggctggagtgcaatggcacgatctcagctcaccgcaacctccgcctcccgggttcaagcgattttcctgcctcagcctcccgagtagctgggactacaggcatgagccagcatgcttggctaattttgtatttttggtagaggcgggttttctccatgttggccacaccgacctcgaattcctgacctcaggtgatccgcctgcctcggcctcctgaagtgctgggattacaggcgtgagccactgcacctgcctgtgataagtctcttgttttttaaaaaataatttttgcctgctacttatgtacaaaccactattttcccatcatggcctttgagtcaatgatagtgttttgattaaatagcagcagagggaagttctgtggacatgcatgtttgtgtccctgagactatcagaagttaaacaacaatgccaaagtaagctgaactccaaagcaaggcagatactgtgtttgcatttgggagaaaccgttttaagtatttctttgaggcttttgtactctgctcggttcaggtcctcatacaggcatttatgtatcaccttaatttataaatggtgagttttagtaggaagcattgaatttacacaaacaataatccagaggctactaaactgggtacttctcttgaatcaatggaaagaaaaacacagcaaagcacccttcatgctgagcaaaagtttcaagatgtcagacccattccgagggacactatctatggtggcttcccctctgtcctgtttgaaagagataaatacacataagcctttaagatacaaagggcagtttctgtatttgaagttatgcattacactggtgatttcagagtttctcaggtaaaatcctaacaactgtgattgcagtacaagctccatgattcacgcccaccaacacttcaatgtcactgacaatgtaattgcagctcatggatgtttaggagagtgtgctcactccagtgcgtctgttttaaaacagcgagtgattagttgtgttatggctttagccatcttgcaataaatgtattaggaacagtggtttattgatttagataaatgtatcaggtcctagctatttaacttctttgtgctttagtttgcacatctctaatatgggatactaccacttaactttcataggattcctgagaatcttcagttgaacaacatatataagacaacactcagcaccatttctggcacttggtagttgcttaaccaactgaaatatttttttgctattatttttaatttcctcttatgatatcagaactaggttaaaaaaaaaactcccaattttttgcttaaatcaaaagccaggagtcttcttaatttctgtcttctccttacacatcttatctaattcatcagtaaattagagatctgccaatattaacttcaattgggcctcacattttctacttatctttatctctactgctgctatgttgtctgagccaattgtgtacgtggacaactgctgtaagtctacgaactgctttctccgtaaccacattgctcccttcaaggaggacattcttaaaacttaaataagaatatgttatcttcctgcttaaaatcatctgattggtttctcattgtactaggaataaagtccagactctttcttgcggcctatgaggtgtttgacgttccggcctcagccgtctctcttttacctcttgcaactctctttgacccctgaagttttagtcacatctgagttttcttcattctcctctaattagtcaagctgttttttatcccagggccttccttcatcatttgtgttcaatattccttccaaacccttccccgatctcccacacataaacatcatatgaatatattttatcctttagttctcagtttctgtgagtttcctctgatttgtacaggtgtcttttttcatatttattgatgattggagataactgagtagacccagctgactgggaggtctcagcagcagacggttgagtggatattgtcacagaaggccaggcagcaagaggagaaaggaaattaggatgccgagtatttaatgaagcaaaacaaacaaaataactctgactcattctttacatataacttgaaaatgtaaattacatgacgtaattatttttgtttagattaagatatgatgattactaagaagtgctagttgaggactctaaagcagtactggacaatgaaagtataattcagcctcatgtgtacttttagttctcttatagccacatcgcaggtaagtagaaacaaaggaaagtcactttaataatctattttatttaacccaatatattaaaaatataatcatttcaatgtatagccaatataaatgtacaaattattaatgagaaaaaacaaagcaagcaaaattattaatgagatctttcctgttcctttttcatggtaggtcttggaaatctgtgcattttacacttgcagcacatctcactttctcgcagtcacagttcagagctctgtgaccacatgtggccagtggctacctagttggtcagtccaggtctaagggttatttaaaggaagtttaatctgcaccattcctttatcatctgggatgactttttattcaattttgtgacaatttaactttgaattggttttttagattagatataccagctttctattttcaatgacttttaaatagatgtatgggaaaaatattttctggcatttacgaaaaacctatcatctctatcttaattatgtttgaagataaatagggttgacaggggttagtttacactggagagttgacagtgctgctagagtttctgcaacttttaagatttatgtaagaggcagtttacacggaaattgcacatgcaagtggttcacaaacttgagtgggcatcagaatcagctgggaagctagtaactctgaagattttttggcttcaccccgggactcagtaggtctaggatggtgccgagcacctgcatttgtagcaagtttgcaggtgctgctcctgctagtagaggccactgctggcatagaccatctcgtctctccacatgcacggtgcacgtggagattgccttgagcaacagggcatgtttttcttctttatatggttgatgatgcagaccctggaaactactcttttttcatttgtttgtttctatgtgtgtgtgcgcgtcaggtggagggtagatggagaaagttacttacctgttcattatgctgttgtgttctactttgagaaaacagtagcaaaagaactttaggggaaagataacaacaaaataaatttcagagaaggaaactgagatcagtgggcaatacaagctccctagtgactattccatatatcttactacttatgctgtgaggggcggggaaataggaaggtattttacctttacagtgtctattttctaggtccagatgacagactattagtgaaataataatagctctgttgaatactcaaccaaaagctagtattttccccacagtaatttatctgttttctagccattatgatatccactaagttctaagtgttaaattagcttttaggctcacatggaaataagtaccattgtttatatgatcagggcagtgcttgttcagctactgtttcatgttggatttctgcaaagctgcaattgtgtgaatcaggcctcagtgaatactaggtaaaattaatgtcaaatttctaagtgatgaggaaaatcattatcaaagtaaatatattaactttgtaaggctatagattttaagtttttttaaataaaggctaaatttaggaaataatccagtgaaattaatctttcctcctcatgttctctgaaaacttatttctctgctgcattatctttttttttttttgagacggagtctcactctgtcacccaggctggagtgcggtggtgcgatctcggctcactgcaagctccgcctcccaggttcacgccattctcctgactcagcctcctgagtagctgggagtacaggcgcccgccaccatgccccgctaattttttctatttttcactagagacggggtttcaccgtgttagccagtatgtattatctaatatttattgagcatttattatttacaggcactgctctaaatgctttatcagcattaattcatttagtcctcataacaagctgataactatattattatcattccgattttacagatgggtgttacacaaccagttaggagcagagatgatattctgctgggcttaattgcaatattatatcttcctctgtgagattcagctgtcttaatttgttctttcaacacttggtctttcttccttgacctcctattccataaacttgtaccaaactatacatccatttgaaatatttttggcctggaattttgttcccttttccataattttatacttttttctccctccatgccttctctaagtcattcaccttatctgaaagtataatccctcttcttttggcttagctctgcccttaataacattttacattagttagctctcataactctcagtatatttatgacttttctttatcttttttttttttttttttttttgagatggagtctcactctgttgcccaggctggagtgcagtggcacgatctggggcgatcttggtgcactgcaacctcaacttcccgggttcaagcaattcttctgcctcataactccgcctcccaggttcatgccattctcctgcctcagcctcccgactagctgggactacaggcacccgccactacgcctggctaattttttttgtatttttagtagagacggggtttcaccttgttagccaggatggtcttgatctcccgacctcgtggcctgcccaccttgggctcccaaagtgctgggattacaggcgtgagccaccgcacccagccatttatgactattcttaattataaaagcagaaacagaacatttaaagaattttttaacatgagaattaaatcactatccagcacacatatacttccttctttgaaactttctgccaagtttctttcttttttttttttttttttttttttttttggataaggagtctcgctctgtctccaggctggagtgcagtggggtgatcttggtgcactgcaacctcaacttcccgggttcaagcaattcttctgcctcagcctcccgagtagctgggactacaagtatgcatcaccacacccagctaatttttgtatttttagtagacacgggtttcaccacgttggccaggatggtcttgatctcttgacctcgtgatccgcctgcctcggcctcccaaagtgctgagattacaggcgtgagccaccgcacccggccctgtccagtttcttatgtgtgtgtgtttgttggcaggtgtatgttttatatttattcactatgagtaatttgtatatggatttttacattgattattgaattattttttccttattaaagtaatatttagcattatcttcttaatatcaaattaaatgttcgttaaatagaaataatacaatctatctaaccctttttaaaatttttgtacaggttgagagtgtttattaatacagcatcttaaattttttacctttattttttaaatttccatttttatttttgattcaggggccacatgtgcaggtttgttacaagggtatattggataatattaaatttgggcttctattgatcccatcactcagatagtggacgtaatacccaacaggaagtttttcagctcttgcccctttctctccctcccaccttttggagttcccagagtctactgttcctaactgtatgtccatgtctacccaagatttagtgcccacttataagtgagaacatgcaataactggttttctgtgtttgtgttaatttgcataggataatggcctccagttgcatccattctgctgcaaagaacatgatttctttcttctttaaatggctgcatagtattccatggtatatatatatgccatattttctttatcgaatccaccattgatggacaccaaggttgatgccatgtctttgctattgtgaatagagctgcgatgaacatacaaatgcatttgtctttttggtaaaatcatttattttcctttgagtacatacctagtaatgggatttctaggtcaagtgggagttctatttttagtgctttgagaaatctccaaactgccttccacagtgactgaactaatttacattcccaccaatagtgtataagcatttccttttctctgcagcttcaccaacatcaatgcagccatatttatttatttatttatttatttatttatttatttatttattttagacggagtctcgctcagccacctgggctggagtgcagtggtgcaatctcggctcactgcaactttgtctcctaggttcaagtgattctcccgtctcagcctcccgagtagctgggattacaggcacctgccatcatgcctggctaatttttgtacttcagtggagacggggtttcaccgtttgagcgaagctgatcttgagctcccgacctcaagtgatcctctcgccttggcttccctaagtgctaagattacaggtgtgagccaccgcgcccagcccaatgcagcttttaaaaaatcaacttatctagtattaacttccagaagttaatttagtgagtcaacaaattagcctttttctggcttttaacatatatccttgtattgcttttaaatgatttttttaagttaatggtagccaatcttaatcatacacacaaatttttacatatattatataatatatgttatatatataatatttatatatattatatattttttatatatatacacacttctgtaaccattgctatgccacataggaaatttccaactacccaaaagtatcactgggctcctaaccaggcaaagattaatttcgcctattttactgtcttgctgtgtatttttctgttgttctctggtatgccattggatgaatatgccacaaataatttaccaaatctactgtcgatggttaattgggtttcccgttttaggctattacaataaagctgtcttgaacatagtttacatgtcttttactggacttgacactcctttctgacgggtatatttccaagagtggaattactggaccataggggatacatgtgtttagctaatattagttttttaaggtataaaatctatttaaaatataaatggaaatatttctattttgtcaattggtaagaatattacactatcatttaaaaggagatagatcaaataatttagaaaagtggtagcagagtctagaaacaactaattccacttgcctttggtcatttcctttctttccgtataagcttactgtacatgcaactatataactattttttcacaacaatatattcctaagtttttagacttttattgtcatactgttttggctgtaagcacccttcacttccattcctcgtggatttcgctcatgccattttgtctgtccagaatcacatcttccctgatctctgtgtttctccattgcacttcctctagacttatcgtactttttatttaactaagattatcagagcaatacattttaaagaacttaagctattcttataaattatctcttctggtcatcttatagcataattttctctaaattaagcagacacttcttttatatcttctcttatacctctgaaccaggaagtgaactcagaaaaaatttccttcaacacaggctttcatttgtttgttagggtgtgccggcaataaatattttctctctgggacacctaaattatagccactgttttaaccttaataatattgttgaggtgcagaccagacaatgtttccattattgcaatttttatttattggaggataaaaggttgtttagtgaaaagagaaggtgggaagaggtaatgattggcaattcttatttattggaggataaaaggttgtttagtgaaaagaatagatgcgaagaggtaatgattggctaagtactatggaactccctgacactgatcgaattatgttaatgtttagttcgtacttgggagtattacagtcgcttgttaaaactccattatgtaactccattttcaggcctgggatcatgatggggttagggataaatacaatgattaatttttaatgcaaggcaataatcagatttaaacattttaaatctgtgtattctttttggtattgttttttaagtggttttagttttgaaaaaagttttagttaatgttcaatgatattgctattacatgagaagtgaggtgataataagtaatctttttagaccagtcttatcaaaaatttacagcataccatgtactggttatttgcaggtattcttttactcatgatctctctgtatttctttgaatgcatgttaccttgtgagtatcagtgagtaggctgtgatgttgaacatctgacaggcatccagactctaattaactgttgaaataaaaatattaaaaaattaagaataggctaggcatggtggatcatacctgtaatctcagcactttggaaggctgaggcgggtggatcacttgaggtcaggagttcaagaccagcttggccaacatggtgaaacccagtctctactaaaaatacaaaaattagcctagtgtggtggcaccacctgtagtcccagctacttgggaggctgaggcaggagaattgcttgaacctgggaggtggaggttgcagtgagctgagattgcaccactgcacgccaacctgggtgacagagtgagaccctgtctcaaaaaaaaataaaataaataaaataaaataaagactatcttctcatctagtatagtactttacagatagcgaatgccttgttaagtatttgttgaatgaatgaatatatattagtataataggttaaattgtaataagcctatgtttctttgatttagataatagcagggtatattgagaaaaatgtggaaaataaacagaatttatatactagccctataaatgtatatatatgttatgtgtattatatcaaataactaatattttattaatgcaagtgaaccctgaaggtttgtgtagcattatttaagccagcagttcttttcctcagggtgcatccttcacaaagtctggcacatgaataagaggaagtatgtacagtagtatcaatcaaagcaacattgttttagtactagaaatcaatgaacaatcccaatgtccatcaatatgcataaaacattgctttatatacttataatggaacattacattgtggtgagaacatataaactagaggtatactcatcaacatgagtaataatattattacttacattttgtaaagggaaggtaggaatattgatcaaaacctcaggttaatgctgcatcatttaaatctagacctagcaggtgggtgtatgattggagagaggcacaaccggggctttcccagagtgtcagtgttctctttcttcacttaggtaagttacttggtgtttcacttattgttagccttttaccctcacaaatgcattatatgcatgctttcatctctgatatattttaaaattaaaaagaaaataaactatttcctaggggcagtaatatgttaggtaatatccttgtatttatggagcttccagctacagtaaaggtagacattaattcaataactgcaattactccaggcttatttaataagaagtatgtgatgccataagactatgcaatagctgatacaatctaatcaagaaagcgcagaaagagcttcactgagaaagttgtaactgagctgatatctaaatgatgagtgaaaattaacttagaaaacaaaggaaaaaaagaggaatatttgcaaaggccttctggtgcaggagagagcactgttgaacatgaagaaaataaagaaggccagtatagttggagaaaacagtatcatgaagaatattatttgagaggtagtaagggtcaaaataagaatcttgtagataatgcttttgcctttgcctatgttgatgagaagctactgagatattttaagcagggagatggggtaaacagattcacattttgaatatattattctggtggcaggtgaaaaatggattgggtggaggcaaaagtagatacgggaagaccagtcaagagagtattttagtagttcaggcaccagatcatgatagcttaacggaagttactggtagagaatatgagaagagtagattgatttcagagaaattttgagggcaaaatataagggacttcgtaataatttagaaatggcaagtgtgcgagaaattcctcaagaataatttctaagtttctagcttgcctaaatgaatggttggtggtacccatcacagagagagaatataggaagaagaccaaaggttaaatggacactccaacatggtcagatttgtacacctaacatgtgtgcatcttagatctctaggatcaggtactgactcaatttagactttgtctttcaaaagttatgtttcaacaatgtattttgtctggaatttaatcttcaatatagtgtaactccatttttctctctctttctctctttttttttctttagacaacatacagacatattaatataaagtaagtgtttgggctctgtttttctctcttccatttcaatttcttaccattgtccctacttctaccataggaatctctggatttctttccaccacaggaatctctgactctaaatcccacataatggaggattattggttctttgctactcaccatggttaattaatactcacttctcataatgaagctggtagtatctaatgtaagccttgttccaggattagtgaagatcatgacgtttcataaaagtgtagtgaagttaagcacagctctgtgttttgttccttttaaagcagaaaggccgatcaggtccaaaagtctgagttgaagaaagaaggctagaatcatagcatttcattgcagtgttccaatcagaaaccccatagttatcctttccttgtatttctgacagtatggtagactgaatgtctagagaaatcctttcattagcaaaaaacctaaagattccagacagtatatgtatatttaaaaattactttgggaggccgaggccagcggatcacgagatcaggagaacgagatcatcctggctaacacagtgaaacctcgtctctactaaaaatataaaaaattagccaggcatggtggcatgcgcctgtagtcccagctactagggaggctgaggcaggagtatcgtttgaacccgggaggcagagattgcagtgagccgagttcgcaccactacactccagcctggtcaacagaacgagatcttgtttcaaaaaaaaaaaaaaaattaattgcatagctgagttggtggaaagtaaggagaattctcagagtccatgaacagcatgaactaacaaatcaagagaagtaagcaagatgaatgtcactgaaacagacattttctctgaagatgtttggaagttcttcactgcatacagcctaggatttacaagaccattttttgtaaacaaatttagtttgggctggcaaaagttggcagatttgactacaaatacctctgcatgaataggatccctgaaagacaatacttattgtgaattaaataagcaaataaaagagacgggggtagggagtagagagagagagagagagagagagagagggagagagagagagagagagcaagagagaatgctcttgagggagatatttggttctgggtgtagtgaaggaaaaggaaagtttcaccagaagaaaattcataacttctcccttatgtaagccatattcatagtacatatgtaacctcaaaacctctaaaggtaaaattttacttttaagtgacacttggttgatagtgtccccaagtactttgcagaagcaagcaaaaatcctgtgacaagaaagcactttaaataaaggtcccacataactctcatagataaaatttcaaaggatatgagattgcattaaaaagataatcactaaatacaaacagaatagaacatctcagtgaaagaaatcagtaaaaacaaactggagaagtagattacgaagattgttgttagaaatttcatttgtagaatgtaaattaattacatataatgttcaaaataatatagattattaaaaatatggtaaaagacagaagactataaaaacaaacagatacatttaaaaaagaaccaaagagcattttgagatatgaagaaaaattaacaaatgaaagttgaaatttattgtatgtgttatacagcagagtagaaatagctgaaaaggaaatttttgaaatagaagatagatctgagaaaattatatagaaggtagagcaaggagacagagctggaaaatacaagagactttaggagatagagaggacagaaagagaaattgcaacatacatctaactggagagccagaatgaaggaagagaaaaaacatgagtgagatgtttaaagtgataatagttgagttacttttaggattgatgaaagacatggatcttcatattcacataacaaaacaaatcttaagttaattatggtataatcacagaacggcttgatatagtgaaatcgctgaacattgatcgagattttaaaaagcagaaaaagataatatagaaaatagaagacagtagtatatgatagaaatgaatctaaacatatcagtgatcgcaataaatataaattgagttaaattttcaattaaaggagattatcagacagaaaacaaaacactacaaacaaaatcccacttctgttgtttataggaacacacctaaactaaagaatatagatgctaaggcccggcacagtggctcacgcctgtaatcccagcactttgggaggctgaggggggtggatcacgaggtcaggagtttgagaccagcctggccaacgtggtgaaaccccatctctactaaaaatacaaaaattagctgggtgttgtgtcaggcgcctgtaatcccagctactcgggaggctgaggcaggataattgctttaacctgggaggcagagtttgcagtgagccaagatcgcaccattgcactccagcctgggcaacaagagtgaaactccatctcaaaaaaaaaaacaaaacaaaaacaaaatagatgctaagtgcagtggcttacacctgtaatcccagcactgcacttacaacagtggctgaagtaggagtatagctggaaccaaggagttgcagaccagcctgggccacatagggacaccccatctctacagaaataaaaagaaaaataattagccaggcgtcatgatgtgcctgtagtcccagctactcagaaggttaaggagaggggatagcttgagcccaggaggttgaggctataggttaaaccatgattgtaccaccgcactccaacctggattatggccctgtattaaaaaaaataaaaaagtaaaaagatgggaaaagatgtatcaaaataaaaaaaaaaagaatttgttttatttatttatttatttattttgagaaggaatctcactctgttgcccaggctggagtgcagtggtgcaatcttggctcactgcaacctccacctcctgggttcaagcgattcttgtgcctcagcctcccaagtagctgggattacgtctggctaatttttgtatttttagtagagatggggtttcagcatgttggccaggctggtctcaaactgctgatctcaggtgatctgcccgcctctgcctcccaaagtgctgggattacaggcataagccaccatgcccagccagaatttaccttttaaataacataaaaaggaaattctcaagcaaaaatactgttctatatggtagctagcttctgagatgccacccagcgatccttgtcctcctggtattcatggctttttttaagactcatctaagaatgaataggcatgatctttttaaccaataagatagtccagaaatgacagtgtgtgatttctgaggttaaactataaaacacaatgtagctttcaccttgttcttttggaacactttatgggggaccatcagctggaattctgtgtaaacatttagacagttctggggaaaggtacatatttaatgaattgaagcttcaaaagacactaccaatttgccagctctttgaatgagccattttcaaagaagatcccctgccccagtgaagtcttcggatgtctgtactcctgctaacaccttaagtgtaccctgtgagagacctcaaaagagaaccacacggccaaactgctcccaaatttctgacccatagaagctataagaaggccagctccgatggctcatgactctaatctgagcacttttggaagctgaggcaggggcatggcttgaggctaagaattagagaccagcctggtcaacatagaaagaccccatctttgcagaagagaaaaagaaaaaaattagccaggcatggtgatgtgcacccatagttttagccactcaggaggctgaggcagaggatcgcttgagcccaagattttgagagtgcagtgagctttgatggggccacagcaccacagcctgggtgacgagagtcagaccctgtctcagaacaaaaaaaaaaaaaaaaaagaaagaaactttaagatcaattttaattgctgttttaggccattaaatctctaagcaactcaactcaacaagaaaatatgattgtatttattgattgatttttaaatgttttactattactattatcagtagtagtagtagtagtaatagagacaagatctcactactgtgttgcacgggctggtctcaaactcctgggcttcagtggttctcccacctcagcctcccaaagtgctgggattacaggcataagccaccacgcttaactgaagatacaattttaaacctttatgcatgcaagtataatgtcgaaataaactaggtaataatttgcatacattttaatatatcattacagttggaaactttaacacaactgtatcagcaattctaatattgaccagccaaaaaacagtaagtacatagcaggttttataaatttcaaaagactaatgtcatgtaactatagtctttgactttagcacagttaagataggattcaatataaagataagaaccctctagtttgaaaatcaaaaatagacaccttaaaataacttatgtttcttttcttttttttttttttttttttgagacaaagtctcactctgccgccaggctagagtgcagtggtgtgatctcggctcactacaacctccgcttcccaggttcaagtgattctccttcctcagcctcctgagtagctgggattataggcgcctgccaccccacccggctaatttttgtatttttagtacagatgaggttgtaccgtgctggccaggatggtctcgatctcctgacctcatgatctgcccgcctttgcctcccaaagtgctgggattacaggcatgagccactgcgtctggcctaaataacttatgtttccaagaagaaatcataatggaaattagaaattgtttaaaaatgaatgatcatgaaaatgccacatatcaaaccatctggaataccactgaagtagaaacaaaaggagaagttaaggccttaacaagcttataatagagaggaaataacagtgcaaatagatgagataaacaactaaagaagtcagaaacagaacaacaaaataaacacaaagaaatagaaggaaagaagtcacaatgataaaaatgtaataaacaaggaaacaataatacaatagcgaatgaaaaatagggagtgaaaaacaacttaaaatttggaaacgcttaacaaaatgattccagaacacaaacaacaaggccaacacacacacacacacacacacacacacacatacacaaatcaggtaagaaaagtggggtataactatgatgcagcaggtattacaatgataatacagggacacgataaatagctttatacctgtacacttaaaacatttaaaatagtagttgtatccacaaaaatataatttctcaaaaataacatttgaagaaatagaaaaacttagtagtctgataaatcattaaggacttgaacccattgtcaaaaatctctccataaagaacatacgaatctgaataaatgatttcacaggtgcatctatctaacagttaaggaacctataatttcagtcttactttaactctttaaaagaacagaacatttgggaacactctacaacttatttaatgaggctagtgtaattttgatatcaaaccaacacaaaatacaaggaggaaaaatagtaggtccatctgactcaagcacagatgcaaaggcctatacaaaatattaggaaagaaaaactaaatttgtttataaaagataaatcatgatcacaggtttattatagaaatgcaaacttgattaagcattagaaatctactaatgtattcaccaaatttataggttaaaagtaaaatctatttcagtcatcttacaaatacagaaaaacaacctataaaattaatgtcaattcgtgtttttgttaaaaaagcttaacaacctaaaaatacaagagactatctttactataataaagtgcagctatcgaacttttttactaaatatctcattccatggtgaaacattaaaatccagagtaaatcaatgatgcctgttttcaccacatcaattcaacattgtactacagactggacccagggcaatggcaagagaaaaagcaacaagttattaggctctgaaaagaaaaaagtaatttttgttgttgttgttttgagacagtctcactctgtcacccaggctggagtgcagtggcatgatctgggctcactgcatcttctgcctcccggattcaagcaattctcctgactcagcctcccaagaagctgggattacaggcatgcaccaccacacccagctaatttttgtatttttagtagagacggggtttctccatgttagctaggctagtctcgagctcctgacctcaggtgatccacccaccttggtctcccaaagtgttggaattacaggtgtgagccaccacacccagccaaaaaacaaattttaatgttctatagaagataggacttcctattttaaaagatctatagaaaaatttttagtaattttttactataaaatccaaatatggcattcatgtgcatttgtatatatcaatagtctgttgctactgtcttaactttgaaatattctgttataatagcaacataaattataaggtacctcagaataatgggagaaacgcaagttttttacaagggagagaataaaattgtattgaaaaacattagaagacaaataaattaaaaaatatattgtaaataggaggacactgtttttaaaatgacagttttactcaaattggtttatgatttaatgcaattcctattgtctcaccaggacgtttcatgaaaactgactagctcatctgaacatttatgtggtagatcaaatggacaagaattactgatatgctcttgaaaaagtgggacaaggaaagacctcttgccctatcagatatcaagatctattttaaatctattataattattacaacgtattgttagtttagaaatatattgctgaaacagaatgctcggcccataaacaacccacacttctgtggaaactcactctctgagcctgctttgcagatcagtagggaaagggtagttgcccgaacaaaagatattgggaaaactggtagttaatatagaaaagatgaaactggatcccacctcacgctttaaattcaattccaattggcttaataggtgaaatttcaaagggacataagagaatatccttctgattacttttcatgaaataattagttttaaaaagaagcaaagctgtaaagagacactgaaacatatttaaagtttaaaatgagaactttgtccaggcacagtggctcacacctgtaatctcagcactttgggaggctgacatgggaggatcacttgaggccaggagtttgcaaccagcctgggcaacatagtgagatccctgactctacatagaataaaaaagttagctggacatggtggtgcatgcctgtagtcccagctactcagaaggctgaggctggaggatcacttaagcccaggagttcaaagctgctgtgagctatgattgtgccactgcatttcagcctgggctgagcatcagaaaaacagtttgttaaaaacaaataaacaaaagaaaaacttgtaggtgaacagacactataaaagactgcaatggcattccaaaagctgggagaaaatatttgcattgcccatgaccaacaaagtttcgaatataaaaagtcagagtcagtcaactacaaaaagaaaaccaaaagaaaagtgtgaataaggcatagacatttcatagaaatatttgtaaacatattcgcacgtatctataattagagaaaagtaagtttaaactgaaattcttgtgtcatactcatcatatttccaggtattaagtgtataacactgtcagcattagtgagcaacaggaactggcatacactttaggcaaagtgaatctttctacaatccctctagaaatctatttggaatcaatggtaaagtttagctataacactgagaaagcagttccactgctaagtatatgtcggggcaaggggccttaaactatctaggacaaaggaagaatgttttttaaaatttccagtcttttataaaatgtgacaaaaataaattattttaaaaaaggcttgaacccaggaggtgcagggtgcagtgagccgagatcacgccactgcactgcagcctggcaacagagtgagactccgtctcaaaaaaataataataaaaataaaataaaaaaagaaatgttaatacacttccagaaaacaataaatataaaaacatggacataaaaaatataaactcatttttatcattagattcggtagacataattatattttaataaaataatataaagtaacgctgatgaaaatatagttagacaaaccaaacaagttgttcattgaaagtgtgattattataaattaatataaagaatcactatcaccttttgtcattccacaattatttctaaataaaatgctatgagtgaaataggcatttcatatattttatgactgtaggagcactttgaatattcataatatgtaattaatagagtttttaatgtgacaaatgagcttgtttcttgcttgcttgatgtatctaaactggattgatgacaacacgaaattgttcccatattttgttacactaaatcaatttcacaacagcatgttgacaggtatgtacatgtaatgatgcatatacataaacatatgcatatttaagaaatcatgagttcactctcatacctccaattctaatccatcaccagatgaactttcttgccttttctcattccctatttgtctcttcttatacagccagatccctggctgccaataactataaaacatttattcatttgcttagtcctatattgacatctaaaactgtttcagaattacttccactgtaccactgtaaaacctaaaacaagttctggatatgttagaacattgtccctgtccctaacatccaaccctgctccagactgacggaatacagacaaataatgagttcacaggaaacttgattaattcctttctttcctctcaatctccctccctctttctctctcttcatccctccctcccttcctttcttccttttcagttatgatattcatttggaatacaatttaccttcatgcattttaccttgcttgctttctgttttatgtttttttttctgcttccattcttatttaatgtaatttttaaatatgtatgttatgctttcaaaagtaaaaacaatatatataaaagaattacaacaggactcacactctcgttatctcttctactctatactccaatcacatgtaaccaatttcagtgggattctttttcataaagattagcagatctatgtataatagtttttgcttttttctttcacgagtagggtaaatatatatgcttttctttttccttcactttgattttttttctccacttaattatatctcttgaaaggtactccaaaaccatttatagagatcttcctcattatttctttgtagttgcatagtactgcaccgtgcatgtgtattcattgtatatttaaccagcatcctaggcttggatatttaggcagtttcaatatttgcaattacaaacaatcttaaaataaataacattgtgcatatatttatcatggttggaggtgtatcttcaggattaattcatagtaatgagattaaagcatccaaagagtaaatgaaaatataattatttttaacttttatacaaaattaacccatggagcctgggattacaggtggatgccataattatttagtattttcaaaattcattttcaaatctccatccataacctattttaatttatagttaaatgatgaattttttacatgtctgcattttgatgaaaagtaaattccaaagtactctatcagattcataggattcaatgataattttttgctgatgtgcagtatcaagatcttcattgataatattgttaaattataggactcatcataataatctaaaaactttgttcttttaggcttctgactttcatttttgttttttatctggcattaaaaaacatattacattttttcttagaaagaagtgtaaacagcaatgaatatactaaagataaagacaatgaagtaagtctggcagtctcaatcacatctttacttgggatcaaaatggtttaataattgcaaagatattaagagttcacatatattaaatcatgtcaaaaacttcaaacattctctactgaacattttcctttattaagcattatatctccacattagtttttttaaatacaataagcttacatgttataatcataatataataatttctaccttaaaactgttttttagagaattcagtttttactacataactaagacttttttttatagcaagtctttcttggtgaagcaaccagaatattgatttctattgtcatgaaagctccttaaattttttttttctttccagtttccacatacagtattgaaggtgaaagcttcttaatctgcataactatttcagaatattgtcttgtcattgcaactgtaccatcagaacattatcttaatgaaacttaaactcccaactattatgtcaatgcaatccttttcagttttacaaatccatagctggttgtttctagtcatcaatgacattgagaaaatacttctttatatcaccagcctatacagtttacacagagattaaaatagttgccaagttagtgatatttttgcattcatccagttcctagctgtatttgttctgtgagtgggtccattatttttcttcattttctgtagtgttttaaagtatgctgtcattgaaaagtgggacttgagctactttctttgcagtggttgcagctatcatttctaacacacttttgatgcagtgtttcactaatgtctcagcaatttttaatgaatttttagctttaacaacaccaactgctttttaaaaccatctatgaattgtttatgtttaaataggaatatgtatagtttcacagattgccagcaattatggctaaaaaactaaatcaaatatatggaagataatgttttatttctttgaaattgtttatttttcattattttatttagtgttaccactacattctgaaaaggtataccttgtcctgaccaaaattaaaggaaaaaaggtgaagcttatactgctgtcaataaattaaagattaaaactaaatacacaaattttacagccctaatttagctaataatgttaaattataaattttaaaagtaggcttaattttaaattaagactatacatgtatgtataaaagtatatgtcctcattttatcccatttttatacacttcaattaattaatttcttcttattattcttattatttttgagacaggatcttgctatattgcccaggctggagtgcattaaagtgatcatggctcactgcagcctcaacctcttgggctccagtgatccttccaccttaacctgagtagctgggattacaggcaggcaccacaatgcccacctaaattttaaatttttttgtagagataaggttttgctatagtgctggcttatacacttttagattgcagttcccaatctaattttaaaaatattgcgtggttctattgtgcatgacttgtatgtgtgttttttagagtttttattttattatcctaagaatacttaacatgagagctaccttgtaacaaatttttaatttttaatttctttaaagccaggattagaactttttttttttttttctgagacagagtctttcaatgtcacccaggctaaagtgcaatggcacagtctctgcacactgcaacctccgtctcccaggctcaagtgagtctcacaccttagcctcctgagcagctgggactgcaggtgtgcgccaccacacccggctaatatttgtatttttactagagatggggtttcgccatgttgtccaggctgatgtcaaactcctggcctcaagtgattgccctcttcagcctcccaaagtcctgggattacagatgtgagccaccatgcccggcctttataacacatttttaagtgtacaagaaaatattattaactgtaggcataatttacagcagatcttgataactgttttttgtcataccgtgagttcaacattatcaaactagcgaagtcctattaaatgatatgagttcactgattctgtgcttggatattatagcaaaaccagattacagttaaagtttctaaatgcttgctcttcatttctgtacttatcccatcacaaacttgtagcaaacaatcagcgaactggcttgggtccacagaccacacattgatttttgcacctggaaacatacactagaatatttatagcagcactgtttgtaaaagcaaaaattggaaacatcccaaatgtccatttatagtagaatggataaatgcattgtggtatattcacgtgatgatttactataaagtagagaaaataaataaagcattcttgtgtccattaacatagatgaatcttataaacacaatgttcaggaaaaaaatcaagtcagagaagaatgtattacagtaatattttatttatataaagattcaaaagagaaacaactaaatagttaattgttactaaccatagatatgtggttaaaactcaaagaaatgcaagaagttattatcacaggatagaaattaccccagagagtggagattcaatcaagttaaggtacccagggcacatcgaaattactgttcattctctactttatagcctgggtatcgggtatatggatatttgtttcattgttattaaactgaacacatattaaatattcttttgcatatatattttataataaaattactaaaattataaataggcaagacttttaaaaaatatttttgaaatacatttaaaaacatgtgaatggcccagcgcaatggctcatgcctataatctcagcactgtggaaggccaaggtgggaggatcactgaaccccaggaagtcaaggctgcagtgagtcatgattgtgtcactgtctccagcttgggcaacagagagagacctggtctcaattaaaaataaatttaaaaataataaaatatgttaaaaataggaagacattcctagatgggaagataaataatcacaattatgcatttgattcaattccaatcagaaaaataattaaaaattaatacccataaatatttcctaaagcctgcaggagatggggatcattattttatattgagtttgaatatagaaatttgatcatgacaatataaaaacctggtttttaaggtgttcagggataaaaataaaataaaatgcctatattctgtgagtctgccagaacaactatagaacaagtaatgatcagatgaccatgactggaaagcatgacagagcacaggaatgctcaatctcacactctactatgtattgccttcgtgatctgaatgtttgcatctccccaaaattcatgtgctgaaatcttaattctcaagatgatggtattaggagggtggggcctttaggaggtgattaagtcctgagggctctgccttcgagaatgggattagttcctttataacagaggccctagaaatctagctagtctcttctaccatgtgagggaacaggagaagcagccattatgaacctagactgggccttcaccagacaccaaatctgctggtactttgatcttggacttcccagcctccagaactgtgagaaataaattcctattatttataagcaacctaatttatggtattttgttataccagcctgaaggaactaagacacttaactattttaatcaaatcacttaactgcattatccagttttccagtctctaaaatgagaataacattagtattaataacttctgaattattgcaataattatatgacaaaatacatattaaaaggataacaagttatacgttggtagtcaaaaattatttattttagcctcataatgaagaattctataaaatttaaagtattcgatgttttactttgttttcattttgagatgagagtctcactatgttgcccaggctggttttgaactcctgggctcaagtaattcttccaccttagtcaccagagtggtggggattacaggcatgtgctctgggtccagtgtatttgctggtttacttatgaaaagtaagaacatgtgatatatatggcatgtgatttttttcacctatctatattgtgtacattcttctatgtcaatcttttttgtagttgtaataaatcagtaagttgtaattcattttatgtttatcatttgaccaaataaaatttaaaaagtcatccccctctccatagtactcaaaaagttgggaactgtaagtataaataaataagggtgacttgtcaaactagatattaattaaactctaaagctataataattaaagctctatgatactggtttgagaaatgaagaatagagcaatgaaacaacataaaagctctgaaagaaaacctagggcagccagagagaaaggtcgggttaccctcaaagggaagcccatcagactaacagcagatctctcagcagaaaccctacaagccagaagagagtgggggccaatattcaacattcttaaagaaaagaattttcaacccagaatttcatatccagccaaactaagcttcataagtgaaggagaaataaaatcctttacagacaagcaaatgctgagagattttgtcaccaccaagcctgccctaaaagagctcctgaaggaagcgctaaacatggaaaggaacaaccggtaccagccgctgcaaaatcatgccaaaatgtaaagaccatagagactaggaagaaactgcatcaactaaccagcaaaataaccagctaacatcataatgacaggatgaaattcacacataacaatattaactttaaatgtaaatggactaaattctccaattaaaagacacagactggcaagttggataaagagtcaagacccatcagtgtgctgtattcaggaaacccatctcacgtgcagagacacacataggctcaaaataaaaggatggaggaagatctaccaagcaaatggaaaactaaaaaaggcaggggttgcaatcctagtctctgataaaacagactttaaaccaacaaagatcaaaagagacaaagaaggccattacataatgataaagggatcaattcaacaagaggagctaactatcctaaatatatatgcacccaatacaggagcacccagattcataaagcaagtcctgagtgacctacaaagagacttagactcccaaacattaataatgggagactttaacaccccactgtcaacattagacagatcaatgagacagaaagtcaacaaggatacccaggaattgaactcagctctgcaccaagcggacctaatagacatctacagaactctgcaccccaaatcaacagaatatacatttttttcaacaccacaccacacctattccaaaactgaccacatacttggaagtaaagctctcctcagcaaatgtgaaagaacagaaattataacaaactgtctctcagaccacagtgcaatcaaactagaactcaggattaagaatctcactcaaagcggctcaactacatggaaactgaacaacctgctcctgaatgactactgggtacataacgaaatgaaggcagaaataaagatgttctttgaaaccaacgagaacaaagacacaacataccagaatctctgggacgcattcaaagcagtgtgtagagggaaatttatagcactaaatgcccacaagagaaagcaggaaagatccaaaattgacaccctaacatcacaattaaaagaactagaaaagcaagagcaaacacattcaaaagctagcagaaggcaagaaataactaaaatcagagcagaactgaaggaaatagagacacaaaaaacccttcaaaaaatcaatgaatccaggagctggttttttgaaaggatcaacaaaattgatagaccgctagcaagactaataaagaaaaaaagagagaagaatcaaatagacacaataaaaaatgataaaggggatatcaccactgatcccacagaaatacaaactaccatcagagaatactacaaacacctctacgcaaataaactagaaaatcgagaagaaatggatacattcctcgacacatacactctcccaagactaaaccaggaagaagttgaatctctgaatagaccaataacaggagctgaaattgtggcaataatcaatagtttaccaacaaaaaagagttcaggaccagatggattcacagccgaattctaccagaggtacaaggaggaactggtaccattccttctgaaactattccaatcaatagaaaaagagggaatcctccctaactcattttatgaggccagcatcatcctgataccaaagccgggcagagacacaaccaaaaaagagaattttagaccaatatccttgatgaacattgatgcaaaaatcctcaataaaattctggcaaaccgaatccagcagcacatcaaaaagcttatccaccgtgatcaagtgggcttcatccctgggatgcaaggctggttcaatatacgcaaatcaataaatgtaatccagcatataaacagagccaaagacaaaaaccacatgattatctcaatagatgcagaaaaagcctttgacaaaattcaacaacccttcatgctaaaaactctcaataaattaggtattgatgggacgtatttcaaaataataagagctatctatgacaaacccacagccaatatcatactgaatgggcaaaaactggaagcattccctttgaaaactggcacaagacagggatgccctctctcaccgctcctattcaacatagtgttggaagttctggccagggcaatcaggcaggagaaggaaataaagggtattcaattaggaaaagaggaagtcaaattgtccctgtttgcagacgacatgattgtttatctagaaaaccccatcgtctcagcccaaaatctccttaagctgataagcaacttcagcaaagtctcaggatacaaaatcaatgtacaaaaatcacaagcattcttatacaccaacaccagacaaacagagagccaaatcatgagtgaactcccattcacaattgcttcaaagagaataaaatacctaggaatccaacttacaagggatctgaaggacctcttcaaggagaactacaaaccactgctcaaggaaataaaagaggatacaaacaaatggaagaacattccatactcacgggtaggaagaatcaatatcgtgaaaatggccatactgcccaaggtaatttacagattcaatgccatccccatcaagctaccaatgactttcttcacagaattggaaaaaactactttaaagttcatatggaaccaaaaaagagcccgcatcgccaagccaatcctaagccaaaagaacaaagctggaggcatcacactacctgacttcaaagtatactacaaggctacagtaaccaaaacagcatggtactggtaccaaaacagagatatagatcaatggaacagaacagagccctcagaaataacgccgcatacctacaactatctgatctttgacaaacctgagaaaaacaagcaatggggaaaggattccctatttaataaatggtgctgggaaaactggctagccatatgtagaaagctgaaactggatcccttccttacaccttatacaaaaatcaattcaagatggattaaagatttaaacgttagacctaaaaccataaaaaccctagaagaaaacctaggcattaccattcaggacataggcatgggcaaggacttcatgtccaaaacaccaaaagcaatggcaacaaaagacaaaattgacaaatgggatctaattaaactcaagagcttctgcacagcaaaagaaactaccatcagagtgaacaggcaacctacaacatgggagaaaattcttgcaacctactcatctgacaaagggctaatatccagaatctacaatgaactcaaacaaatttacaagaaaaaaacaaacaaccccatcaaaaagtgggtgaaggacatgaacagacacttctcaaaagaatacatttatacagccaaaaaacacatgaaaaaatgctcatcatcactggtcatcagagaaatgcaaatcaaaaccactatgagatatcatctcacaccagttagaatggcaatcattaaaaagtcaggaaacaacaggtgctggagaggatgtggagaaataggaacacttttacactgttggtgggactgtaaactagttcaaccattgtggaagtcagtgtggcgattcctcagggatctagaactagaaataccatttgacccagccatcccattactgggtatatacccaaaggactataaatcatgctgctataaagacacatgcacacgtatgtttattgcggcattattcacaatagcaaagacttggaaccaacccaaatgtccaacaatgatagactggattaagaaaatgtggcacatatacaccatggaatactatgcagccataaaaaatgatgagttcatatcctttgtagggacatggatgaaattggaaatcatcattctcagtaaactatcgcaagaacaaaaaaccaaacaccgtatattctcactcataggtgggaattgaacagtgagatcacctggacacatgaaggggaataccacactctggggactgtggtggggtggggggaggggggagggatagcattgggagatatacctaaggctagatgacgagttggtgcagcgcaccagcatggcacatgtatacatatgtaactaacctgcacaatgtgcacatgtaccctaaaacttaaagtataaaaaaaaaaaaaaaataatgtgtcagtcatgatacaagatgatttaaataaaagacctctttaaaaaaaaaaaaaaaacaaataccttaaaaaaaaaaagaaaacctaatatttatacgtttctaatataagattatatgatgtaagtataatatgtgcttataatatgttattgtaatatgtataagggggaaactgataagtactgctggatactgttatgaatattcattgggaatgaaaaattataagtgaaatattcagaaaatttttaaaaaacacctaaaaggacaactatctatctgatcttgggataaggaaaattttccaaatataaaagcaaagtaagaaattataaaaggaagtaatgacagatttgatgaaagttaaacatttaaaaaatacataggactatatcagaattatacaaatcaagcaacctgttgacattattttctatattacaaatgtagatttagctccctaaaatgcaaaggactttgtgaattaagaagaaaatttctcaaacctcattaaaaatgacaaagaaaatcaaatagcataatttcacaaaaactgagatttgggggggtatagcagttagaatgaagatcatgttgctataattaaagggccccaaaaagttgtttaaataaaatagaagtttctttctcatgtaacaacaccaaagtccctggtctaggttggatggtatttgtatttcacaaggttatttggggattcagactgcttctatctttctgctttgctatctcctagggcagccattggcaatatttttttgtaaagagacagattataaatactgtagaatctggggtctcatatggtttctgttgcagttactctattctgcaattatagaattaaagcagctataaacaacacataaacaaatggttatacctatcttcctataaaattttgtaaatttggtttaattaactaaaaaaacaaatttttggtgtactacatgatgtcttgatatatgcatacactgtagaatgactaggtcaagctacttcatatatgcattatctcagtaatatatatatatttttttcttttttttttttttttgagacggagtctcactctgtcgcccaggctgtagtgcagtggggcgatctcggctcactgcaagctccgcctccagggttcacgccattctcctgcctcagcctcccttgtagctgggactacaggctcccgccaccacgccaggctaatttttttgtatttttagtagagacggggtttcaccgtgttagcccggatggtctcgatctcctgacctcgtgatccgccccccttggcctcccaaagtgctgggattacaggcatgagccaccgcgcccggcctatctcaataatattttttgttgtgagatttatgatactggtttgagaaatgaagaatagttaaaatctacttaaaatctattctcagcaatttttaagagtacaacatattgttactaactatagccccccgatgtatgtatattcttcctgtgtaactaaaattttgtgtcctttgacaacaaatatctccccaatccttttattccccaccaccttagcctctggtaatcaccattttgctgtctgtttctgtgagtttgatattgttagagtccacacagaagtgtgatctctgacagatgtctttctgtgcctgggtgatttcacttaacacaatgtcctccaggttcacccatgttgttggaaatgataaaattttaatttttaaggccgaataatattcaattgtgtatgtattcgacattttctttatctgctcattgattgatggacacttaggttaattacatgtcttggctattgtgaatagtgctgcaatgaatatgggtgtgttttggagggatctcatatatttgatccaattccaatcagaaaaataataaaacaaaaatcaaatattaatagccttaagtattcctaaggcctgcaacatactgatttcatattctttgaatagatacacggtagtcagattgctggatcatatggtagttctatttttaattttttgaggaaactccatactgttttacctaatggctatactaatttacattctcaccaactgtgtataagggttcttttttctccacattgtctttaacactagtggtctttcatcttgatattgataatagccaactgacaagtgtaaggggatatctcactgtggttttaatttgcatttccctgatgattagtgccacaatttgagtgtgtcccccaaagttcatgtgttggacacttaatctgcaatgcaacaagtgttgagaaatgggaacttttagaggcgtttaagtcctgagggctctgtcctcataactgaattaatgttactatcatgggagtgggtcattatctctagagtgggtttgttagaaaggtgagttcagagttctctcgctgtgtgtcttgtgtgctttcttgtctttccaccctccgccatgggatgatgcagcaaaagcccttcaccagatgccagcatcttgatattagacttttcagcctccaaaattgtgagaaataactttctttataaattatcaagtctgtagtattctgttatggcaacacaaaacagactgagacaattagtaatgttgaacattttttcatatactccattggccatgtgtatgcctttttttttgagaaatgtctattctggtccttcgcccattttggggggattacttgtttttgttttgttttgttttttgtctttgctattgagttgtttgagttccttacatattttgttgtatagcttgcaaatatattctcccattctgcaggttgtccctttactctgttgattgtgtccttggctgtgcagcgctttttagtctgatataattccatttgtgtatttttgcttttgttacctgtgcttttatagccatatccaaaaaaaaaaattattgcccagagaaatgtcatggagcttttcccctatgttttcttctggtagttttatagtttcaggtcttacatttaagtctttaatccatgttgagttgatttttgtaaatggtatgagatgaaggttaagtttcattcttctgcatgtgaacattcagttttccccagcaccatttattgaagagactgcccttttcccattttgtgttcttggcatctttaatgaaaatcaattgatcctaagtgtatgcatttatttctggactctttattctgtcccattggtctatgtgcttatttttatgccagcaccatgatgttttgattactagagctttgtagtagattttaaaatcaagtagtgtgatgcctccagctttgttgtttgtcccttaaaactatttacaagacagacaatttggtagttttatggcttttgctctagggccttatcttgttctgttaggttggagcctaatcacaggcacacctgtactccagcttccaggaaggagtgagcatggaagatttcatgcacaatgtctgaaggcccaggcacctaagtagcaaacattacttctgatcccattccattggtggaaacttagttccatggcttcactgagctgcaagcatggctgggaatatgatcttcacttccaaagtgcccaattacaaatcttttgctgtggaaggagggagatcatatgttagggaactactggatgtctttgccaaactggtattcaacaaattcaaaataactttacaattttataataaataatataaataaatatttctaaagaacaaaagttataatattcattgttggtattataccatttctagtggttacagtagtaatatttataataaacgattgttacagtattagtatgtgtccaacaccacagtacatgatttatagactattttattcctaacacaacctcaaggtttgtacacatttattgtcttcactttccaaataagtatctttttaatgagtttcaagactaatgtggctgggcacgttggctcacgcctgtaatcacagcactttgggagcccgaagcggggggatcatgaggtcaggaaatcgagaccatcctggctaacacggcgaaaccccgtctctactaaaaatacaaaaaattagccgggcatggtggcgggcgcctgtagtcccagctacttgggaggctgaggcagggaaatggcgtgaacccgggaggcggagcttgcagtgagacgagatcgtgccactgcactccagcctgggcaacagagtgagactccgtctcaaaaaaaaaaaagaaaagaaaaagactaatgtatgcaattagtaactgtttgagccatgattccacatcaggcagtcctattttaaagcctatgctcttcactattagataatcaaaatatgaacacttttatgaagagtgaatatgtttgcttttccacttgaatgagagattattgaaggcactctctattattaattttggttcttgagcacatggcctggtctatattaggtagatttagaataaattaatgaggaaatgaatgattatgtaaatttaaaaaggttaagtgattgctaaagttcacctagagaatagcaatcatgtcaggccttcttaactttagtttcctattttctgtgacaggctgttctaatatctgtaaccagactccttgtttcaggacagtaggcatatgcctgtgctgttccttgccagaagcagaatggcaccaagactaattacacttatttgagcctcctggtgagaggtgaagccagctggacttcctgggtggagtggggacttggagaacttttctgtctagcaagaggtttgtaaaatgcaccaatcagtgctctgtaaaaacgcaccagtcagtgctctgtagctagctagaggtttgtaaaatgcaccaatcagtgctctgtaaaaacacaccaatcagtgctctgtagctagctagaggtttgtaaaatggaacgatcagcactctgttaaatggaccaatcagcaggacatgggtggggacaaataagggaataaaagctggccacccccctgcccccccgccccgtagccagcagtggcaacctgctagggttcctttccatgctgtggaagctttgttattttcctcttcacaataaatcttgctgctactcaatctttgggtccatgccatctttaagagctgtaacactcactgcaaaggtctgcagctccattcttgaagtcagtcagaccacaaacccatcagaaggaaccaactctggacacactgggactaagaccttgatctgtcttcttcgtgagcaagttatttcatatctctgatcctaatgttttttgctttgttttgtaaaataactaaaaataatatatatcacacaaggttggtgtaatggactgaatgttcctgtccttcccaaattcatatgttaaaatccttcccaaatttatatgttaaagtcccaatgtgatggtatttggagatggggcctttgggaggtaattaggattagaataggtgacacagtggggctctcatcatgagattaattgctttataagaagaagaaatttctctctctctctctctctctctctctccctccctccctctcttcctttctccctccctccctccctctcttcctttctccctctctccctctcctcctctcccccactccacatacagagaaaaggccctgtgaggacacagcaagaaggcaactatcagcaagccaggaagaaggccctcaccagaactcaattctgctagcaccctgattttggacttacagtctcaagaaccgagagaaataaaattctgttgtttaaaccatccagtctatagtactttgttacagcaaactgagctaattaagataggtgatactgagggttaaatgagataagtataaaatgtttagtacatttcccagtacatcgtaaaacctcagtacatgcagttcttactatcctgggcattgaatggtgtgtctggtacttggtacccactaatagtaagcacacagtagtccacttgttgcctttctatgtcatctccaactgtttaccacttccttgctctccaaccacattggcctacctgaagtttccagaagacacagagcttgttgctgtgtcaggcttctacccgctgtgcttgccacagaaggcctcttctccctatttgctcaggtctcttaagtgtcattctcttagagtggccttcttaattagcctacccaaaataaccctaatcactctatcacctcatccttcttcatttctcttcattaagcagtcactgacatttcgattaatatatttagttatttttgtggtatccctgttgcttaccagaataaggtccatgagggcagggaatatccccagtgctgagaagagtacctagcctatggtatcattaaacctatttttgagtgattgaataaaaggagttttataaggaaatgcttctagtaagaaacacactatatagaaacacacgtatatatgttagcattttggaaggaatgcttgccattcatatataaaaattaagataaaggtttttagtctctcattgtcctcacatcatcccttttgtgtaaataatacattcattaaatgtattattctatctcatcaaaaatcaaacaaataactcatcttccaaattaagtatatcaactctcaaaatgataaaacattgatttaagtttttggagaccgacttcctaacaaattagtactagattatcatagtctttttgtaaaaacaaaatgtagttcctgaaacatacaatttttgaaactttttataaatttaagcattatattccatatacctcttccaactgtctttatctagaaagattgtatttgtttttatttaatcatattgcttttaggcagataggaagtgattaataattaaaaattaatttccataaagtgttggtatctttagttacacacaggccacaatgataatcaatgtggtgagtaatgtttaggtactgtgctccagagaacaattcaatcaattgccccaacctggtgtttcctgttatgcatgaacttggggaactataattttctgaataattcaacttaaagcaaaatgaaatgtgtgagtaattaagaaaatgttcttctgctaatatttattctgataaatcatttcagttctgtttgattttgcagacactccataatatcattgaattagtaaaatataataactcttaaaaagctcatagaagtgattattgcctctatattttccagtaagatgttaatttttttaaataaccgtaatgtactgtgaatataatttcttctacaagttacttttgctgcttctaaaatactagtggtagcagtttgcatactttctgtataaagactgatttgatgtcatctctgaatcacaaaaaaaagtcaaaccaaaacggaaaggtcttaatttaattaactaatagaatcattactaattctatagaattagatattttaaatcagagctagctgcaacaagttatacgagctttgccattttatgaacataatttgactaagcggttatgagatctgtaaagaacacttcttatctgagtatagctggggacgtctttgttcagaagtacacagaattttataaacctgtccagagcttcatatatatccagtaaggctcattttctacatatttgagatcttattctctgtataagatctttacagggtagtgcaaaattcgacataatatttatattatgaatgaagaaacaaacagaaaagaagagaatgaatctcaaattcattgagtacctactaagaatgaaaacaaaaacatttgaaagtggtatatggcctgagatgtaacacagtttgagaagaaatttagggaatagtataagcatttgctgatttgtacacttgaaatattgtttcaaaaaatcccttttttatcttcctgagagcatggtcctctgaagagtataacttttcctgtgttattggatcacttagttttcatttcaaggttaaatttgatgttttatcttgtttgggccatttttaaacctgatttattttatttttaaatagaacataaagcattgactcaaatatttccttagaaagggtgagaatgatagtctttccaggttggtaaccaaaatctattcctaatcttcagaagatggtaaaattaacattctatataaaagtcccatagaataaagaatattttatttatttaatttattttaattaattaatttttattattttgttttgagacagagtctcactctattgcctaggctggagtgcagtggcatgatcataactcactgcagcctcaactgcctggatttaagcgattcccccacttcaggctcctgagtagctgggaccccagacgtgtgccaccatgcccaaaaaaataaaaaaaaaattatttgtagagatgaggtctcactatattgcccaggctggtcttgaactcctcagctacagcaatccttctgcctcagcttcccaaagtactaagataaggtgtgagcacctggcctaagaatattttaactagttaatttggttaaatatttataatagtctctaatatatccagaacagatccattggctaatgaattgattcagtcatttaccaagcatctgaagcattcagaacagatcctcaggctctttattatagctgtagactttaatccagttgtaaagaggacccacatacatcagttttaaaaacaaggaaccacacctcttacataccacataatctaaaagaaagtgatcagatgaagatttgtattaatgctctggcaccatgttccttatttgacataatcaggtggttccttgacttgtcaggtggctttatatgatccttaagatagaagggagattggtcactgtggctatacaccttatgcctattcctctatacacctctgagataaatatttttaacactgttatttaactaaactgaacgtgtccaggatgagacagcaagtaacatggtatcataattaaaacctgagtctatgtgactctaatgacattcccctagattttactaaggattatttgagtagagaggtagtatcttagagaggttggaaattccttggagcctgacatgctgcagtgaatctaataggtggatcttctgttgtttgctatagagaatacttctgaaaggcatgtggaatatctagggcaggcatcaggggcggtgggggtggtggctgctcaggtctagctctgcataaagatatttttctcataagagcattgccatagagtaagacatttactgtagacagggatgcaggaatgtatgttaattacatataatattatgtgtgcgtgtgtgtgtgtatgtttatattgtgaggagtgagatgatggtcctttgcagtagagaacaaaaaagaaagataccaattttgaggaaaatgtaatgagttattctgttttttatatatatttaattttttgtagaggcaaagtctcactatattgcccaggctggtctcaaactactgggtccaagagatcctttcacttccaaagtgcttggattacagagtgagccaccatgccaaacttcagttatgtcttaagactagcctgctcactggtaggtggttaggtttagatatgtacatttaggaggtaataataaaagtagctgctcctattgtacatacaatcactgaatgaatgtatatagagataaggaaatagataagagagggttaaataccccgtcttggattaagaataagaggaaaatgtgaaacccactaaggagatgagaaaggaaaaaaatcagcagaaagaagactactgttggtttatgtttaatggtctaactcttttttttttttttttttttacttctaaggaagaatagttgtcaaaatgagggaaactctaaagataaagacacactcagactgattttcaaagcttcattttcccaaatgatacaggggtcaaattttcataatatctactcagacaacaacaataacaaataaacaaaaactgttttgtctttgagcatgaaaaaacgtaaaaatgttcctactatcccctaagtttcttgaaggcaggaattgtatctccttaatgtctttgtttcctaaatgcctggtacatgtgaattgaatttacgccttcatggaaagaagcaataacctccacttacaggttggcattcaggggcatagttcaggttgcgtcaacatcataactgggtcaaagttaagaatacagttttcatctcatgtgtgtttttaaatcaaaagtgaaaactaaagagaataatgacaatctttcttctattttatttttctaatgacttatattttaactgctatttaatggatatgatattaatgaaaacattctgattatccttaataatgtacatttttaaaggtcagtaatggtctttatctcaggcaataaagattatgaaacaaactactgtaattatattcaaactagaatatgaaatgttaggcattttacaatttttcccactattttttatttgcttacagtgactacattcattcaacaaatgtctgtctatctagctatttcacccttcaggcagagtgggattatataaaggaaggtaattcctattccgtagtaggaaggaactctctactagctaggtaaataacacttatataaaatttaatagaatgttagctaaataataacaccaaatgtatctcagcagtatatgactgcattcttagtcagtgtaatattcataaagtgtcatgagttcttaggaaagaaaatcactgtggcctatcaaaattatgaagcctaatgtacatgcagaattttaaacttgtgcctaaattcttctcattatgtagcaaaaactgatttctctgtgctatacaaataaacctacaaaatgtgatcaggaaatcaataagagaatgtaaaaaatagttcatttattgagtgataggattctggatcataaaagatttattctagtcttgatgttataagtcttgagttcatacttggcttgtgtagtagtgtttataaatgacctgtatagtttgacttcatttagaaaagacaagtgaactctgctatatcctcatgtgaaacccaggagctaatctgtatacatcttcattctagaagtgttcattcatttatgcatttagtcatgtacacatttatccttacttatccattgatgtgattcagacccagatgatctggtggcagcatggacaggcacttgtcttcagaatgctagccacctagaaaagccctccaggactctactcagagtccaaaagagttgtttttcaagttacatagttgtgtcttaaagtaattcacatacaaatggaaaatcatacaccatggaattacatattaaatcatttttccttagttatattttatattttttagagtgatcatagttttccatgagaatttgcctagttgtgaggccttgtagatactaattaactcatgctgtatgatgattctgtataaagaaagcttaaatcaatacgtacgttctgaagaaaaaaaaaatctctttgcagtacacaaagagaaaaaaacaaacctaaaaagagttcctgaaaatgactagtaactaagtggtttgaaagagttaatattgtttcctacaggcctgattaataaagacattacctatccctatattgaaaaagtggacatggtttctagttctgtttcaggttgatttatgtggggagagtgtgatgacatttatgtactaaatacttagtgcttttaattcagtttacatttaatctataaatgcaaaccatgttaaaggatgcttgacaaaaataaacttgaaagccagcattaaccttccaaaccagctgaaggtgcttaaaagacaataagggtaaaatttcattatacagacttcaagtgggtttttaaaaaatctatagactttccaactaaaatgatgaatgctgttctgattctaattgacaagtgttatatataaaagagttcttgccttcattcttatcaaaactgtggggatttccaatgataggacaatattatgtgggtggaaacttctcagaagaatagagaacttatcagtatttacttaggttctattacattcagagccataaaagaaactacactcataaatttatagacagtcaaggatattgcctcttccccaaagaggctagatattaaaggagtggagcgaatgagctcaaatcatgaagtggtttcaatattggaagagttttcccccttcatatttcaacttgtaactaatatgttatgaagaattgctggctagctaactttgagggtttggcagaagaaaacagtcttcaccactttttcttacaaatgttctttttcttctacaattagtacttaatgataatatcgaccctttaatgagttactgtagattaatgattaccacacttgttcaaatatatttaggattccaactttgcagataaagaaagaggtttatagaggttaagaatcttgcccaaaatcacacagcagggacaagatgtaagcctgtttttttctttgcttcctatttctgctgtcacaaattaccacgaactgagtgttgtgaacaacacaaatctattattttacagctcgaggtcagaagtacaaaaggggttttactgggctaaaatcaaggtgtcaacaggggtgcattcctctgaagaagccaggaaaatctttttccttcccttttttagcttccagggtcttcctccattttttggctccattccttggccccttccgccatcttccttcttcaaagcccacaatttcattacccaacctcagcttctgctattacatctccttttctgacccttcttcctctctttttcatcctttaaggacccttgcgattatatcagacccacttagataatccaggacaatctcctctatttcaaaacccttaatcacatctgcaaagtcacttttgacatttaaggtaacattcagtttctaggcattagggcaactgtgagaggccattattctgcctactacaaaagctaaagatctgggtaagtatagtgcagttgtgtgcatacagcagttctcctttatctgtgggggatatgtcccaagaccccaagtagatgcctgaaaccatgaatagcactgaactctgtatatattatgtttttttcctatacatacatacttatcataaagtttaatttataaattaggcatagtaaaagattaacaacaattgctaataataaaacaggacaatcacaacaatatactgtaatagaagtcatgtgaatatggtctctttaaaaaaaaataaatatataaatatataaatataaatatatatatatatatatttttttttagatggagttttgctcttgttgcccaggctggagtgcagtggtgccatctcagctcactgcaacctccgcctcctgggttcaagcaattctcctgcctcagcctcccaagtagttgggattacaggcatgcaccaccatggctgtctaattttgtatttttagtagagatggggtttctccatgttggtcaggctggtctcgaactcccaacttcaggtaatctgcctgccttggactcccaaagtgcagggattacaggtgtgagccactgcgacaggcctaaaatatcttactgtactttattcacccttcttaggcatatccaaattgtcagtactattaactcttgccctttggggccattattaggtaaaataagatcaactgtcacagtatcacagtgattgtgttacttgaactgtgacagttgatctgatgaccaagatggctactaagtgactaatggctgaatagggtgtacagagtggattcaggacaaaggaatgattcacatccagagcaggatgacatgaaatgtcatcatgctactcagaacagtgaccatttagaacttatacattgtttatttttagaattttcagtttaatatttttagactacagttgactggtgttaactgcaactgcagaaaacgaaaccttggataagggaagactgttgtattttgatattaatatgtcaatataatttagtagagaaaaaatacaatcacagagattaatgatcactacaatgattacggtagtgtaatataatagaaatagctttgaatctggaaaaattctggcttcatcatttactaactgtataacatcagataaatatcttagtgttgtctctttagaggtgatgtggtggtgagttataaggaatgttgttccttctccttcatttttagaaaataacaaagatagagaaggcagacaatatagtacatgttgtacttagatgttataagtaatgtctaataataattacatttgcaaaaactattttctaaatatattaaacattttgtgggccttatttttattttacaaataatattctgctgctcaatgtgctctttttgttcctcctctgatattcaatgtctgcttgtttttttgttttttttttttctgtaatgcctcttaaatttaggaatctgaattaattcattagcttgatgatggctttttctcattccattttaggaacttaatttttagcatgtaattttctgtattgttgtttgctggtataggtgtacaactagtattttttatgaaaaacaaatcctgcattagccttttaaaaatcatttataaaataaatcccaacctcatattataggaaagttatgatataaagtatcacctctgcctcgtcattccctcactttgatcccattctcagagggaactcctaactgttgggttttaattctttttctttagaatgttaccttataattcttgatcacatgcttgtcaactttttaaacaattgttgactcctgatttgaaaggctaggatctggccaatttaattacaccatctttccttgcccctcctttcaatatttgacatttatattttaaattttgttcttctattgtttacttttacaactgaaaataatatgggtaagcattcattttttttttcaacagagtctatactcttcactttccagataaggtattaattctcctactcatttcctcaagttttcctttcttcagcagcttaactttggtcaggtgtcaagtttgtttatatttacagttttcctataaccacctccaactattctttttgtgaatatgttgatttttttttttttttttttgagacagaattttgttcttgttgcccaggctggagtacaatggcatgatcttggctcaccacactctccacctcctgggttcaagtgattctcctgcctcagcctcccgagtagctgggattacaggcatgtgccatcatgcccagctaattttgtatttttcatagagacggggtttctccatgttggtcaggctggtcttgaattcccaacctcaggtgatccacctgcctcaacctctgaaagtgctgggattacaggtgtgagccaccgtgcccggacacattgactttaaagttggaaatgtatgaacaacattgccaaaccacaaatattatttgatgctgagtcacatagtgtactatgttctttgaagtagtttcactctcaggaaacctagggcactcatgggaacaagttcaccatgtgaaaatggattctctctcttttttttttaactcaattgcttgaaatcatttcaaatttacattttctttagatttatatttacttaatataataccattccaaatttacttgtatttgctttatttgattttgaaagtttcatgcagatttgtttttatcctgaaatatcaaattgtctttcattttgtttcctgcactaaatttgcctttatcttatcctcagttttttaccccctcaaagttttatattgtctcagattttttccccttggaaatgtccttcatggagctctctatattgttccttcttcattcagaatgtgtggcctctttaatcttgctgtgcagctgtcattctccaaatcccctcaatttattttttggatgagagtcttattttatttgactcaatataattttgcttatgtattattgttttaacttttatggagtctatcagattgtatattaataatgtgagatattagagattggtttatcttatacccatgactgctttctaattcctctcatttagatcatgggacatgaggctgcccttatttctgaaatagtgtacaggaaaacaccagggaacaagtatccagaatcatgactgctaggttaaaaaggcatcatccaagtatggacagagaattcactaatgaagtccaaataggaagaacaagagaatatgttgggagaggaaaaggaatgaggcatgatgtaaagggtggtaaaccttgttttctaatccttgtctggattagggtagaatagaggcacaacagtgtctgcctacatttcctaaggcatccttcaatagagggagtagtcatcttgtttatcctaactggaactcttgtttttggttgacttcctaagatgtcagtaagggatgatatggtattatgagaacttacagatagcctcatataggattctacagatcctacagctaacccatgtagcctcatatagactctatgcaaaaattgttaaagtttaagataatatacataactagaataatatataatgctcacaaattagatgatttcataaatcatggttgtcaactctttgcaatttcatcaataaagttatagtgtttccagtgaaaagccaagcatgatttttagtgaatattaataagctcatgctaaacatctctatgccaatcaaaggcataagaaagtcaagaaaatcttgaaggcaatattttatctgcttttatgcatgtatggcacattttataggtttaaaaaattaaaataaacaaataaatagaaccaattatataaccagaaagaagtttcagagactaaaggtatcataagcaaaacagaaaatacatttgaagcctaaaaagtaagcaatggaaatatgtattatgccaaaaagaaaaagtagaaagacaacaaaagtatgaaataaaaaacaggagaaaaagaaaactaatttaggaagtacaactagtagaaataagaacaagaaagtgaaagcaaagaaatgggaaagaagaactgatcagaggggaaaaaagaaaaactagaaaatattttcaaagtttaccaggacatgtttcaaaattgaactttcttgactaactcaattctttctttacttattctgcttctaaaccttcctagaatcctccttctattggaaatgaaggaagcagcctgggataatagactcttcacttttttccttcctagtcacaggttatgtgtgtgtgtttgtgtgcatctgatgaaataatatatacagagtaaatatgtatgaaaattaggaaaaggccagtatttatttattagcttcttttacctttactatcatttttaatatctgttctttagtcagtttaaggaaatatcaagtagaggctcattatactccaaaatgcaaatatgtttctgagactttaaacaccacattgtctaacttcataatgctagaattctgttcctttatactcataccaaaattttcttttttcagggattattttgttaatacattctgccttctttcctcacatctgtcaacaagcaatgactgcctctttatcttccaacttttttcttttctcaaattaccaatgtcttttttacagtcaagtttatttttatagattttattttatttatctaatttgttttattagactgtgctgctgaattttaccttctatggcatttttttcagtgaaaatccactctcttgattttgcttgacttgctgacctttcttttcctttccctctgtcccttcctccctctctccctccctccctcctttccttccttccttctctcctcctccttcttctcttctcttttctcgctccttccttccttccttccttccttccttccttccttccttccttccttccttccttccttctcccttcccttcccttcccttcccttcccttcccttcccttccctttctcttcttctttctttttcagacaggacctcactctgtcacccaggctgagtgtgatttcagctcactgcagccttgacttccaggctcaagagatcctcctgcctcagccttccaagtagctgggactacaggtgcctgccaccatgcctggctaatttttgtattttttgtagagatggggttttgccacgtggcccattctggtcttgaactcctgggctcaagcagtctgcctaactcaagattcctaaagtgctgggactacaggtgtgagccactgcacctggcctgaccattcattctgtatcttctatgttgttgttgttttttaatttgaggagtatactttttcttttattttttcgttaaatagttccttagaatattttcagtcttacataatcttcctatacattctcatttgttttcttgatgtaagatgatttctaggtttttggttttccctatgaccagctcacatatgtccctgagacagtttctctactaaagcatttatttatttattcaagaaatgtgtgagtgcaaattatgtgctaaacattttagcaacacattctttcttctgctgtccttaacctgcactccatttcactggaatggccacattcctattatcattcagtactcactagttcacattagaaattttatattcgcaaacagggctgagtgcggtggctcatgcctgtaatcccaacactttgggaggctgaggcaggcagatcacgaggtcaggagatggaggccattctggccaacatggtgaaaccctgtctctactaaaatacaaaaaatcagctgagcgtggtggcacacacctgtagtcccaactactggggaggctgagagaggggaatcacttgaacctgggaggcggaggttgcagtgagtggagatcgtgccagtgcactccagcctggcaacagagcaagactctgtctcaggaaaaaaaaaaaaaaggaattttatattagcaaacagcacactgaagtcacaaatttttatctatccatatattttacttccttcttctagacatcaagaaaagtaattatttttttttaaaatgtcattcccagatgactctaatcagatctacctctgtgcactgttgaaacagaatccagagtcctaatctggaccatggaaactgagttgctaggacggacttacagaatctgcattagtagcaaatgttctaggtgattcacattcacgttacattttaagaaccactgctgtatgttgttttcttttcttgttataaatgatatcgtcatatatatttatacaaaaatgtacatatgcatatatgcatatgtatgtaatgttccatacaaataattatatcattgcaatagatgcctgagcaggaaatgatagttaaaaagaaaaccattttaatatatcttccactattccaatcgcttgcattctttctccaatttaattctataatatagtttttctagttgtatatctatcctcttttcagtccttttcattggtttccttcctaccattcatttatatgctggtattccccagggagaggtccttctttggtccttgtcttttcttctacacttaaagttttgcagaggtcacttaggtatttctcaagaaccatgcttagtctgcatctcccactttgtgttcatttaatgaattaaaaggtcaacataaaatatatgtagggctgggcacggtggctcatgcctgtaatcccagcactttgggaggccgaggcaagtggatcatgaggtcaggagttcgagaccagcctgaccaacatgttgaaaccccgtctctactgaaaatataaaaattagccgagtgtggtggcatgtgcctgtaatcccagctactagggaggctgaggcaggagaatcacttgaatctgggaggcagaggttgtagtgagccaagatcatgccactgcactccagcctgggtgacagagcgagactccatctcaaaaaaaaaaaattatatgtagagttttctaatgctaaaatttttcaatggtcaatgtttttccctttccctgtgtaatttactcattaaccgttccttcctaatatggtagccttgttattgcctccctatcatctagaaagcaagttaagacaagtagattatgattttatgggaaaccaaagtcttgagaaacaaaacaaaacccactctttattctttactctgaggttaagagaaaaaaaaaaagctgcattagttagctattgctacaaaatgctgcatgacaaaagagtcataaaactttcagtggcttattgatattttatttttatacttaaaaggctgtaataatttagctgatctaggctaggcttttctgaatgagttaaatggcaggcttctgatttggcttcaggtctgaggtgcaggtggaaggagcagcagagatattggaaaatctttttttttggtggcagatcccaggtgcacaagagaacaagcccaaccatgcaagcaattacattatgttcattcgcatttccttagtcaaagcggtttcagggcaagcccaaccttagtgggatggggaaatataccccacccacagtgggaggctttgtaaaattacatagcacagggtgtggaggtataatcctagtactaggcactgagtaattgcgacaataatccaatctacatcagagggacagtatatgaatctgaggattcttggtatacataattttttgtttgttttgccattatcagaaactttctcagatgatttttttagagggtttcacttacttaattaaaaaggttactactcatttacttgtgttttatcattagttcttttactgtagaagtggcagaagacagagaagaaagggcctcagtctcttgcctgagtctgagacctgtgtttcaaattgtccgataagtaatctacagacagtttttcctcaacaggcacccataattttattaattctttgtttatcttaagcctgtggctccttaatttctcatcatcaaatctccccaggttatcttcaagtttttcttctttctcatccttatacccaatctgtgaacaaatcctgtcagtttcgatggagtattcctttcaagtcccctcagtcaatttttatttcattaagtgttttcatttttaaccaggagttttacttcaaaaacctctggatccagaggcatcttataaaaaaagaaacctgagagtgtcccctgtttaaagggctcactcaactgctggagcccgggctatcttctctttcccattcaccactcaaactacatggaatactgacgtcaaaactctcactttttagatgattctcttactatctgaatatcacctacattgccttctccactcagcaaagcctgattcatcttccagagcaaagtagggtgtaatctttgctcttaagcctttcaggattctcttacgaagtcagtggccttctcctggcattctcactgcattctgcacaactacccattcaagaattgtttcatggattctttacatttgattataaaagcattaaaagatcctcataaaaatcagaggacatataaagtgtaaagaagaaaatataatcactgttcttggcttaagagaatacagttaacattttggtactatatttttatggcaggattacctcatttaacaatatagcatagcatttttccaattgtagtctattataaaaattaattttgctgtttctctccccccacagattgttcattcctttaaggatcatcatttttcattttacaccttatttccagtgcttggtacaatccttggcaaataggacacatttaattaacagttgtgtgaatgttaaatgaaatgggaatattttattaagtccgaaataattcagtgaacaaagaagcataactataagccagtgacagactacaaaataggtagtattttactaaagtctggatatcttgttatgttaaatattatttttgaaagcctgacattgtgtcaaggcaatagttatgctataattctgtgttaatcctgttttctatttttttgtcctcaggaaattatttgctataagaaatagagtcacatgagactttaaatattagtcaaataatgctgtagttttagcactggtaagagatacaaggggttaagtcactctagtctttcttcttcttcttttaaagacatgtaacttctttgtctgatctccttatggtccttgtcacaactgtatggcttttaatcactcatacattcagtgagttactgcactgctggaaccttaataacgttctagtttgtttggatgatcttcctgataaagtcctgacaatctctcagtataatggaaagacaatcaaaataaaaaatgctttaagagttcaggtagtggagcatactattatttttcacacagtgcaaggatattaaaatactgactttcattcatttgattgagttggtgatgaaatccaagaaaaattgaaaatttgaattattctactgccagtagggactgtatatcatgaacagaaaagcaggcatatgtaactgactcttgtagcataatctgaaaagtgtcagcttgccctccttttatatgaatttctgcagtatatctaagcaattaattcattatatagctctcatatttgcaatcaccacctggaattttataaaaatataaaatgtcatcttcaatatacatagtttgaatagttaaaatgacgtcttacattgatagagtgtttcagttttttcaagatgctttctgttaaagtatctcatttgactcaacagccctctgaaagtaagtagtggaactctgataattctccagcctgttccataccctttgcctccttccttcttattaatttccaatttatctttctttcttttaaaggaggcagtttggtgtgatggaaagagcatagaatatgaattcagatatttagctctatccttgtcttgaattactttgacattggagggatcattttcagttctctgaaccttggttttctaattggcaaaataataatgatgctaaagtgtactcccaatgttgtgaggattaattaaggtgaaattggggaaaccttaaaagagcaaatgtaacattcatgttagcttcttttaagggcagcttgggatgatggaaagagaacagatctttgcttcatggcttcttacttatggtacttgagcaagtaatctaccctttctgagcttcatttttctaagtgtgaaatgggtataacaatacctgtcttgtgaagctgctgaaagataaggtgacatatatgctgattctagcatagttcctaactcagagtcatatatcctattgaaagtgtttccctttctttcatccttcctccctacctcttaccactcctctttcccacctcctgtctttccactttactcttcatcctcctatctcaactttgtgtgacagaaaaagataaagaacgtgattggagaatctcaagatttaataatttagaaagtatttagcttagaaattcttttttctaaagaaaattgtaattttcagttgaggcaggagatggggattcaagttctccctccttttgagaaaagaccccttcctggcccactttgaaatctccattgaatcctgtaaactttgtgcagtagaatttggaaaaccactggtgtagccgaaccctctcaacttgcagatggaaaaactgaatttgagggaagttgagatacttgcctaagctcgtgaggctgggaagtggtgagctaagactagaactcagtcgttctttgccttaccctattcccttagtaagtaaagatacagagtgcaaatatgtataatcagattcatctcttgaaagatgttacagtctatttgtgtagatggaactcacattaaaagatgaggaaagtaaagtagtatgatataacaatgaaatgggtgaaataggtaaatccattaagaagagacgggcatggatgatcactgttttggggggctggacactgcaaactttatgagggcaggaatttctttgctgtgctcattattattttattcccagtgcgtagagaagtgcctggtttcctatagggaattaatactttttaaaaattaaataaatgaatggctaaatgagatgtaaatgaaccagtcctagaaaaagggcaagggtttagaaaagttagatcagagtgtttaaacaatgggctggtcttcattgttgggcaatgaaatatgttgagtgagtcacgatttacatataaaagtgtcggccgggagcagtggctcaagcctgtaatcccagcactttgggaggccgaggcgggtggatcacaaggtcaggagattgagaccatcctggctaacatggtgaaactccgtctctactaaaaatacaaaaaattagccaggcgtggttgtgggtgcctgtagtcccagctactcgggaggctgaggcaggagaatggcatgaacccaggaggtgagccgagatcgccccactgcactccagcctgggcgacagagcaagactccgtctcaaaaaaaaaaaaagtgtcattatgtcatggaaattgtttagatttatatgtgatacatacataaaatatatttggaccaatatgcttgtatgtacacttggtcacaagttaaaatgtgtgtctcactgtaagtcatgattaaaaatgtttgaaaaatatggttttagacaaaggaaatactaaagtttgaggcaggcatgtgaatgttttgtgggaaaatagtgagtttaacagttttgctaaatctgaggtgaagagaatagtgaaatcaagtctatccaggggaagaagaatccatttggctctttagctattaaagaattacagggactccacttcacctcctgactgtctccatcatccacaataagatttaacaaagctacatgttaggaagattagacagcttaaactttcaggagtgattcactcggattggaactggggggagtagacagagaacgatgcaaaagaggcagcacagggtaggaaagttatggctttaactggtgacacctggtaaagaaaaccagtttcttgggcacggtttgggtagatgaggttaaaaaaaaaaagtgaatgtgtgatgacaaaatggagaccaaattgtgaacaatttcacagaagggctgtctgagaaaaaaacaaacggaaacaaaaaacaaaacaaagaaagcattaagagaacaaaaagtaggagttaggagaaggttaggatggaggtgaaaatctttgtggtcaactagggatagtcaatagagatctctagacattgatgagaaattaaagaaggccagaaggtctttaaaaagattactttgaaagaaagagattccttctcccctgaaatctagctattaagaccagaggggatgggagggatactggatatagataacaaaacttaaacagttaataaatgcttctttctttaatttgaacactgactagaacagcagttttaatcaacaatgtggcattagcctactacttttgtgttagtaacaagagacacttttaagtgtgtaaaaacatttactttgctaggtaagaagcatactctttatatgccctaaatttgtttaatatactaccattacttgagaaattgtataactttgaccactctccatattatggctaaattaggaagttagaaggaagattgagtattgtatgaaggttttagatttcatgtccttaaaactacttaaaataagttcaatattgatgaaaaaagttgagaaagttagaaatctaattacaaatgtctgaaatatgtccacataagttgagcttttccttttggttggagtttgtctgaattcagaggaaattcagaggtcaagaatgatgaataataataattattattttttttggagatggaattattattttttaatacaaataataaatattattttttgtcgctctgttgcccaggctggagtgcagtggcgcgatcttggctcactgcaacctccgcctcccagattcacgccattctcctgccttagcctccggagtagctggtattacaggtgcctgccaccacgcccaactaatttttgtatttttagtagatacgaggtgtcaccgtgttggccaggatggtcttgatctcttgacctcatgatctgcctgcctggacctcccaaagtgctgggattacaggtgtgagccactgtgcctggcctattatttattaattaattaatttattttttgagacggagtcttgctctgtcttccaggctggagtgcagtggtgtgatctcggctcagtgccaacctctgcctcccgggttcaagcgattctcctgcctcagcctcccgagtagctgagactactggtacatgccaacacgcccagctaatttttgtatttttagtagacacaagctttcaccatgttggccaggatggtctcaatctcttgacctcgtgatctgcccgcctgggcctcccaaagtgttgggatcacaggcgtgagccactgtgcctggccaaataattattttttaaaaaaaccatggcttaagttatttatttttaaaaggaagccaaatagtacccctctgttgtttattaaaggaaatatatgacattatagatgtcctgtgagcacatgtgtatatgagtctatataattaagagaaagatagaacatgagcctatgcatgtttatgtgtgtgcgtgtatttatatttatgtatgtgtgtgtttgtgtgtgtgtaatgaaactgtctctaggcaaggccaggtacaaaggtccatcatttaagtctcagagctaaataaacatgtgaggttataattattttattgagcttttttattttatgacccactaatggcttatggatcagttatattgataagcactgaaaacatacagcttcagagtttttttattttttcatttattgtttttattttaaagtgccaagaagaaaatgcccagttcccagccttatttttcatttataataaaccatagaagtacaatttatattatagggtagaaactaaagtgtatgtagggtgtatataactggcaatttgtatgcgacaataacgtactttcaatttctgatgaaaattgttgaacttcatttttgaatttaaaattaaatttatttttaaaattttttttattatgaatttggggcgtacacatgcaggtttgttacatggacatactgtgtaatggtgagatttgggcttctagtgtacccatcattcaaatagtgcatattgcacccaaaagaccatttttcaacactcacctccctcctgttctccaatttttttggagtctcctgtgtctattgtttccatctttacatccatgtccattgtttatctcccacttaaaagttagaacatgtggtatttgattttctgtttctaagttatttcacttggcattccagttccatacatacagctgcaaaatacatgattttattctttctttattgctgtgtagtattccatggcatatatataccacattttctttacccaatcattcattgatgaatacttgggttgattccatgactttgctattgtgaacagtgctgcaataaacataagagtgcaccaccaatagggtataagcattcccttttctccacacccttgacaaaattgttgaaattctgcatttgagtgtatgtcttgaaatcaactattcaatatcaggttaatgtttctttttgcactttttattatggcaaaattaaccccgttatgtcatttagcatttgtgagaagataacgtaatacaaacatagtttttaaaatttgttgttgttttgtttttacatgtactgtagattatgtatgccatattttatcaagagttgagatgctagaaattcctgtctgtgtaatttcctgtgggaactacctgtagctttctgcccaaagaaagaggggcggggcagggctatgcaggccagtttaatctttccaaatttgccagccagataaattcctttacctgctctggggcaggtgaatgaatgcatgcagtgaggtcaggagtcagctccagctgtatagaaggaaacatcaggagtgaggagtgtctcctcccctcccagtgttaacatttctaatattcatgggtagattcaattgaaaactaagtataaacattttgtttaatgtagtgcttgattatctgtcttatctattttcaagtaaaactaaaaactgagtatttagctttaaaattatttagcttctctcaaactctcagttttatcaacatcttgtcaattttaattgataacaccttcagcagagtttgtaggaatgaaatagaagcatttcccagttttgcttcaagagtctgaaatattttggttttttaagattatattgccattacaaagaaaaccatttgacttgatatatgtatatgttccccatggtcagagcctaccattaaattttctaaagattcttaggttaatttttttaactgtgtactttcagtgctaaaatatttattagaatcacactatggggaatgagaaatgttagactttatcaatatcgttgtctattggatcctctacatttacagtcaaattcttcaagtctcatcatatgtacagaaattgaagaacagttaatttctaggtgactaaatttggaaacacatgtaaagagagcagaagggcaatggaaatttacgcaagagagaactacctattttctgaatttgttaatatttaaaataggacccctacccaaactaaatgaaactaaaaattcagttcttgtttttctgctagaccttgcatttctttgtattactatttgcaccattaaaaatatatatataaatatatattttaaaaagttctctgccgggcgtggtggctcacacctgtaaacccagcactttgggaggccgaagtgggcagatcacctgaggttgggagtttaagaccagtctgaccgatatggagaaaccccgtctctactaaaaatacaaaattagtcggatgtggtggcacatgcctgtaatcccagctacttggaaggctgaggcaggagaatcgcttgaacccaggagggggaggctgcagtgagccgagatcgtgctattgcactccagcttgggcaacaagagcgaaactccgttcaaaaaaagaaaaaagaaaaaaaattatgatgcattagcttacataaatatacattgaaatttaggccgggtgtggtggctcacgcctgtaatcccaccacgttgggaggccgaggcaggcggatcgcctgagctcaggagatcgagacaagcctgggcaacatggcggaaccccgtatctacaaaaaattgaaaaaattaaccagggcgtggtggcgggtgcctgtgatcccagctccttggtaggttgaggtgggaggatcgcttgagcccaggaggcccaggctgcagtgagttgagatcccaccactgcactccagcctgagtgacaaatggaatttaaatagtattagggacaaaaggattaatgaacacggtttaaaggaattctgcatattagaattctggaatacttccgcaggcattctaaagtcctaaaacctgttgttttacggattctaaaattcagttttttgtacagcggattttcaaacaattttttttcttttactgaggacgttgaaattcatagcacaggatcttgagtccaccctgaaaactaaagaaagtggcttgttagactcttcagtcccaaaatataatgtgaaatgagaatgcatgttgatatcagataaatttaggctttgaatcttggctttgtcaagcggtatgtattcttgctcaagctagtgtacctttttgagacttagtttgctcatgtataaagctggagatagctacgcatcttttctttttcttttttcttttttgagatggagtttagctcttgttgcccagactggagtgcaatcgcgcgatctgatctttgctcaccacgacttccgcctcccgagttcaagcgattctcctgcctcagcctcccaagcagctgggattgcaggcacgtgccaccacgcctggctaatttgtatttttagtagagccggggtttctccatgttggtcaggctggtctcgaactcccgacctcaggtgatctgcccgcctcggcctcccgaagtgatagaattacatgcatggccaccccgctcggccggcaacgcataattttaaagggatatgaaagggcttgaaaaatatctagcacagaattggcccttgttatttgttaagcacagtattatttccaagggaactctcccaaatcatccctgaccaaactactacccttattaagagatagattggcctcttagattatatatcccttagctttgctcatcaatagaggcaaaggattcatttatctaaaggaataaaaaacaattgcccttgaagttagtggattcgtgcacctaaaaaatggcctgcatatggtaccaatcaaatcttttatttcttgcatattttgcagataatacgattttcaaatacaggttgtatggaatcaagtgaatcatctttaggagaagactgatttttagtaacctaaaatttttagtaatcaaatctggcagagcccagatttgaactgaggagactgtctttagagccatacacttattcaggacagtaaatattcagagataaaaccagtgtagaaattaatatcagggctatatcattaacaagattctatcacttcatttgcatttttttttttttttggtgtatgtgtctcttatataaagaaatagcgatgctgtgaatgcctacatatttgttgaacaaacattttttaaaattagaaactggataacaagagagaataagaaaaatgttctgcatttgttaaactaccatggaggtgaaggaagattttacaagctgaaaaatatgaaaaaaaaagaacatttctttatcttctgtagtattgataaataacatatttccagaagattatccatcacatcaatgttttcaagtttatttgtatcaatttgaggaaagtagtctatcatgacacttttaattgattaggatataccatattaccaaaaatagcaaaaacatatcacaaaggtttatgatttatataacaggaaaaacaaccttaactttttttttttgatgttatagaaaaaagtgttattttttggaaaaattctcccatacaatctgagaacaatataattcttattaaatgtatgcttaatagcctattagataatttgcttatctatgtgctatacctggtaacttttggtttattaatgtaaattttaaaaagttcctcaagaattaataataacacaaaagtttaataagattaactggaaagtacataatatctaaggtaaaattaaatcaaactttgggaaaaatcatttccccttctttgagcagcgcacattttaattgtatacgtgcatagccatggcagagcagcacatattgagtgcccaaagtgtcaaagctggcagcccaggctgaatcctgtagcatggctgcactctgataagctactacaggtcttctctctgatacttagtttgaactttaaaaataatttttatcagtgaaaccaagagtgaatgataaagataatagctaaagtaaaacaaaattcaggcggaggtgaagtaagtccaactttattaattttttgtattgaagtatggtactgaaataatattttaccatattttccatgaaccttgccagaaaatatatctgggataattaagtgttatacatattactacaaaggaagtaaggactcttcattttcaatcctaatgaccttgaacaagtaacttcgtttctctggatctcatttctttttctttttcttttttttttttttttttttgagacagaatctcacccaggctggaatgcagtggcgtgatctcggctcactgcaacctctgcctcctgggttcaagtgattctcttgcctcagcctcccgagtaaccgggactacatgcgtcagccaccacactcggctaatttttgtattttttattttagcggagacggagtttcgccatgttgggcaggctggactcgaactcctggcctcaggtgatccacctgcctcggtatcccaaggtgctaggattacaggcgtgagccactggtcccggccggatctcattttctcaccagaggatggaattagatcactggttttcaaacggtgctctgcagagtcctacagattagaaatgctttttagtctcccacacaattctgactttgtattttatccattagcttcatgcttggaatttatttagataattccataaagtaaaggtttgaaaagcccctggactatattacatctgaaatttctttacttttaacactttatgagccatttatgtttttcctaattcctatacttgagtcagacacaggagttaccatacaaattttgtgcttttccacttctggaactgccttatactccagacttttcatggaatatccatctgctcttcttactagtagaaattccatttatttttcaaggttcaactctggctatccctgagatgaattgaattatcagccaggaaaaaactttcgttccctggaattttgaaaacagtaagttagtattatttttgagcacttacctgttctttgttctgttagggttgctatgtacttgatgagtttctgtcattcctacaggagctgggcaaatctgataagcacgagtagggcgatgaatagaagataatggtgggaccccaaggcactttctaggatgtacacatttcatcaagagggggtgtcacagccttagtgagatttctgtactgtccacagggaaatttaagatcaacatggccaaattctatttcaataaaaattatgcatctaaattttcaatgaaatttttgacatctgaaaactcatttataaaaataaaaatgcaaaatgcccaaacaaaaaaaaatgtgtaatggccacttgtatacacttgtatacacctctggactctggactgcataccctgtgcctgtcttcatcctctaacataacataatctacttgcacctttgttcagggaaattttgtgaattttgttggaaatgttcgatagcctttgtgtataagcttgaataaaatcatgatattgaagtttttaaaaatctagtgcaaacaactgtcaagcgcaatatcacaatatcctcgagaaaatcaagttgtgaagtggatcatcctcaaatttaaaatcttttggtctcaccctcagaatatcccctacttgaggctttgcagtgtaaatgccttcctgaataaaaatgagattaaggaatatttcacagttccttaagcagcagaaagattagctagttgcctagaaaaaattaaaaatctcatctggaaatttgggaggattttaatgggacctccttgtattgatcttgaaagatatagtttgtattaaaagcctctcttctcctctcccctcccctcccctcccttctgctccatttttagaaggagtctctctctgttacccaggctggaagtgcagtggcacaatctttgctcactgcaacctccgcctcccaggttcaagcgactctcctgcctcagcctcccgagtagctgggactacaggcttgcaccaccatgctcagctaatttttgtatctttttatagagatggggtttcaccatgttgcccaggctggtcttgaactcctgacctcaggtgacctgcctgccttggcctcccaaagtgctgggattacaggtgtgagccaccgccccccggctggtttttgttttgttttgttttggatactttcctgatcgccttttgatgtttgtcactagaacactgacaagtttatattcttttaaataccacttgctggtcgtcatgcttgctttttctttattaagaatatgtttgaattttaacctgtaaacacaaaatttgacacagtcatatcttgattctgtatctaacagcagtagtgtttataacatatttacaccattgtttcattattgttggctgaagtaattcctagttaacttttcattttctggttaaaattgtaatctaattccgtgttctgtttatcactaaataacagagtaatcagtagtgactgaatattaggagggacaattgaacacttttaaactcaatgacatgtgaactgaacatgcgcaggtatcataaaacaaagtttgaaatgatttgtttataacaaaacaatagctctttaatgaggaaatggacaacagcatgttatgttttgctaaaataaatataaaatggattatatttctaaaaatgatgaatgttgctatattaaaatatttattcatttatttcaaataagtcacttaattttttttttaaattttatcttaataaattagtcaagggatggttactttctcttttcaatgcaaatgtaattccttaagtggttttcatggcccagggcatgactgcatttctctgcatcttttctctttaacagggctattaacattaagcaagcaaaagtgttctcttgttaaaaaggaacagtccacccattccacccagagaagttccctctggtgctcggcccctccctgcactcaggtctgcagtgaggccatttcttttctcagcttttgttacactgccccctgcatctcaccaagtggactcgcagtctaaattgttaaggtttctcatattttttcctccctaaaacgtaaacataccattggtgcaactcttccttgaagcttaatgtcgtgtatttaatgctggacttaggtaaatgaaaggtccgctctcttaaaactgagagaaattattcatttaaataggatgtatataatactttaaaaactgtgtatctaatatctcttaaaatttattataataacacttattaaggattagacaaggtgataccttagcaagtgttattagttacagtttcttagatatattatctctgtattgatatgtctcgatcaataataaacagcactgatataactgaccttttagtacagtttgctatacacatggacactttcacataaaatacttcatgaattatcacaactttattattagtagtattacagattcaaaagtaaagttaaggaatattcaagttagggaagccaagtagatggctgcttttcagaacgtaaatttttattgttttaatgaaagaaaatatggcaaaattggcaatatattttccttttgacccaacgtgtcattaagaagaattctaagtaaattagaatgtttagctcagcatttctttaaatagaaattgttagaaatgaatcacatgactaaataggagaatggctaagtatagtgtggtacatcttcatgatgagcaataaacagtcattacgaatcatgttttcagtaaaatggaaaatggaaaatggaaaaaagctctctggttaataataattgaaaagagtgatatttagaaatgtatagtccttctgattgcaattgtggaaacaacctttgagttctgagccagagtactccagtgcacaaggcttctgcccatctcaagggcctccctggaattctcctggccatcctctttgcctggctacttcttcaggttccagcttaagtgtttctttctcaggaaagcctttgctgatctgcaggaccacttcagccacattatgttccccagttacatgttctcacaaaactctaattttccttcatggtatatattatgattataattaatcaccttgtggtatctttcaaatgtctgtcctccccaatagactatcagcttcactgaagcagtaactgtgtccttgtttactcaatgcctgccccagtgactgggacatagaatgagctcagtaaacatttgttgaggaaatgaacaaatgagtgaattgcaaggcactctctgagcacttttgacataatttcattgagactccaccaaaaacttatgaagtagaaaccatatttattacattttatggataaggaaactaaattgtaaaggaagaaaattggccagagttatacagtaggcggacagctccaatgtaaacctgacgtctctgaatgttgtgcacaagctcttagccgccaattgtaagtggttgtactgaatgtaactaagataactatatttaaatggtcaactttgtaggtcaaatatgcagaaatattacaaatctttatattaatttgttaataaatttataaacatgttaaattctgaagaaaatatataaaaatggaaatggtggtagaattgcactggttcttatttttttcacacaattctacatttcacaaattccctataccaagtacttatcattttctataaaaaggaagaaaaccattaaagcatgttggagctaggtttcaagtgtgaatattttgacatcaaattccaaagagtttccactcatcaaaagagaaaagttgatcactatcttgtgaattggcacacaatttgcaattaatttttctgaacaatttaacccaaaatcaatgtcataaatatattttaataatgttcaatgtaaaattctatgtaaaaaactgcagaataagtagctacattaagcctataccatagaaactgttaattaaagttttgagctgattgaatatatttctttctatgtatagcttttatgctttttgacattttcctatcactaatactgattagcaatcaaatgtataccatccagttttaaagatacctaatttatttatttcaaacttcaatatttaagataaacttgcctttcaaaaattaattttgttcctcaaactcaccaaagtaaaacataatttaaaatctatctctatagatttcctcttatactttttattttggtttttcttccagtgattgctgccttgaccgtccctgctcttgaagtaagtacaaatgagcaaggaccctgaaaaactctgggctcagattgccctagtttgttagataattttgatggtacaggggcatgtattttgagatacagcatttggtagtctttggagttaagtcatactgccgacacagattctactggctgttgcagacactagcttccctactaggtctgctctagctgccaaccatatccttcatccaaagcatcagatgtgagccctgaatgattatatagggcccagttttattcaggccttaatgccagacttacagatgaatgaatgactgaatgaattacagtccctgccttaactggattcttaatttctagctcttctttcttgaccatcacatttgacttcttgaccttaaccttacaaatgaaactagctgtccttcctaaggacattgtccctacgatcagccttggccaaataattttcccttaagttttctgcatgtcttaaagtataagtctccattgtccctcttatagagacctcaacatgctttctggttgaaccttagcagtaccttttgttatattttaataaccagatttgagtaacttgatttggccatctttctttttccttcattgatcatatacatgttgaatctgtgttatgtacaaagtagtaagctaagcccttaggaagaaaataagatacctataaacaatagtccttgcctaagagtatttcacactttagttaaattagtaataattactatagttcttttgtagaaaccaatttcagttcatctgtacctttgtagatggaagctgaccaaattcaggcaaaaaacaaacaaacaaaaattttctatgctgaaagtttatagttgattttggaatttcactttctaaaagtgaatttaaaaactgagtagccaggcatggtggctcatgcctgtaatcccagcgcttcgggaggttgagccgggaggatctcttgaccccaggagtttgagaccacccgggcaacagagcaagaccccatctctacaaaaaataaaaaattagctgggtgtggtggcatgtgcctgtggtctcagcaatgtgggaagctgaggcaggaggatcacttgagcctgggagatcgaggcggcagtgagccgccatgatcacaccacttgcactccagcatgtgcgacagagcgagaccctgtctaaaaaaaaatgataagaaaaaactaggtaatgttaaatcccacttacttcaacaatttaaaaattggcaaatattaaaaacccagttttttactcatttctgaataatataaatgctttaaaactcattttgacaacctttatattccactataacagtatttaccttgggacaggctccttttgccaacttgcagacaggtttttcttttacatgtaattgtatgtgtagatcagcgattcttatatttttttattttatttatttatttgtttttaagtttaacatgccgttggctctagaagctgccatgtttaagaatttcgggatagacacatatttgatcttttatatttgttatttggtttgtacacgtaatatcactgatctgctcaacaaatctttaatggcttccaatcattcatgtaaacaaatctgaaattttctgtctagctctctccaaaccctccataaaatagtcccactcttactatccaatcacacttctcacatatcctttcaaacactaattatttgcctttctttgacccaaaagtcttcttttcttttgcctaccaatcaaaatttatctatcctttaaagcccagcttagacccagtttcatgatcactccagttctcaattatgaattttcctctgaatttcaggactaactagaattagaataatttcttttctcacttgttcatgctaattaagatgatcattatttccctccacaaagattgactccttgtattaggtcattctcacactgctataaggacatacctgaaactgggtaatttataaaagaaagagatttgactcacagttcctcaaggctggggaggcctcaggaaactcacaatcatggtggaaggggaagcaaacacggccttcttcacttggcagcagcaaggagaagtgccaagcaaaaggggaaaagccccttataaaaccatcagatctcttgagaactcactcactatcacgagaatagcatgagggtaaccatccctatgattcaattacctcccaccagatccctcccatgacatgtggggattatgaaaactacaattcaaaatgagatttgggtggggacacagacaaaccatatcactccttgagggtaggaaccatgctttatatttttctttatgtctttggactccagaaacaagggccacttattagggagtttagaaatcactgttgttaaatgtaatttgacaaaattggtcattggactttttttgttttgttttgttttactttgtttttgagatggagtctcactgtgttgcccagggtggagtgcggtggcgtgttcttggctcactgcaacctttgcctcccaggatcaagcaattcttctgcctcagcctcctgagttgccgggactacaggcgtgtgccaccatgcctggctattttttttttgtatttttagtagagacagggtttcatcatgttggccaggttggtcttgaacttctgacctcaagtgatctgcccacctcagcttcccaaagtgctgggattacaggcatgagccactatgcccggcctcattggacgttttggacaataagcttagaacaatacaatctttcttaggactttaaagcattagagactttagggattaatatagcaaattcttcattttacagatgagagaactgcgatttacacagggacagtatggatcagccattcttagtagcctttatctcagtatctttgatagcctttctcattctatttcctcaaatttaaaaaatgaatataaggagtgtgatgttttctgtctattaaaaagtatgaaaaggcactgtttcatcctcggtttggtcagaaaagcagaaaacacttcaggagtttgaagtaggagggatttaattccaggaacaaaatgctcacaaaactaatggaagacctggagaaatagaattcaggaaagaccactgttagcttttaggctcaccgctcactttggtgagtcaagaagctcccagcactgatcaaagaaaaggcctccaatatggaggtggctgaattccagaaaaataacccagaagccacaatagcatctcatatttgttggagccacgcatatattcacctgcagttactggaggaatggtaaaggtcctgcctttcttccaccttccaaattttacctgagtgcttctaaatggcagaatctgtgctgtgaaggaaacttatttttaaatgtattagcatcttagttctttatctcaatggtttgatgcctttcaatttaagggcaaatattcctacacatgtcaatatctcacaaattatttatctgctctaacactaaacagtaattgatgtttataataatggaattattaatgctggaagagaccagagataaactgaacctcatcttctcatttaaaaaactgaagtcacatagcaatggtgttgaagagccaacctttttgacctacctccatggctcagatggagtgttttcctgttatacttgtatctgaatttgcctactgctttatagttacattcaattgaactctataactttctgatttaataaggatttaaactacctaattatttagtgctaagaccatggttgagttttataagacacttcaaaaaattgtacatggggtcatacacacaggtgcaaactaaaggggagtttagattgctcattgctcttccaaggtgaaatcaccattttatctgatgacttacaaatgaaaaatctggccaataaatctatttagtcagatttctcaacattgtgaatgatcctcctggtagccagatattatgtctatcatgacatgaccgcttatttcatgttgacttgttgttctgtgtggaacttcctgtggcactagagttttcttaagtataaaccattccaaaatcacattgttattatgggttgctttgtcctcaggctctgtaggactccttttgggctattggtctttcaacatgcagttaggggataaaagtaaatcatttaatctatgcagcatgtcactcaatagtatacttttggaaattgtttccacaggagcaccagcgaaagcagccagtctgagatattgacactacagaaaaaactgacagcttactccttgtattgattctactcttctctacaaatatagactccgttccctaccacagccttgtaagtggtgcccgctgaggctgctaaattgctttgtaaattatttattacttggacaccttgtaaagacctcttttcttcttgtctgacttgcttgtgctttcgtatatactaaaaggtctcaaagtgtacactgaccacaacctccttatgaaatcctttccttcctatcttttattgcaaatatgatcttccttgcccatattatgactatgccttttgtcattggtttttatttctgatctattgcttataaaatatcataaatgtttatatgcacgtttggagcctggcactgggcacttaattagcatattctcaaattagaaagtttgaagtatttaaagaacatttatttaatgatgggaaagagtttctattaataaaaactgtttatcagagcaaatgcacatctttatttgcacttatgtggtagagtcaatgttctgaaaaagatggcaagtgttttctctcttttcttgattatttcttcttacttaggttttattttgtgattttctgaagaatttttaaaatgttcataatgtagataatgaaaacaatattttttgtccagtaaacaaaacaatttgagcagattgcgattgttcacttttagctaactgaaaccatatactcacatataaaatactcaatagaaaacgtcttcgcttaataatttgcattttcctgtctccctctcttagcttcctatattagtcagctcagcactagtataaatttggtgatttaggtccagagttatttcagtgcctcttatagtttggaaatccaagaagctactcctctcatccatccctcaaaattcattagtttgtgtttggaaagtacaggattttcaatcttgtctctgccatttatgagttctatgactttaagcaagtaaattagccctcataaacatcaacttctactatgaaatgaagtagtaataataatagtaataacatctatcccaaggattattggaagaataaatgtggtatatttggagtgttagaacgggcatatattaggtatcagtgatgtttacaacatgttactgatacaaaatttttttacttgaagatttacttttatgataattatattttatacaataccaataaatacatgttgagaataaaaaatgtagtgagtaattatacactaaaatcatagtatcttataggcaatttttttaggtcatagaaatttgagaagcacaaaaacacacttctaaaatcactataattctttttcttttctttcctttttttttttaagacaggatctggctctgttgcccaggctggagtgtagtggtgcgatctccgctcactgcaacctctgcctcctggggattcaagcaattctcgtgcctcagcctcccaagtagcgggattacaggcacatgccaccacagccagctaatttttgtatttttagtaaagaaggagtttcttcatgttggccaggctggtctcaaatacctgacctcaggtgatccatccgtcttggcctcccaaagtgctaagattacaggcgtgagccaccgcgtcaggccagatcactgtaattctcattgaaatgggaaatgcaagtcgcttagaggactaaggattagaccatgaagacttataagcagaagagtccagctatgtctagacaggccactgtggttaagagatgggcacacaaagaacaatgcttgccccaaacaagtggttttagacagtgaggcccttagccataagcttgaaatctgtttcaataatatcctctccaggccaggtttactccagagctgtgctggttttcttgtagactgctttgtgccagcacatattgctatgacttcatttcattttttccttacatactgaaggtaatcgcttttaagatgagttttctacacctgttttcatactcaattcctggcttgaaatgcttgtttctttacattattccaatgtttcaaggcccagttcaaatgccaccgccccacactgatctagtcactcttactactacctacttgtttcctcctcttctaaatcctttcagttttgatagtatgcattaccctaagtagtgtctgagatcagatagagtgctctctggtttaataactgtttaatgtaaaactattcagctagaaacctgtaggagagggaagaatcttaatgaaagattaaaggagaagccaaaggctggttaaagcagagtattttcagataaaatgcacagtctaagcaccagatgggagcattattgtgacccccctatgtttgcacatttcacatatgtgtcccattctcaccaataatgatggccttcaccacaacttctttgtagattacataacacttgcacataatttatctcatttattcctcaaagcaattttatgagatgggtctctttatcctcattttgtagagaagaaccaaagcctagagggggttacaatgatttgtcctgagtcacactgaagtccattacttttattttctatccatcccagctgaccttacacagtggctcatcctaccctcacagaaaccactcaaggaaggccagaaagatatttctggctttgaattataagcaaggaggctgatttctcctgagaaaaagtgaaagaaaaacttctcatccaagcactctctgccttttccctttttggagcagggagagtgcagttctctgaacaataagattggtttgacacaaaaaacaagtggaagtctgcacatgactttgtgcaagaaatgcatgagggaacagagttggaatatgactgaaatatatatatatatatatacactcacacacataaatatgtatgtagtcatatacatatgaatcataaaatgcttaaatatgtgtaaaaatatgtattgaaaacatgtagatctaccttattttatatatatttagtaaaatttgggaagaagggaaaatctcatcattggagtggaccaaatttgtgttaaacaattttagaaaagacagcaaggtatatatctggagggaaaggaactattagactgaactgtactgagtagattgagtttcatgtcctgggaagaaatggaggctggttggacacatgcttccccatcctgaagagtgcttagaaaaaggcgtgctttctttctcacagaatgaatcattgaggcaaaagctataaaggtatatacagcaaaatagctttgccaaatgtttataccatggatatttccaacaaaagtgtaagagattgtccatttgactgcattcttatcaatacttggtattgtaattgaaaaataataaaatgctagttggaaaagttaaaaaaaattgtttataatgttaagtttagtatgaaaattttctatatatttgtttactaattgcatttctttttttaaaaaagtatatttttaaattttctgttttatctatttttacaatagtgttttaaaatcaacttatgtaagcttcatagtgttttttacctgtttaaacaatgtttgataagcatatataattcctactgatgatgatatataacaattagaaaacttttttgctgaacttgttaattttattaagcctgattatgttttaattgttattctttttcaaaaaaaatgtttaaaaatttgtcccaagcaattgggggtacattttctttaattttctctgttgttacattttccactgaaagcaaatttgcagacatatacatcaatgccaaataatagaatctaccctccatatattaatatttttccaatgtgatatctctgagcagcattgtattgctatttcaaatagtaatagtatatattaggaaagctgaatgattataaacttacagttcattcacaaaatttactaagttcatactttgtcgaaacaattgtagagaaatcaaagttgtctaaaacatcaaaccttcctgcaaagagaagacagttaatgagattataaacatgtattcaatacattcacaagcagcatgaaataaatgacaataaaattagacaaagtgttatttttacacagagtaaggaaaaaagctactgctctcccatacagcacacacacacacacacacacacacacacacacacacacacacacacaggttgacaatacacaaggagaccaagaaaaaatcatgtgatagatacgtgaaaatttaagtcatttttattgcctgaaataatgagatgaacattaataaggtcttttattacagttgcataaattgggctttaatttgtgaccattgagaattctgctccagactaaggattaaatttgtttttattgaacgtaataaataaagattacacattaaaatattatgaatcatgtgcatttagaaacaatcttatcaaggaccagtattgtggtttattagttcttgaaattatcgcctagattactgccttgaacataataagtggtcattatttttttttgaatgaatgaatggtggcaaaatgtagtatttgaaaggattaacttttagataatactagtaatagcatatgtagaaataaacatgcactaaaattatacattttatacaattataattatacaattatagaaaaatatatttatttaacaataaacatctctactttaaaaaggtaacaaaaacagtgtttatttaaattgactttgaattatgacctgctatctataagcaaggtgatgtttttggtgttaaggaaactatatagtttcatagtttggtctccatcaattagtaagtgtaagtgatgccagtagtacactggtatatcttatcaaataacaaaacactgaagacagaataagatgaatatgataggagagaaaaaatggcagagattttggaacacaatgacttttgcttattctatttatgcttttgcaactgattcacagactatgttcctaaaacttaaactagtatcctcctactcttctcattgtgtcatctttgaaatcaccaacaatggtatttcgtatcatgcagagtcatatagaaaactttaatacaggtgtaatatctctgaagtttccatgtttaatatccccatgtgatggcattcactattatcacattttctatagatgttaaggatgggaagttattattatattaaagaagactttggattactaacttgtaatgtttctgtaggcctcagaattcactgtgctgaggagctaacaggatcctgacatttaattgtctctgcctgagcattctgtcaactttggaacttgtatgaggcaagtgtgataacatacataaagacagaacacttctaattttttttttttttttttttaaatacagagtctcctctgtcacccaggctggagcgcagtggtgcgatcttggttcactgcagcctcaacctcccgagttcatgcaattcttgtgcctcagcatcccaagtagatgagcccacaggcccgtcccaccaggcctggctaatttttgtagttttagtagagacgaaatttcaccatgttggccagtctggtctcgaactcctggcctcaagtgatctgcccgccttggcacttttaattttgtataataaaatatttgatacaaacatacacactacatatgcagtataaagaataatactgaaataggtacaatatagcccttaccttaataaagaaatggaacaatatcaatatttctatattattttgtccctattattgatcaattatttattctctccctcttcaacaaagtctttaaattttgtgagctactgtattatagttatgagcaggtactactaatatctaataattgaatgacaaaatatctatgggaaaaaagtaatatcaaaactaatattttaaaatctgttacttctttaaaagtagtgtatatttaaatccaattttaatataagtaatatgcaaaaaatttgagagatccaggagatccagaaaattattctgcaagaagagtaaacaaaatttaccgtaaaatgtacttcttaaagataattggtttttaaaaaatactattctagtcacggttatcctttattctttttttcttgtcatgagcttttcctgatacctactggcagggttctagcagcttcctgaatatatcttaatataatatattttttttcaactcagtggatgttacattaacttcatggcactggaggtctttttgtttatttttcctgagtctgtcaaaccttaactgctcactcaaaagcttgacgttaccagtttttctcagggcattttcaaactcctagttattttaaacagccaccagaattctccatctcacaactttcagaggggatttactccaaaatcttggatttcttaatcttgcatctcttcttaccacttaatttattaaaaaaagaatctctctacaaagctcaagaacataactggttgtcatgaaggagctcctataatatttggtttttattccatgaaaattaataagactataaccagacaagtggagaaaaagacatagaaaacatagaagcatatatagaaattataacgaagcagcatcaaatacattattactatatatatatatatatggcattaaaatatgtaaagataggttgtgctatgtctctgatgactgtctaaagttttgtgactatgagaaatgcagtttttggaaaaatgaagagcagcagtgtctactagatttagaaacattatcttaacaacaaaatgcaaattttgttgcagaaaagatatttcctcagttccaatgccctatgattcagaaaaacctagttgagtaggggctacagccctttgcttgtttctcactagctttgatggggtatataaatgctgtgtagatgagaagggcttgaggactaagaaccaaacagggttgtgtattatctctgttttaaaacaaagtctgttttctctattggcagaaaaggtgggtgtttgtgttcgtgtttgtgtttttgggtcattaaaatacatttaattttgtcaggcagaggacaccacatctgattccttgtaaaaggaagtcataactgctggacacatagagaccaggagagggctaggtactgcagagaaattaaaagaggtataaagtacaatatataatacacctaataatgtattgaagaaaaggtaaaatggttttggctaggcacggtggctcacgcctgtaatcccaacactttgggaggccgaggcgggcagatcacgaggtcaggagttcgaggtcagtgtggccaacatggtgaaaccccgtctctactaaaaatacaaaaattagcagggtgtggtggcaggcgcctgtaatcccagctactcgggaggctgaggcaggagaattgcttgaacccaggaggcggaggttgcagtgagccaaaatcatgccaccgcactccagcctgggtgacaaagcaagactccatttccaccccctcaaaaaaaaaaaatagataaaatggtttcatgtagctgctgaagacgagcaaatcattataagattcctagaattttttttaattaaaagaacattcttatgctataatatggtaagtcagtttagaaactaaacttaaattgcatttaatattatcctgtctttgattttgttgtaaaatgtttcaaaaaatgtataaacactacacaaaattaattggaatatgattaatatagtatacatattaatagagaccctactgaaatttttaaaataaatttgaagtattcataccacaggcaaatgctaggacatttgggacacttagaatttttaagttccaccatagaatccctgtcggcacacaagacaaaaaaaagatatgcttaatgcaagagatacatatattcttatttcagcaacattatatataaatcaaatttctctaaataaataatatttttctaattatgtctcttcattttgaggtatattattcaaagcccatatccaatttttgggtcttctattaacttgtttgaagttaacaaggaacaaaaaagcaatgaaagtccactaggaacagtaaagtttcataacaaatttgataacttagatgaaatggacaaatttctaggaagacacaaagtatcaaatctgactcaagtaaaaatagcaactctgaataggcttataatatgtaagataattaaattagtgatcaaaaacattcccgcaaaaaaagtccaggattatatgacttcactggtgaattcgagcaagtatttaaagacaaattgtcacaaatcctttgaaaacacttccaaaaattgaaaagaaggaaacacaacttattatatgaggccaatattaccctgataacaaaaccagatgaagacatcaaaagaaaaaaaattgacagaccagcaatcttatgaatataagtgcaaaaaatcctcaacaaaatactgtactagcaagccaaatacaacaacagaaaaaaaggattatctatcataatcaagtgggctttatctcacaaatgaaagggtggttcaacattaaaaaatcaatgcacactaaaagaataaagaacaaaaaccacatgatcatctcagtagaaacagaaaaagcattttacaaaatacaacacacttttaagaaacaacacttaaaaagccagaaatacaagtgaactttagcaaccaaataaagtatatttatggcaaactcacatcaaacatcaaacaaatgctgaaatatttggagtcagggacaagataagaatgtctgtttttgctacttctatttagcattttactggaagttcaaaccagggcaactaagcaagaaaaagaaagaaaaggtgtccagattggaaatgaagaagtaaaactatgtcaatttgcagatgacatgatgttttatatagaaagccccaagaaatccctcagtagctattcaaactactaaatgggttcaacagggttataggatagatacaaggttaatatacaaaaattagtttaatttctatacattagcaaacaacagtcagaaggtgaaataagaaaataatttcattaacaatagcttaaaaataataaagtactaagaaacacatttaacaaaagagatacaagactgtacactaaaaactacaagcattattgagagaaatggaagaattccttaataattggaaagacatcccatgttcatggattgaaagatttaatatatatgtaagatggcaatactccacaaattgatttacatatttaacatagtcctaacaaaattccagttgtcttttttttgcagaccttgacaagctgataataaagttcagatgaaaattcaagagacctaaaatatgcaaaaaagaaaatttaacaacaacaaaagaacacagctgaatgacccacactttccaatttcaaaacttactagaaaggtacagtaattaaagctgtacagtactaacataagaatagatatatagattaatgaaatagaatttagagtccagtggggggaaaaactcatatattcatgataaattgattttgacaagggcaccaagacaattcaagtgagaaacaatagtctcttcaaaaaatggagataggacaactggaaatttacatgccaaaaaataatgttgaatgcctacgtgacataacatacaaaaattaactaaaagtgatcaatgacacaaatgcaactgctaaaactatcaaatccttaaaagaaaacatattcatgagcttgtattaggcaatggactattagatatcacactaaaagcacaaactacaaaagaaaaaataaattagacttcaccaaaattaaccattgtgcttcaaaagacattatcaagaaagtgaagagacaattcatcgaatgggagataatgtttacaaatcatatgtcagataagggtcttgtatccagaatatataaagaactcttacactgcagcaacaatacaatgaaaactcaatcaaaaatgggcaaaggatttgaatagatgttactttaaagacgatatataaacgaacaataagcacatgaaaaaatgtccaacatcgttagtcattaggaaaatgcaatttaaaacaatgagacaatgctttacatcccccacaatggctataatgaaaaaggcagaaagtaacgagtgttggtgaagatgtggagaaattgaaatctcatgtattactggttggaatgtaaaatggccaactgctctgggaaaatgtttagcagtttttcataaagacaaacatagagttaccatatgatctagcaatttctctctagaacatgtacccaagagcatttaaaatacatgttcatatgaaaaaatatgtaacaatgtctatagcattgttcataaaaactgaatagtggaaataatttgtatttccatcagctaacatatggataagaaaatgggttatattcatataatagaatatcattcagccataaaaaaatgaagtgttgatacctattacaacatggattagccttgaaaacattacactaagtgaaacaagacacacatgcacacaaaatattgtacaattcccttcagatgaaatgtccagaatgagaaaatttaatagagaaagaatattgattagtatttttcagaggcaaggggagggaggtcgggcatgactgttaatgtatattggttttttgaggactgatgaaaatgttttgaaattagagactggtaatgtttgtccaaccttttgaatacacttaaagctactaaattataaataaatataataaacatgtatctatatataaaatgtgtttatagtttatcatatataattatattagaatttatcctgggaaattgtaataaaaaagactaacaagggaagaataatgaatactaccagattttaaaacatattataaaactacaggaattttaaaagtttacagctggccaaggtggctcataccagtaatcccagcacattgggaggccaatgtggggggatcacttgagtccaggggtttgagaccagcctgggcaagatagggagatcgtatctctacaaaaaataaaaataaaaaaaataatccaggcatggtatgcacacctgtagtcccacctacttgggaggctgaggccagaggctcagcccaggagtctaaggctgcagtgagctatgattatgccactgcactccagcccagctgacatagtgagatcctgtctcagataacaaaatgtttggtaacatttggtacataatagacagatcgataagttgaaacagaatccaaatgtactccaaaacacacacatatagttttgttatttttttcacatgaaaaattattgttgaagagattttgttcagtaatagtgtgtagacatttggttcgcattccatcagagaaaaaaattacatcccttaccaacttcacatattatgccaaaatatatcccagataaaacaaattttttaaagaaatgttttttaaattgacaaattaaaatggtatatatttatggtatacaacattggtgttttgaaatacgtatctatcttggaatgactgaatcaagctaattaacatatgcattatctcacataattatctttttttcatgatgagaatacctaaagtattttttttttttttgagatggagtctctctttgttgcccaggctggagtgcagtggcgcaatctcggctcactgcaacctccgcctcccgggttcaagcgattctcctgccttagactcccgagtagctggtactacaggcgtgcaccaccacgcccagctaatttttgtatttttagtagagacgaggtttcaccctgttagccaggatggtcttcatctcctgaccttgtgatccacctgcctcggcctcccaaagtgttgggattacaggcgtgagccaccgcgcctggccctgaagtctatgttcttggtgatttgcaagtattattaactatggtcagcatttatacaatagatttctcaaatttaaaaacaaagttttaaacataaaataaagtatatataaaagttgtgtgaaagacagagaattgagagaacatgttttccctaatcctcatgaggataccctgtataaacacagtaaaacatagagataacaaataataaaatttgacttgatgaattttataaacctgcattacaaaaatagcagtttatagcatattttaggtaaatgttaattttaatatgtaaagagattttatcaagtgacaagaaaatagcaaacagcctaatgggcaaaggacaaaaacacgtaggtcaaaagaaaaagtaagcttttaaacatatactaaaacgcgtcatcctgtacaaataattaaagaagcacaagggtaagcaacaatgtaatactactcttaccattcagtttttaaacatgtcttttaatatttggtatagaagaggttgtggaaaaacaggcattctattatgatatattgttggagtgtgtgtaattattataattgctttgaagtaatttgacctaaaaaatttgacctatacctttcgctcagaaattcttcctttagaaagacacccattgttagcaattacatttgtaggctattcatgatattgtctgtaatagcaaaagtctgaaattgtctgttagtaggggagtagtccaatatacgatgatatggatatattttcaaacaaaatatgcaaaacaaaatgcatattgtaacatatttgtactttgaaagtacacaaacacttatactcatgcagtttttacttgcatacactttttctggacagatacatagtatctacaaaattgtgagatattattaggaagggcagcagggggttctggaaggaaaaagagattacttttcatatagaaaacttcataggtaaatcattctcaaatattaaaaacaattttctgtggtaaaggaaagcactagttgagagagcagactttgacattagatagccctgtgtttgtgtttggttttgctgcttactaagccttgggcaattactaaatgctctaagcctcaatttcctctttgtaaaataaagagaaaaatggcgatcacctacagagctataagtattcaatgagttaaaacatgtaaagtaacacagagatgtcacagattgatcacttaattaatgccatattatttttattactaatagtaagagtgatagttcaagagagttgggtgtacagtgtctctggcttccagtgagagatgttgtcaagatattcttacaacagcttctggtctagatcagagctttttatccatagtgctgtgataagctaatgtgtcacaatcattgttgtttgtgttctgaataatttgttacttataatactttactgaagtttgaggtttgttgtatgttagagctgaatcagtgttgtacctataaatacccttactctcttgaattatgaaatgattttttgagtctgacaaagaggagtggagtccttatagtacttataggagtggagaacttacagagttctgaaaactgctaataactctgggtatgccagtgagaatgtgtcatgtatgagaaaatcacatggtcacaagctgtaatcttttgctgtggatgggaaccagtttaaagctagtaaagaggaagttccaggtaatctaaaggcctaggagtcattgtgggttatgtttagaatacatgagtctaagttgtctccataatcctaaaagctaataaaattctgggtgtattgggaggccgaggcaggtggatcatttgaggtcaggagttccagaccagcctggccaacatggtgaaaccctgtctctactaaaaacacaaaaattagccaggtgtggtggcatacatctgtggtcccagctactcaggaggctgaggcaggagaatcccttggaccaggaggcacaggttgcagtgagctgagattgtgccactgcactccaggctaggtgacagagtaagactttgtccaaagcacacagacacacacacacacacacacacacacacacacaaacacaccaaaaacaacaacaaaaaaaatctggatatgatcagggaagaaaacaaaacatatttttaccttttatattaacaagtgtttctccctttaaaatatcaaagatagttctggttactaaatctcaagaaagacatgctcttaaaactgggattactaggtcaaaagttacaagcattttaataactcttgatatatacatatatattatacacttacaaacatatatacaacatatactttttgggggagggcaatttacattgctgttagtgttgcacgagtgatattaattatctgcaacacataatgtcatttacaaaaagctcattttctaggcataatatattttgaggttaatgcactgtaattattatcaaatttggacattttccaatgttagttttctatttatatttccctttgtctaaattgcaaatttatattgtactgatgatgatttgtttattaaggtctttctattagatctttttattaggataatttcattacaaattaaaatgatctcttattacttatttgtaagtaaccctgggattttatacagtgaattgtgaattgtggaaactactgtgaatatctaatctgtttcactttataatgttgtacttttgaattatacctattatatttgatgggacaagagaggaaagatgagtgaatatttcttaattccactcattaatataggtgattatagaaacttctaccagaatctgggatatgctcaatttttaacactcatgagtatcactgagaaattttcttttcagagggttttatggataatttactagggtttcgagggaaggtctctgtttctccatgccaaccttttctgaaaatgttagttttcagtacaagtactgattttacccactaaatgttggtagttactgatttctaaactcaactcttctgctaacttgttggtggaactttgacaagtcacttaacttctttgtctcctcaaccacaaaatgaaatgttagtctgagatgtccttaagctccttgctagctgtgcttctttcctgattcatttgtactatccatttcttgcctctagatacacctttggaatatgcaaatgaatttggaattgtctgtattctaacctgagttggcttctctttctacatcattctttaacccttattccagcacaagacaaacagtacaaaggtctcaaaagtttgggaccttagatccagaatgttttgaaacaatattcactcactaaaatatgaacaaagttaaagcaaaatatttaacaacattgttttacctctcaatttttttgagtttcactgccttgtcgtttacaaacaaatataaacgtaccttatgatagagttattctgtaaactccgtaatgcaagatttccaaaaaaaaaaaacataatacaagagttgcaaatatacatattcgggaattcttgacacttttgtcatctagtttaaaaatcatctgagaaagaatgtaatgaattcatttaactgtgagttacattttaaatattttgtagagacacaaactctgaataattaactctgttactactcaataatttaagtggaatgacccttgacagtctgtttgtaataactaacagtgcattttaattattttttttaaattagaaatgacatctctagagttcaagattcttgggagcaaaattgaacttttaaaattggttagtatagagggttatttttcttaatgaaaataaaactgatttgcattttaaaaatctgggtacactttttaaaatgattatgtcagtaatttaacattaggcatatattagagagaattataccttttctttctatctcttcataccaatcttctggtatgttagaaactaggtagtataaaagctaaataattgtaagcctgaaaaatcgaagatttagtgattttaagaatctgaaatttctgtcaaaaaatgtaaagctaattttataaaaataaagttcagtttataagatagcaagaataagacctatcataaaatttacaagcagatttagtaattattaaatactagatttaataagcaggaaacttatcttccacgttcactggctgtttatcttatacttgaactcttccctcattttatccttttgaataatactgtactaaagtgaatctctgattaatatttaaatgtacatggggagaaatgggtaacctaatcagagaaaataattaacaaaccacctcattctcatatccctgaattcttacaaggagacatatattttgattactacaatgtaattccctttgacctcctttctaattcaaagcttattagatttcaggattgaactggctcactaacatttaattacagttcttaaatattttctgaatgtgttctaatgtcctggattttcctaaattccacttttcttctcccttagagtagcaaaagttaactggtaaggattattttccgcttccagacaattttgtgatagagtgcaaagacaaattcttgtgggctaggtaaagtgcttttgtggcagatcatcaacaacaacaacaacaacaacaacaacatcagcaaaagctttttatgcagtggctgaaagacgagataggtctttatgtgttaatgtagaatgatatttatgttttgatggttgagcattgcaattttatttgggcctaaaaatgttataggtttacgaaaagaacatatataatagatgatagatagatagacagatataaattccacatgtgcatttgtatgtttttatgtgagtgtgtttgtaaaatacacattttgtgtaaacatatagattatatgtaagaactataaatggacaggtaattgtctatttttatatgtaatctatctacttaatttctattttattacaatctctatctctatatagcgatttgccattgaagaggaaactactgacttttaaaattcttttttttttttttttgagatggagtctcgctctctcgcccaggctggagtgcagcggcgtgatcttggctcactgcaacctccacctcatgggttcaagcaaattcttctgccacagcctcccgagtagctgggattacaggtgcccgccaccatgcccagccaatttttgtatttttaatagagatgggatttcaccatcatggccaggctggtctcgaactcttgacctcgtgatccacctgccttggcctcccagtgggctgggattacaggcgtgagccactgtgcccggctgacttttaaaattctaattgacataaattttaaagtttactatatttttcatttgcaatcaaagcttatgtaacttttataattaaaaacattaaaaggtagtgatgtgctatactcttcaaatactgcattttataaaactatctgatatatataataaagttataaaacttgttcaaaaagaattaattcatcaaaatttaactagttacatgtttttaaagtacatggtgtttcagaataattctaagcagagatgtgcaaagtttaagacaattttaaacttattaagtgacttaaaacataaaagaaataaacggaattctcaggtttctgtgtaagaaaactaaaatatgtggagaatttaagagtttttaaattaattttagtttgaacaaagcttgtgaaaaggattccaaagttaattttcatataatgaacagaataaaataataattttgaaaaaaaaaagataaaagcgagaagaaaagggagaataaccgtatcaatggctaaacaacattataagaatacaatgatgttgttggaacaggaatagacaaacagaatattttaacaaatagactaaatgacccttttctgtatacagaaaaatccatccttccagcacaggcagggagattgggccgggagctcctttcctctactctctggctccaagaagaacttttccatgccctatttgagaaaatgggctgggcacaagccttgaacaatttgctaatcttataatatccaaataaaatatgtttctgtgaggattgacatgtggttacaaaagcatttacttaaaaaaaaaaaaaaaggaagttagatctccatcttacaccatggtcccaaataaattctaaatatattaaacagttaaataaaatattgggccttaataactgtatgaaaaatttattaaatctcttaaaaaagaactttctaggtttaaaattattcatttattcaaaagctattgaaacctcgttttttcagctagtaggtatacagctttaagacaaaagaactacttttcaaagagcttagaatctagctgaaagcacaactcaagtattgacaataacaattgatctttacattaggggaagaacagattgtagtaaggggaaagacaggagccgtaaccacgtaggcaaacacagaggcaagagaaaacatgagctgagaagttcattaatattgaaggttagaggggaagagatgactgacaaaagatgaagctgaagacgaaggccagaactgagtttgaagtgtcttgtaatccatgtggaggaatttatgctctatcctaagagcagtggaatgctattaaagagttttgagtgaatgatgtcacgaatgaattttagaaaattcaattttactgacttataagaaagacgaactggaagtgactataggcctgagagtctggttagggagacacacaaacagaaaattacagaaatgtgtccgaagagggtgagtttaaggtatcaaggaggatgacatacccataggactccactcatttacaagtcagctgaggtctgtaaggagagaaatcagaagaggattggctggagcaagctgagatatttgtagttaggcttagggtcaaattcccagttctagtgtgctctagatggctggaacacatccaagggaagtgtaaagggaagttttcattgtgaagagctaaggactgagccaacatgacaaagaagtagaaggtggaaacccctgggagtcaaagattcatatttggtgtcctggatctaagatttgtctgaagagaccacatgccaagaggaggtgtatataaagactggggagactaacaggaattctgcaattagggttgggtgtgagaagccggaacattctattgcctattacatagtgcattatgggacacatgtattttaataagcattgtcatgattcatttggaaatcgtagcaaagtaagacttttagataaggctcatcaatggaactttatcttctgtctctcatatactgcataatatgccacataatgatgttctggacaacaaaacacagtcacgtgatgtataatgatgttttggtcaacagtggaccacatataaggatggtggtccataggattataatggagccaaaaagttcctatggttaatgatgtcatagctgttataatgtcatggggcaatgcattattcacatgtttgtggtgatgctggtgtaaacaaacctactgcactgccaatcatatggaagtattgcacatacaattaggtacagtgcctaacacttggtattagtaataaatgactatgttgctggtttatgtatttactatactttttaatccttattttagattgtacttctacttattaaagaaaaattactataaaagagcctcaggcaggtccttcaggaggtattccagagaaaggcattattatcataggtgatggcagctccatgcatgtttttgtccctgaaaaccttccaatgggacaagatatgggggtggaaggcagtgatattgattatcctaaccctgtgtaggcctagactaaggtgtgtgtatttgtcttaatattttaacaaaagtttaaaaagtaaaaaaaaataaaaattagaaatagaaaatgtttatagaatatggatatcaagaaaaatatttttgtacagttgacaatgtgtatatgttttaagctgttataagagtcaaaaagttaaaaaacttaaagatgtagaaagttaaaatgttatagtaagttaaggttaatttatttttgaaaaacattttaaaataaattcagtgtagcctacataaagtctgcaatagtgtatcgtaatgcattctaagacttcacattcactcaccacacactcactgacttacccagagcaacttccactgttgccaagttcccttcatggtaggtgcccttgacaagagtaccaatgtttcatttttttaaactatatttttactgcactttttctatatttagatacacaaaaggttaccattgtgttataattgcctattgtattcagtatagtaatacactatacagacttgtagcctaacagcaatagactatagcatatagcctaggtgtgtagtaggttataccatctaggtttgtgtaattacactgtatgatgtttgcgcaacaatgaaattgcctaacaatgcatttctcagaatatatccccatagttaacatatctcctgtgtgtgtatatatatatgtatttatatattttatgtggttggattctatgtaattaaaaataatcccaaaattaaaatttaacacggtatttcttcatattcctcagtcattttaaattgctgcctaatgttcatccagttagcactttatctttttattttggtatcttgatgcacaaaagttttctttttaatttaatgtaaggagatgtgtcaatatattctttatggtttgtgctttttgcatcttttagtattattcatttttctgttctgagacaataaatatatttgacattataattattattatattctaaaagccttgctttttacatgtaagtcattaatctacatatgattgtatttgggatttcattttatgatctctataggtataattagttaggattatataattaatcatttacccattagactggaatgccatgtggatatcaacttttgtctaggcatagctctattttgagctctttattctgttctacttataaccctataacaataccacactctctttataacatatacgtttgccttaatatgtaattgggaagtctttccctattcttcagaattatcctggcctccttgggcctttttctcttctattatatatcaattatagaatcacttcttaaaatacaattaacacagtacttactgtggatcaaagttgaattaaagctgtagattaacttaagcagtgttgacatccatgagtatggtatatgtctgcgtgtatttagcgtgactttatttttatttatttattttttttgagacgaagtctcgctctgtcgcccaggctggactgcagtgggcgatctcggctcactgcaagctctgcctcccgggttcacgccattctcctgcctcagcctcccgtgtagctgggactacaggcgtctgtcactgcgcccggctaattttttgtgtttttagtagagacggggtttcaccgtggtctcgatctcctgacctcgtgatccacccgcctcggcctcccagagtgctgggattacaggcgtgagccaccacgcctggcctagcttgcctttaataaggttttataatgttcttcatgattactaagtaccctagtgtttttgttcctttggtgcaaggaagtattttatttctttcaaatctcattattttttattagtttattggccagtgcagaggaatacaatagataattattttttagtctatatctaggaaattcgtggaatgattttgttaatattatattgtaaattattttgagttttctatttggacaattaaattgattgaaaataataatacctttcttcttttcaaatctttatgtttttaaatttatttgttcttaaaatttctctcttgttagggcctctggtaaaatatttaagaaaagcaatgctagcagcaattttatgtctttcatgatactaaagtcatgattctaattgcctttaatgaataattattaatgattggtttaagttatattaaagaagttcacttttatttgcagtttgctaagtttttatagtggatggatattgaatattaccaaatgactctcttacttcattttagataaacatctttattattattattactattacattattattattattattattgttattatttgagatggagtctcactctgtcgcccaggctggagtgcagtggtgcaatctcagctcactgcaagctccgcctcccgggttcatgccattctcctgactcggcctctggagtagctgggactacaggcgccagccaagacgcccggctaattttttgtatttttagtagagatggggtttcactgtgttagccaggatggtctcgatatcctgacctcgagatccgcccgcctccacctcccgaactgctgggattacaggtgtgagccaccgcgcccggtcaacatctttattattttaatcttttaatgtggtgaatcacatgaatagatttgcaaatattgtcattctaatgttcttacaatatattcgattttgtcctgttgcattttatttttatacattactaacttagtatgacttttggtttatgttctaaaagagtgtatagatgattgagtttatgtgttttttgaacgtctaacacaattttattataaaacttctttagcttggagttttattattaggtagattttaatgaactgatagagtttttctgttttcttttttgagaaagagtctcgctcttgtcccacaggctggaatgcaatggtgtgatctcggctcactataaccttcgcctcctggcttcaagcgattctcctgcctcagcctcctgagtagctgggactacaggctcctaccaccacgcccagctaatttttgtatttttagtagagatggggtttcaccacgttggccaggctagtcttgaactcctgacctcaggtgatctgcctgcctcagcctcccaaagtgctgggattacaagcatgagccaccgcacctggccacgtttttaaaatagtgatgactttattcagattttctatttcttgtgattaaatttgttaaatttgtttagaaaaatgcccatcttgtgatcaaatttgagttcaatttgtttaggaaaattgccataaaattgttcagaatattcacagattatttttgagtatctactataattcttatgttttgtttgtaatgtctaacattccttgtctttgcaaataataaatttgaccttgttaagactctacttaatctttgcatttttatttcaataattgacacatttttactattttatatctattgtgttatttttccctgttgcttgttttctgactttttaaattgtacttgagactaaatttttctccaactatagttgttttatgcaaaagatttttttcttactttgctttttaatttctaattcaattcatattatttatatttttcttaatttttgaaagcaagtggactttttattatattttttattcctgattttattatattttatttagagaatgtgatctatataatgctttctttcatttttaggttaagactttctctatagtcagttttttaaatgttcatgaatcattgacaaaaaaacattttctaattgtcagatgaaggcttctgtatatgtgcattctattagtttgctattttttcctcctttatcagttgcaaaaagatatgtatcgaaggtttgaattaatattgattttccacttttctaattttgcccattcttcctttatatatttctagtctatattaatagctaaataagctaaatataagctgagtagttttactttccattgtagtattttaccattacatagtgattcttttacatgtataatgattttttttggtcttcaaatttcttttttgtctaatattgacataaatctctcttctgtttgtgtgctgggtttattttttccatctttttgctttcttttctttttctttttcttttttttcctttctttcttctttcttttttttttctttcttttttttttttgttgttgttgtctaggttagagtgtaatggtgcaatcttggctcactgcaacctccacctcccgggttcaagcaaatctcctgcctcagcctcccaagtagctgagactacaggtgtgtgccaccacacctggctaatttttgtatttttagtagagatggggtttcaccatgttggccaggctggtctcgaactcctgaccttgggatttgtctgctttggcctctcaaagtgctgagattacaggtgtgagccactgcacccggcccatctttttactttcaaattttgtacaataggttttcattttttaaataaataaagcagggttttgttactgctgtttacattgttttagaaaatttataaatttgttttcaagtgacatttataatgattgcttatatgtgtcattttattttgtgatttctttattctttttcaaaattattttctgccttcatattgattaaccttctctttcaacctccctccatttttagcctttcttttctgttataaacattattttacttactaaactataatgtaacttgcttatttgattcaaatttaaaattaataaatatacttgttatttaaataatataaacccttaagaagttttaaggattacctcctgtttaacttaaatattatatttgtcaaccagtactctagttattttagttcatgctcaacaatgtctatgtattgctttgtttactagtctttccagtgttccattgctagttaagcacccagaattcagagctgtaacacctgattgatattctcaactgtacaatttataagctgtttgtctttgtgcatattttttgtattttttaaaattactttgtttattttaggtttcatttgctctccttcctgtagtttcttcagtttttcagtaatctgagattttaggttattgatttgagagttttcttcttttctaatctaagcactttgaattaggcacgattctccagagaaacaaccaataggacacacacacagagacacacagacacatacatatatattcattatagaaattggctcacatgattgttaaggctgagaagtcccacaacatgctattcacatccacaaactgaagactcaggaaaactagtgtgatttagtccagtctaaaggcctgagaactgtgaaggggagggagagaagcaggaggacagtggtgtaaggtctgtttggagtcaaagggccaaaacctggagcaccaatgtccaaaagcagaagaaaatgaatgtcctggctcaaacacagagaataaattcaccttttctctgactttttcttctatttggggccctcaaaggattggataatgaccactgacattcatgggggccaccatgttttttttttttgagatggaatttcattcttgttgcccaggctggagtgcaatggtgtgatctcggctcaccacaacctccccctcctgggtttaagtgattctcctgcctcagcctcccgagtagctgggattacaggcatgcgcccccatgcccagctaattttgtatttttagtagagacagggtttctcatcttggtcaggctggtctcgaactcctgacctcaggtgatctgcctgcctcggcctcccaaagtgccgggattacaggcgcaagctactgcgccctgcccgagggccaccatcttttactaagcaattcaaatgttactctaatctggaaacaccctcagagacaaacccagaaataatgtttaccagctgtctgggcatcacttagcccagtcaagttgaaacataaattaatctttacacatttaatattatatattttcctctaagcactgctttagctttaacccagaatttaaaaatgttgcattttcatttagttcaaatatttttttttaaataagtcttcctcttttacctacgggttatttcttgttgttgttgatttaatatcccaacataagaggactttttccaggtatctttttattatttctagtttaattttgtcatggtccaaaattatactttatgtgatttttattgctttatatttttcaatgtttattttatgaaccagaatagggttcatcttcttgaatgttccctgtgcacttgaatagaatgtttatgctgccagtattgagtgaaatcttctataaatgtcaactagataaagttgattgattgtgttggtcatctacatccttactgagtttctgtttctcgttctatcagttactgagagatgagtgctgaagaattcaactgttattgtgaatttgcatacttcagatttatgaatttttgcttcatatattttgtagctcttttgttaagtccatatatatttaagattgttatgtcttcttgaagaattgacccctttatcattatataaggtcactattattactcctgacaatattcctttttgttaagtcttttttgtctgaaattgatatagctactccaacttcattttacttaatgattatatgattgtatcatgctgctaataaagacatacccaagactgggtaacgtataaagaaaaggggtttaatggaatcacagttccacatggccagggagacctcacaatcatgagagaaggcaaaggagaagcaaaggcacatcttacgtggtgtcaggcaagagagcatgtgtaagggaactaactcccctttataagaccatcagatatcatgagacttattcactatcacgagaatagcatgggaaagacccaccccatgtatcaattacctcccatcgggtacctcccattacatatgggaattatgggagctatattttaagatgaaattttggtggagacacagccaaactatatcattctgccctggcctctcccaaatctcatatccttacatttcacaaccaatcatgcctttcaaacagtcccccaaagtcttatctcatttcagcattaactcaaaagtccacagtccaaagtctcatcagagacaaggcaagtcccttccacttatgagcctgtaaaatcaaaaacaaattagttacttccaacatacgatgggggtacaggcattgggtaaatacacctgttccaaatgggaaaaattggccaaaataaaggggctacaggccctattcaagttcaaaattcaatggggcagtcaaatcttaaagctccaaagtgatcccctttgactacatgtctcacatccaggtcactcttatacaagaggtgggtttcccatggccttgggcagctccacccctgtggctttgcagggtacagcccccctcctggctgatttcatgggctggagctaagttctgcggcttttccaggtgcacagtgcaagtctaccattctggggtctggaagacggtggccctcttcttacagctctactaggcagtgccccagtagggaccttgtgtgcgggttctgacctcacattctccttccacactaccttagcagaagttctccatgagggttcctcccaggcaccatacctctgcctggacatccaggcatttccatacacccgctgaaatctaggcaggttctaaacctcaattctttttttttttaattattattattatactttaagttttagggtacatgtgcacaatgtgcaggtttgttacatatgtatacttatgccatgttggtgtgctgcacccattaactcgtcatttagcattaggtatatctcctaatgctatccctcccccctccccccaccccacaacagtccccggtgtgtgatgttccccttcctgtgtccgtgtgttctcattgttcagttcccacctatgagtgagaacatgtggtgtttggtttttttgtccttgtgatagtttgctgagaatgatggtttccagcttcatccatgtccctacgaaggacaggaactcatcattttttatggctgcatagtattccatggagaaataggaacacttttacactgttggtgggactgcaaactagttcaaccactgtggaagtcggtgtggcgattcctcagggatctagaactagaaataccatttgacccagccatcccattactgggtatatacccaaaggattataaatcatgctgctataaagacacatgcacacatatgtttattgcggcactaaacctcaattcttgacttctgtgcacctgcaggcccaataccacctgtaagctgccaaagtttgggacttgcacactctgagtcaatggcctgagctctatgttggccacatttagccacagctgggacacagagtaccaagtcccaagactgcacaaagccgcaaggccctggacctggcccatgaaatcttttttttttcctcctagacctcctggcttgtgatgggagggactgccacgaagatctctgatataccccagagacattttccccattgtcttagtgattaacatttggctcctcattactcatgcaaatttctgcagccggcttgaatttctcctcagaaaatgggtttttcttttctgttgcatcttcgtgctgaaaattttctgaacttttatgctctgcttcctctttaaacataagttccaattccaaaccatatctttttgaatacataaaactgaaagcttttagcaatacccaagttacctcttgaacgctttgctgcttagaaatttctcataccaggtgccatagatcatttctctcaagttcaaagttccacagatctctagggcaggggcaaaatgccaccagtctctttgctaaagcctaacaagagtcacctttgctccagttcccaacaagttcctcatctccatctgagaccacctcagcctggacttcattgtccatatcgctattagcattttggtcaaaaccattcaacaagtttctaggaagttccaaactttctcacatcttcctgtcttcttctgagccctccaaactgttccagcctctgcctgtttcccagttcccaagtcagttctacatttcaggtgtctttaaagcagcatcccactcttccagtaccaatttactgtattaacctgttctcatactgctaataaagacatacccgagactgggtaatttataaaagaaaagaggtttaatgggctcacagttccacgtggctgaggaggcctcacattcatggagaatggcaaatgaggagcaaagtcatgtcttacttattcactatcatgagaacagcatgggaaagaccaacccctatgattcaattgcctcccactgggtccctgtcatgacacatgggaattatgggagctacaatttaatatgagatttgggtagggacacagccaaaccatataaatgatacaactttttttcttgtttaaacttttaatctgtttacgtctttgtatttaaagtgtggttttgtaggcagtatataattgtgcatgtgagcgtgtgtgtgtgtgtgtgtgtgtgtttattcaatctcatagtctctgtatttcagctggtgtatttaaaccattgacatttaaactgatgattaacatgttggattgaagttgaccattttgctagttgttttttatttgttccatttgttttctgtttcttttttttctctcttccagccttctctgtgttaaattgaatgtctttcatgatttcattttacttcttttgtttacttatttttttacatctaccttagatattataagtgctttttagttttttgttgaataaatgaattaataagataatttctctataaaccattgtaaaaggtggaaaacacttttacctcaaccatataattgtttgtataactaaaagatatagtaaatagcataataaagaatttaacagtgtcttgaatatagaaagagctcaatagtagttatgatataagaaactttttctttcactattcttattttatttaatattatctgctcttttaatgaaagtcattccaatatgtctatattactttgtaaatttttaaattatgattttactttctttctcgttctttctttttatgtttttttttaaatttttgttctttgagacagggtcttactctgttgctcaggctggagtacagtgaaatgatcttggctcactgcagcctagacctcctgggctcaagcaatattcctacctcatcctcctgagtagctgggactgcaggtggatgccaccatgcctggctaatttttatattttttgtagagacagggttttgccacgatgcccaggctggtctcaaactcccgagctcaaatgatccatgcccctcagtctcccaaagtgctgggattacaagtgtgcaccaccacgcccagcctatgattttactttcacttagtgaattaaattcatgtttctttttttcttctactatctctttttgcttattctggctgccaaatagctcttcttgcttatttttctgacaaaacttatttttctataaaggtagcttactttcacaagtaacctaaaattaatctttttaataaacagattataaatatttttaatattttgatagtatctttaattattgtgtgaatatatttgaagtgaaagtactaatatatgtaatattaatataaaaaatgccaagttttctgcatttgcatttactgttgcccaattcttaattaaagtattatctcaagtggatatattttatacatggatatttttaatggaaaataacaaaagaactattgttaaaacctactcaagtctaaaacaacatgtatttggagattaatcagatcaggtttaaaactgttaaaaagtaacaaatattccttaagttttcccagatagaatgagaagaagacaaataaattcaagtcatcgagcccaagctaaaattccctggttaaaagaagaccagtgaaatatatttttagaggaagactgaagaaagatattttacagtgagacacaagcaaattatttgcttgatagcagctgcacagttttatgtagatagtatgtataaaaatctattgataatattttaatacaaattttacttgcttttcatgtgataagtaggtgaatgatttctttttccaacagtcatttaataatggtggtcattgctttaatttagtgaggattcttactactctttttaggatttggatgtgtgtggatgttctaatagtcctgaattctggttctagcagtttcagccagttgaagctatgatccgagataaatgtgtactgttactacagaaaactaatttgataccatcttttacttgatatatcttgtttccttttgaacttcttcttagactagctggtctttaagtacaatagtttaagagttctgcagttacattaaaaatataatccttatcttttggataaaaaggcttttaacattaagtccattgcatgtctcttttaaagttatagtcactccacatcttacacttttgtatgtctccattccccccacacacagtccttgccttacaatggccctatttaggatttttgggtttattatgatggtgcaaaagcagtacacattcaatacattcagacttaagatggggttactttgaaaacacacttttatacttacgatgttttcaacttatgatgagtttattgggacacgtttcctttgcaagtcaaggaacatttgtactttgttattagaattagctttggaggctataaagctttttcaatgaatgacaaaagctgtattcattagacttctgtgtagaagattctgcccaggaatcacaattgttatgctagtatattagttccttaattaaacaaactttttttatatgcctattactgtctgactgtggagatagtgggattatgatgatctgtaagagccagtgtttatatagcttggaatataccagagtatacttacatgaatattaatgttatgaaagtaataacatgatggattaaatagttctttataattctcaaaaggctcaatcatacattcatgtccatcattacagttttcaaacactgaaacacattatcacaatcccatttgaagtatgttaaatattttgcccaagagcccatgagtggtaaatgcagacatagatctactatattgtaggtcaaattttctcaacctgagcattattaacatttgacttagatcattctttgttgtggacagctcctccatcattttacgatgtttgcagcattcttggcctgtagtcactacatgcagtagcatctttctccctcagttatcacagccaaaaatgtctctagatactgtcaaatgttcctggggagcaggcaaaatcatctgccattggaaaccactgatgtagccgcctgatgatttctctaatatgttacctaaattttggtagagcgatatttcatataagttaatatgaagctggagttatagcatgtctatataatggaaatgctttcactggagtttatttactttaaatagcttgacaaagagatggcatcaaagaaacaaagcctttgcaatcagaaagaccatttttgaggccagacgcggtggttcatgcctgtaatcccagcactttgggaggtctagcagggtggatcacgaggtcaggagatcgagaccagcctagccaaattggtgaatcccatctctactaaaaatacagaaaattagccgagcttggtggcgggcacctgtaatcgcagctacttgggaggctgaggcaggagaattgcttgagcctgggaggtggaggttgcagtgagccgagatcgcgccactgcactccagcctggcaacagagtgagactccgtctgaaaaaaaagaaaaaaaagaaagacaatttttcaatcccagctctatgtaaataatgcaaagaaatagtaatgttctcaaatccacagaataattaattccttctctctaaatcttctcccagatactaattcaacttcttgaatcaattcaatttcacaggctctctaattggcatctaggtctcatgactgcaatgcctcctttttaagaaaatattttaatcttttattttattttctgcatttcccagtcatacacacaaaacactcctagatatataataaactaatgttttcaatattttgaaccctagtgataaacaataaatatagaagagaggtatctatgtgagtcattttagtgtacgttaaatgtatggggaaactggtatgtgtaatagtgctatctaagcatccaggtatgactagtgaaaaatcaaacatttttctaaagtagaaagatgcaatgaattttttaaaaacttctccctactgtataaaatagtattatattttataatactaaatagagtattaaatcacaaaaagaaaaccatgtcattgcagtaacacactgattataactgatgagaaacaaataattttatatacttctatatttttatagaagtattggtaattgtcttatctttatcaaataatattcttagtgtaataatataagaagtataatgaaaatatttactagaagacaccttatatggggtaccttttaattttaattaaaaattaatctgctgtgagattatatctcaaggaagtatgagtatacttatatacttatatagatacagaaaagtgcacagattatccacctatagcttgataacgtttacaactatacacgcctatgtatccacagattaggatttaagcacagagacatgaggatttttaaaagacctatagtggacacacattttacatggtttgacttcttattaatgcagttattaaataaaaatgaatgatgtaaatattatacatagtattttatcaggtaccataagatatatgaataactacgcaaagttataatgtaaagaatttctttgaatttgggaggcatataaatggaaactttagccaacaattcaaaacattctactgttgtgtgcccaagctcatcttccttagaaaggaacaaagactcaagaaatcacatgatcactctgtctgattaaaatggtaatcttgagaaatgtttcatcatttagtattgtatcatgcatagtttcgaaaacctactttatgtatttatgtccatatgttacatatttttattatagtagccattaatttgtgtatcagaattatgacattataaaataagtattttaagaccaatagcctgtatacagtacacagaaatggatgagggaaaagatggagtaagtaaacgtactgaaaggcaatattgcaacaccctacacaggaaatgttttcaccttgaattaggaagacaaggggaatgaatagttagagacaaataagaaaagtgttatttaggatgaatcaacataacttggttattgaattgataaaaagattaaagtagacagaatttgctatgtttgttaagaatataagtgtgcgtatatagtatatgggttatttgaagaataattatgccaaaataaaattagggaaattataaaggcaaacttttacatttgcagcaggtaaatgggttccagtgtgtgtatattaaaacttgtattaacctgtttcataaatatgacagtttgggcacaatgtcagtttttggcagctggttctcattcttcctaaagccccagttctcaaagtgttagagaagataagaggacagatgaggtcatagcagtaaacccacactgggaactaatgagacaaagagttgtcactgtcttggcagttttaaccaatcacactttccaacatcttttctgatttttttcgagacagggtcttgctctgtctcccaggctggagtgcagtggtgtgatcttggcttactgcaacctccgcttcccgattcaagcaattctcctgcctcagcctcctgagtagctgggattacaggcactcgccaccatgcccggctaattttttgtatttttagtggagatggggtttcaccgcgttagccaggatggtctcgatctcttgacctcatgatctggccgcttcggcctcccaaagttctggaattacaggcgtgagccaccgcaaccggcctccattggtttttctaataatatgtcagctttaatgagcaattattaccctgtgaaaaccacctctgggacctgaaaagacatggattgtgctacctgacacctcacctctaagccagctagctccacaggttcacttgtgattttttattaacctcatagtgatgagattgaatattttggtccacacgtacattgttgtggcagagttttaccgtatgtgacacaaaacgcactctaagaaaaaaagggttattcaaccaattaagatataagattatattttgaaatggagcagtctctgtaagaaaaagttgaactcatatttctaaatagtaatggtcattttaaatgcctgagattccaaaggaaaattatagcagcaaactaaagaatgaaccttagagaatgtttgtatttatgaggtggatgaggaaacaaacaaacaaaaaagggagttgtcacaaatgtaaaggatgaatcagaagcatataattttaaataaaaatatttactgcatttggtaagttggagggagatttcaaatgaagctagaaactgaaatgtcaggactcatgtaaatagaaccgatcttcattatttgcagattccatatttatgaattctctacttgctcaaatttatttatttatttatttatttatttatttatttatttatttagagatagggcctcactctgtcacccaggctggagtgcagtgatatgatcatggctcactgaaacctcaatctcccaggctcaatcgatcttctcacctcaacctcccgagtagctgtgaccacaggtgcacatcaccacactgggctaagttctgggtttatagacctgagccactgcacctggcctcaaatttatgtttaacctctaaatcaatacgtggacactttggcattcattcttggacatatacagagtggtggaaatgtttgagtaactcagtgcgcatattcccagttgaagtccaaggcaatgagcaatgctcttccttcttgtttcagttctcatgctgaaagtaagtctccttctccttctcctttctcctttcttcttcttcttctttttttgagacagggtcttgctctattgcccaggctggagtacagtggcaccatcatagctcactgcagccttgacctcccaggattaagcaatccttccacctcaagcctcccaagtagctggaactataagcatgccaccacacaagactaattaaaattttttttttttttttagtagagacagggactcactcttcagttgcccaggttaacaagcattcttttttttttctttgagatggagtctcgttctgtcgcccgggctagagtgcagtggcgtgatctcggctcactgcaagctccgcctcccgggttcacgccattctcctgcctcagcctcccgagtagctgggactacagacgcccgccaccacgcctggataattttttttttctttttgtatttttagcacagacggggtttcaccgttttagacaggagggtcccgatctccagacgtcgtgatcctcccgccttggcctcccaaagtgctgggattacaggcatgagccaccgcacctggcccaacaagcattcttttcacaacatgtttagtgccctgtttgcctcatttttgtgcttattgttggtgtttaaaatggtcctcaagcatattgttgaactactatctagggttcattggagcaaaacggctatgatgtgccttatagagaaaatatgtgacttatagagaaaatatgtgttagataagctttcagatatgagttatggtattgttggatgtgagtttaatgttaatcaacaatatatattaaatcagtgtctttaaatagaaacacacacaaaaggaaggttatatgttgattggttcatgaaaatgtgtgagcaaaggctcgcaggagcatagccctatttctcctaggagcagtggttcagtattcgctaattcaatgttcacaatgactttgtaaaaaaatgattaccatggataatgagaatcggtatacaaacatatatatacacagacatacacacatcctttttgtgtttaagaagttaaagtagaaaattgtagtataccagtattagttacagtctccaagaatacaactataaaaacatatttaagccattagtaaatttcattatattacaatcagaattcaaataattttgtttaatatttgcttctgaaactggtgcaccatttagctgttttgataccataaacaagtaaattttataaatgtagatatatgagatctttcagttattttgattgactcatttataaaatgtatctttgagtgagtctatattaggatttctccttttctgtgtaaattaagtaaaattcgatactttctctgctaactttatttaaacaatgcttcttgagctctctgttatttgataggaatttagtagttcagagaaatcaattgactcttctacttcaattttttgtctttctgaaatcttgaataaaggctttaaacctgatggcaatacctttatctctaaccctgttcatgtgagagtgcataattgtgcattttgcaatttccttgtctcatttgttctctgttgtttatctgcttactcctaaggctgggaaaagtgataatatatgagtggcccatgtagtaggtagaaaatgagggcaagtccatggatatcttatccatgtcttggtactagtggcatgcaataatatgggcctaccaaggctcctagaagattttttaagctttaagttttttttgttagatacactgccaatatatagaagagactataacatcggaaaatatgagtggttagttacattcaggccttgctgtttgcagccttaaacttcatgtaaaacctcaatgaaacatattttctctacttttaagataaaggatttgaacaattgatctaattctctcacagcattactgtgattatcagaggaataaaaggcatttttagtactctatcttttcttctgtaaaatacttcactttctctgtgtttgaaaaatgaggtccctcatagaacaaggtcagtattatgggagaatgagtcatttaattctaagctgtaacatgttacaataatttgtcttaaaatggttcaatgcagatgtcatagaatgagttcagatgggtctgcagaggcaaattcataggaaactttgttacctctctgtttggatttatgaaactggttctctagtttcattgtatagtaatgcccaaaaagtgaaaagcctaaacttctacttttttcatgtttttcttatgtattagtctgttctcacgctgctataaagatactacctgagactgggtaattctgaataaaagaggtttaattgacacagttccgcgtggctggggaggcctcaggaaacttacaatcatggcagaaggcgaagcaggacacctcctgcctggcagcaggagagaaagaagggaaactgccactttaaaaacctcagatctctgccgggcgcggtggctaacgcctgtaatcccagcactttgggaggccgagacggacggttcaagaggtcaggagatcaagaccatcctgcctaacacggtgaaaccccgtctctactaaaaatacaaaaaaaaaaattagctgggagtggtggcgggcgcctgtagtcccagctactctggaggctgaggcaggagaatggcgtgaacccggcaggcggagcttgcagtgagctgagatcgcgccactgcactccagcctgggcaacggagcgaggttctgtctaaaaaaaaaaaacctcagatctcgtgagaattccctcactaccatcagaacagcatgggagaaaccaacctcatgactcagtcacctccctcgacacatgggtattacaattcgagatgagatttgggtggagacccaaagccaaaccatatcatcttagctgtaggcaaaaaaaatgggatatatctttattctttgactttctagaaatgccactatctcaaaaatataagcctaggagacagagggtgaaggtagggtaccattttctatggtagtggggatgagtgatgcttttttaatcctattagtttaatataggaaatggacaatgatcatgtaaatgaaattaattacataactaccaaatgaaccaaaaagaaacagaaaagggttctgtgagagagaactatggggaagattcaccttaaattagatgtgaatttcctttcactaatttctacttgaattatttaggcatactcaggactcctgttgtattttttaagattttgaatttggatcacctttctcatcacaacatttatcttatttttaatttttaaaaatatttaatttttaaacacttaattttgttgtcctctcctccaaacttttatccaaccaccattcacctttctcaagaagaggagctaccaaaataagctggcggtaaggccaggagggtaataacaaagcagaacagagtgcgtgtgcagaggctactgttccctgctctagatgtgaacctggggacttgtgccacagggccctggagcaagaatcagagttccaaccaagatatctggacctgtcccactcatctcaaggatagattgtgccggcctaaatacattatacctggagagctgctggtgttctaggcctccgggaaaatagcagagctgtgatattaagctgagttcccctatccttgatcctcagggcaccagactttgtagttgaaggcatcacaagcagagaggttctacttgtcactttgcaacaaaactggcaattttttagctgttctagcacctgcccacaaggttactgtgccttacactgctgtgtgactccttcatttattatactcaggcaggcagatctggatatgaaggtgaatagatccaccagtaataaaaaaaaaaaaatactacctaaggaaacccagcagccagagaaaggaaatataagtagaacactcaggtaccaaactgacatttaggcagaatttctgcagctggttgatgacaattagaataaaaataataaagatttagggtaactttaggtttaaatcattttctaagactaaaatgtatgattttgagttcaaaaatttagaaggattcagtgagaatatggtccctatggagatctaaattagtggtccagaaggtgcactagaatatgtatctgaacaagagcaaagctgcaaagagatggtaatcataaaggaaagcatacaagacagaagacagtggcaggcattgttcaatgtgcttttttttttttttttttgagacagggtctcactctgtcacccaggctggagtgcagttgtgcgatctcggttcactgcaacctctgcctcctgggttcgagtgattctcccacctcagcctccccagtagctgggactacgggcatgcaccaccacacccagctaattttggtattttttggtagagacagggtttcaccatgttgtgcaggctggtctcgaactcctgacctcaggtgatccatccgccttggcctcccaaggtgctgggattacaggtgtgagccaccatgcccggcctcaatgtgctttttgtttttaacttagttaatcgttacaagaaccctttgacatagaaattctagagaaatataacatttgaataatgaaaaattttgtagtaaaggaataaagaaaaaacaagctataaaaatgtaatagaagaattctctcttgatgaagaaatgttaagtacagatagaaagagctcatcaagttccatgaaggattatgaaaaaataaaattaaaagatgcattcctagacatatggtaaaactcaattccaagtatcaacagtcaaatttagcatttcaatacaagaggttagaattgataaaaattacatttacaaaatatagaggttaaaggactttggcatcttatctttccactatctaagtatttttctctgtggtgcagtatgagtccaacttacctttgtctaggataataaaatatcaaaataattatttggatgaaatatccctttttcacactgaacttaaacacttttatattatacagtcagcccttcatatctatgggtttcataatcacagatttcaccacagactgaagatattttcaaaaataaataaatgaaaaataataaaataatacaaataaataattatgatgactatgtagcatctacattgtattaggtactctaaagataatttcaagtatacaaaaggatgtgcatagattatatgcaaatactatgccattttatacaaaatgagcatctgaggattttggtatccacagggttactgaaactgccccatatggatactaaaagacaactgtattcatttgccatatacaccaaataaattggaatttctcttttatctccggatactatttattcttaaacacaactattctgtttttattataatggctttatattatgtttgcatatcagataagatcatcttcactattctttcatttataacttttggctattttaaaatttttattctttaatatgagtttgaagtcataacatctaaaaacccctctacctcatcaaaaataaataaataaattcttcctgtagctgtctttgtacttggaactgcatatgttattttgagagaagagttatttttataatactagtttttacatataagaaattgaatcttaattattgttttcatttctggctgattattttctaaaatgttattttcatatcattttcgaagatttataccaattattttttctttccctattgtaaatactagaacataaaaaataataatgattaatactggtgacattgcatactcttgtagtagttctagattaagggaaatgatcttaatacatcgccatttagaaatatgttcaatgttgagttttggtatatttttaaaattatatttatgtgggcaccttctattccagtgcttactttttataccacattgaatcatgcttcccaaacattacctcttaaatttacacctagagtggaagtgaatggggtaagagaagaatgttctttgtgctctggaaagtcagcattggtaacatgaggcacatatgcaatcatatacaggagactgtatcaaaaatggaataagattttcttcctatttagactagccccaggctagtaatcctatatgtatattttgcaacttcccactgaaatacccatgactaaactacagtgtaaattatgacaggcattcaagagtcagacagtatcagggctacacctctagctgcaaaccaataaatttgttctgttgcagaagtctaaatgtgtaggataataactctatttctcagtccagcttcatggatcctgtagaaaaacaatggttcagctatttgtctctttatacagatataagtcttcatcattatcatcatgatcattattttatcatgattacttgattataagctccatgagggcagggatttttctctattttttcatgtagaaatacccagtcactagaaaagcatttgacacataaaatgtactcatgtactcagtgtaaatgctatacacttcaaagtttattatttgcatatgtattttattcacactttcagtaagtatttgtggagcatttcctgggtgacatacagtattctaggaactgcagacaaaatagtaaatagaaaatagaaggtctttgccttcatagaacttgcttcttaaagcagtagttctcagattttgctgcacattggaatcacctaaagagtttttaaaacactgataccagcttctacctccagactttctgatttaattcgtgtctgatgcaacttgaaccttgggggttcttcaaaagttctccagataattgtaatgtgcaccagaatttttgaatcattggcctaatatacaagttggcattaaacaattccaggtttcttacttgagagtgataatagattgtgttacaaaagccaccactttacccactgtgtttagttcatattatattcatatgtttactattaatattattttaattatgtcctatattcttgaaccaaaaaaaagttccttatggtatttttgagaaaccaaccaacactattttctaaaaatacatttatcaaaaaggaggtgaaatatttaacatttcagttgagccagttatacacctacctctattaaatggagatgcaaatattgtttacttttatctcaatcaaatatcacattaaaatgttattctccatatgtatctaagaaagctttaaagaggaattttgagcagttcttgactacttgactgaacatataatctattattgtattttatatggagaaactctcttatttatatgtttatttatttatctggtttccagatgctaaagtgtatgttcattatagtacattatagttcattaaaatgttcaagtctaaattgcactcagcatagtgaaactgctgctatttttcttaaacattatacctcttcagaacagatttgcaataggtactggcccaaactgataacttccttcccttcattttgcataatacagcaattttggtttcaaaatgccaccacaatcttaaatattctgactagctttgctgagtttgcagtagcaacaatgataatacccattgtaaaaacgaaatgcagaaatagtgactgtcaaatcctaacatgttccttatatccacacttcagttttcttaccagtataatctacattccagttaataatttaatgctaatcagctccttatcttctgaaaaggagagtctgctttgaatcataaggcagctgaccttgaaggtaggtttaatatatgcagatttcttatatcacctctaagctttttttactcagagcattttcttggttacatttagctcagagctgtgcaatcatcattttgtctatcctaacagtaactgatttaataacgatagtttttactcttccttagttttggactttacatttatttgtataactagttttaaataacgtagtgttttaatgtgcaaataaaataaatataaatagttcaggtaaaccataaatactagaaagaatatagtagcatctttctaaacaaattctgctatttcacaaggtgcttatgtatttctgtcaactttctttagattttactgtcaaatggcattttttagtagtgatgtgataaagatttaaaattggttccttggactacattttgtgaattgaaattcaacatgaattgagaaatgagctatagaattttattatatataaaactgtaagcaaagctgtattattataataaaactatgtaagcaaagctatagaagttcagtttaaatttttaaaattttcaacaaatcgaggacaggaacatgtttcaaaaataatatcaaaattagaatttttacatgttataataacttcggtttaaatgtgttaatgagttaatgcgattgcatagatctaaactgaacaacaaaggaaagagataagaaaaaataatttttgtttatctaaaaattacacataatctgggctttaggaaaaaaatgtataaagctctttggaaatagaatcccatcataagaggcaatttcaaacttctttgtatatacatggtagtgacttgccttaaatattaaaatacccatctttgtttgttgtaatttgtgaatttacttgttttcccccatcaaaattaggaagaagaaaatacaagatttctatttcaaaagaggaagaatggttagattaggacagtggcagcaaggaaatatgatttttttttttaattgagatcctttttgagaaacaaaaggtggctttactttgaattaaaaagtcatttatgttgggtagagttcttcacttaatggtttcctgcttacactgaaaaatacactgggttgatttagattgttattcttcttcatttagcttttagtgatctcatttgtgtaatcttcatacttgaaaagtagaatatgaaaacaacaagaactatagatgtgctttggagattgatatgtagtgcttttgctagtgaaaaataatctcaaagaaataagtttaaaaaacaaattttcttaactctattttacaataaaatgtttttatattgttattagcattccaaattattttcatgaaaattattttatggaaataacccttattttattagcttgctttctattttaaatcacgctgtgtaagaatgattaaatcaaatataaagtatggaacaatttaaatgacttaatggtcttccagataagatagaaatgtttctgctattatcttgaagaatcaatagtggattgggttgtcttctttaaacatcatgctgttttcactgcttgttatgttgctctaaagaaatttaaatatttcacatgccagttgcttgggagaaacatttttcaagacaattagttgtgctatttaaaattaaccttttatctacaaataatgttgtcattctctctggagtgtttgacctaactagagctaagatggcacatcttagcctacaaaacatgagatttcactaagtaaaagtaatgttttgctcagtttagagaacagatactggaaagcaatgttaagagagattttcagtagttcatagttcatcatatatttatattttttgatacagattaaatttatatatctttagaaaatgtgtgctacttattataaattactgttttatgtattgctatgtataaatgatgtgcttcccaatttaacctttagaagtaaacttaaaagcactcataaatttctgttgaatgtagggtttaataacataggtcttatttatttaaggataattttcttctactatcacttaggcataaaattaatatagttttatttttaactacttaagttcttaatctaatgtagccttaatgaatttacccatgtaaagtacttgatgaagccatcatgaaaggctgcttggctaatatccatcagtccccttgctgaaaataactgaattttaatgtgaatatatataaaaaaaaccggtaactgtttcatgtatctaaggtttatgcaacttaatttaataatttcattttttaattgtgccatagacatgtttattgagttataaaaacaccacaatcacgaatgaatgggaaacacaaagaattagtattaagagtatgctgtttgttttgattatgatgcataactaaaaacctaaaattaactgtaacttaaattgtttctctgtggctttttttttctttctcatccaccctcttcattctcccttctcctctttaaataaataaaaatattctgaatgtagcttaactagttttagaagtagagaggaagattggttataaagaggaatgtaaattaatttataaacacaagttatctcaagttaaaatcaatataagagagcctgtaatctccatgtagccaaaacctgggattaactaaagtactcaatttcctttgtagatcatactaattagttttcagggtaggcacatcttaccaattttatgcacttatcaagagtcatttggatttgttacctagtgtatgactgccatttgttcttgttatttcatttcacaatttcgttaaaaattgtgctatctaatgcaacatgagcattaaaaggcttttattttattttatttttttgaaacaaactctcactctgtcctcctggctggactgcagtggcatgatcttggctcactgcaacctccaccttccaggttcaaatgattctcctgcctcagcctcctgagtagttgggattataagcgcatgccaccacgcctgtctagtttttttgtatttttagtagagatagcgttttgccatgttgctgtggctggtctcaaactcctgggctcaagcaatctacttgccttggcctaccaaagtgctgggattacaggcgtgagctaccgtgcctggctaaaagactttttttttcctccactataaaaaccaagggaaatactgtggaagtagataaaagcaaatcgactaaagtttagacaatattttgaaaaactaaaattctagaagggttctagaatttttgctttggattgccttatgggttgctttaacttttttctccattaaaaaataaaaaactagaaatcaaaggcaatgtatgagacttatgaaaaaaaatttagtaaagaaccccaatcagtgcattcttactcaatgaaaaggtcttggttttacaaacagtagcatccatatccccctatgtaaaataagatgaagtaaagatatatctttttatgactttctgttttaattattttatttgcttaatcagttgggtaaattatgagtcctagaatttaagaaaagagggcttccactgtactttgtactctccttcagagaaaagctaaagaaaccgcttcttttgctaggctgaggctgactgaattccgtgggtgtttctacatctgaatatcattacaaagactacccacttgaggagatatgcttgctattcaaatctaccatatcttctggaaattcttgagttcttactctatgaaatgaagaaaataacataaactaacatgcatggggcacaggtttcttcttgaatgccaactctgattagttgctaattgctacttgaagatctgtgcttagatccatctgtagcccctttcaccttagagtcaaatgcctggatccggtactgtcacccgcgggaacagactagggtagaaggataaaactatgacagcattgttctcctgagctacagccacatttcttttagtgttttccagatgtataaatgagcttttcctatctttttcttttttactttttcttctgttgggacactcccgtcagtgacatccctctgtattggttagttatttcatagattagaaagtttgtgggctctgcacaattcatccctttggttcctatagaaaagaaatgtttgttaactcatttaaaataaggactacttcacgcaaataaaaaccacttctgtctacttctctaaaaactgaataacctatgtctagtcttcattaaagaaagccaaaaaagaaagtttattccaacatattatcttcacaattaagagtatacagaatatgagggcaagaggactattccaatgatcactgtttgatttagtgaatctggctgctaaattgactctaagctattttctttacagtttgtcacatggtttagagtactttaagaggccagccttcccgggtgaaaagtacaatagtttctaagacagagtattcataaggtttgtggtgttaagaaatattacttttctgcaatctttaacaaatgtggaaaaggacattctgaatttataatgtaaatggggctggaattctttcttggaaaatagaatcaataaacatattttcagaagtaaaatatattgattgagaactattgtctaaatattccccaaaccctagatgttccttgtcaaatatacacacagaagatgtactgtgctatatagatgaggattgatgataggaatatgtagatctacacgttagggataattttatttcagtttaatgacatcagaattcaaaagaaatgaaacattatacatgtaacaattattgaaatgcctcccatgtactagcagctgtactggttctgcccttgggaagtttattagcatagctgggacacaggcctataaatagataattaaagagaatattgttaaaggccatattagggttacgcctagggggctgtcaggatatgtcataactccccacatttcaaattacaaaatttgctttactccaaaataaaggtagctttattgtacatttaagaaaacttgaaattgtaaagtgtttatgtgaaatgttaacttacagacttgatttaccaaatttatagcagtaaagtaagtcccatttttcagaatatgaggtatgtgatttcagctccttaaatgggatacctcacattattattacagtttaaaacctatgagattttcttttctatttttaatccttctcttaatgatctcatttattgtctactggaaatcaatttaggaaatcatgttagtccactaagcacttcagataaggctattccatgaagcattccaagattatcacaaggaattgctttcatatgccataaaagaagaaataagcagaatatggcctgctgaagaaggttacagttttacagcccctcccattgcagctcttaagtcactcagttacagttaactttggattagcactcacagattgaaagcaaaacacatcaaaacactcatcacgcactctgggcttgtggtgccacttgtatgtgtgtttctaaatcaatgatgagggtatcagaaccaatactggacatggacatggcaaattacagtgaagttttggacccaacttacacaactttggagtttgaaactatgcagattctatataattcaaatggtgagttatcatctgtttatagatgtaaagaaaagtaagtataattggagaaggtggaagactgagcttccaaaggtggtggctcaatgttttttttgctggagaatttagggcttgcttttaaggccacagatctgagcttttgcacttcattacaaaatttaagttaataatgctgtggctattttgtgttagaggtagaaaaagcctggttttgtgtaataaagtaatgtcagaattctgtcatgggccagttagacaggtaaaaagagtagtctcagctgttattttatttgctgtaaatcatagtaatatgtcatattggcagattggctgtgaaagtatattttctaagcaatatttaaaatgacttatggaacaaagtttccatagaacattagggagtttcactgattgtctacccttttccttataattccagttctcaattgctagtgatgagaaactacatttaaaattactatcaggtttttgcattgaacgcaaatatgaaagggaataaggcttgtattataacctcacctgacaggctaatgtttagccgcacaaagctgttggtatttaattactgtaacattttaactttaaataagacatgagttttttaggggtagtgtctttatgtaatacagcttactattgactttgaatttagacttaatacccggtaaaaaaaatcttgtttaaaatatgttataactgttagaactcctaagatcgagtaattatgtatactttggaaaatgtgtatgtgtgtgtgtgtgtgtgtgtgtgtgtgtgtgttgtttaatgcaagattgagaatatatcttgtactgaggatatcttactattctactgtattgtataatttgtatgactggtgttctggttctatttttaataagcagttccttattagtggggattttaaaaaatagtcaaaaggtgaattctgaaaatttagcacaactatagttaaaataaacctgtagtgcaactttcaggaaatcactgttttgtgtccttatgtttagacttgactagagatatttaatagagtatttcatcagaatcctgaatttaaaaaacactcatgattaagaaatggtagggacatatttgccataatcataacacttatttactataagtgtttaacaaatgtactgaaataacgaatttgtatggctatatccaaagtatggtgtaacttgtttgtttgtaataatgttgtcagcaatatgtaagtatggcactaaacttgaagcaagagttgaatttttcatatttctatatagtctctcagaatacaatcaattccaaacagttctaactttcatattgtcaatatctgttttgttaatgttaccagaagaaaaatgtttagcattttaatcctatgtcacatgactaaccctaagcatattctcattaaaatttttttctacttcatgaaattatatatgacaatatttgtctactcagaaatattagtaagtagaatatatgtaagttacaaaatataatcaggacatgacaacctttagtattatccttttgttagctatacaataatcagttgttaatatacaattttataatgaagttttattacatatatttaatatcttttgaatgcatatagatttttcaagatgtaatccacaatattaactcatttaagaaatattcattttattataaatatctacatttaaaaaataattattccttcagaattatgtattagatgacccactgtatcctgggcataatcctaaaagctggaaaacagaggactaaataagacagataaattctctaccaacatggggcttatattctgtgtgtaaagatgggtaataaatgagcagaccaatgcagaatatacttttcactaataaagttatataaaaaactaaggccatttaaaaagctaaggccaggtgtggtggctcacacctatagtcccagcactttgggaggctaaggcaggaggatcgcttgagcccaagagtttaagaccaacctgggcaacatagtgagaccttgtctctacaataaaaaaaaataaaaactagctggatgtggtgatgtactcctgtagccccaactactcgggaggctgaggtgggaggattgcttgagctcaggaggtccaggttgcagtgagctaggactgcaccactgcagtccagcctgggtgacaaagcaagtccctgactcaaaaaataataataatacttaaaataagcaggggtctaggttctacttgaaggacagatgggaggtgacatttttaaatgtgtgttcagagaaggtttcacacaaaatgtgagactttaacagaaacctggtagctagctcaaagaaacgtttagggaggaactttctttccagacagaaggaacagcaggtgaacaagttctgagatgagagtagccttcaatgacgacgaaaaaaaaaaaaaaaaaaaagacggtattgctggagaatagtgaactgaatgaaaagtggtaccagatactgggatcagagatttcggggagttttacgggggtttgacatgcagggtttacaggctgtgggaagatgcctagacattattctgtatctggttacgacagggttggatgcagagggtgacatgatatgaattactacagcaatatcacttaggtggctttgaggtaacaaacagtagggcagcaagaatggaaggaaagaacttagatagcaggctgttgccataatctagaggaaagatgatggttgattgaataaggatgtccatagtgaaaagttgtgaattaaatatgtatttcaggccaggcgcagtggctcacgcctataatttcagcactttgggattataggtgggcagaccgcctgctgaggtgggcagaccgcctgaggtcaggggttcaagaacagcctggccaacatggtgaaaccccgtctctactaaaaatacaaaaataagcctggcatggtgacacacgtctgtaatctcagctactcaggaggctgaggcatgggaatcacttgaacctgggaggcagaggttgcagtgagccgagatcgcaccactacactctagcctgagcaacagggggaactcaggctcaaaaaattaagtaaataaataaataaaaagtattgtaaacatggacttaccaagggattggttataaaagataaaggagagaatacaataaagactcacagattattggccctgggaaactggatggatccattgactgatacaggggagactgaaggaaggaagaacaagttctaggggaaaaatgaaagacttttgtttttgatatgttaatttacaattctgattagatttcacaatgaagttcttcaataggtgcttgggcatttcatgttgatgcccatgggagacatcggggctagagataaaatattggaattattcatcctacagctaatatttattgtcatggaactgataaacttcccttgggaaagagcatagttggagaactaagccctatggtgtcccaaagttaaatgttcagaaataagaaaggagagcttagaacggaagcagccagccaggggttaaaaggaaagcaccagtgtggggtctccaagaagccaatgaatggagtgttatgagcctataaataattagtaggacaatttagtcaggaaatagtactaactctaactgtaatcttccttttttattgacagatagttctgccccagagacaagtatgaataccacagacaacggtgtcaactgtctgtgtgctatctgtggggacagagcaacaggaaaacactatggggcatccagctgtgatgggtgcaagggtttcttcagacgcagcattcgtaagagtcacgtttattcttgcaggtactttaaatgcccttttaggcaagttatctttacagatgtttcagtttggcacgcaaaaagtaagagaagaaaattcagagttttcgtatatctgtaagtctataaatacaatctctaaactgcggtacaagtaagaacgtgtgggtatgtacacaggatgtattcacataggtgttcttttttatgaaacattttagacttacagaaggtatataaaaaatccacctacctaccacccagcttagaccaatatagttgaagcctttaatggacacctcctctgtcactttttctccctcgtctcctagaggtaactaccattgccatttcatgttatcttttccttgtgtttctttattattttaccacatgttcatatacctctaaacattttaaaatctgcatttaaaaggttttttaatatgagtatttttcttcatgtttattttttaagtgccattacatcctaggtctaaaaacaaaattatgaaagtgcagatgattttggtagtttgttgatatcaatgagtgaaatttaattttcagtcctaaaatttagaatgtatttctcatgccatattttttgtcattaaatttaaatgttttgtcagaagcttatttaactatattatatttgtcacgcatttccagtaggctgttttcttgggtttttttttttgattaatacctagtcaacatcataacacgatttaagtatacatattgcatcttgattcatctgtatgactgtccttgaatgcagattacatttagattgaatataggctattaacaaaaatggttaaatttaacataaaaataactatgttggttctgtcaataaaaggtacgtgtagaattatgttcttttaagaacagattggacatttgggaagaggttaactttctcaaagtcttgccatgtgatttcctagggtgcaatacaagttaatatataactccccaaatatctgtctagttctctggtaattctttagtaatttttccaagatagtttgaagcaggttaagagaaatataaattgcccactttaaaaactttctaggtaaacaaaaaaaagtgtatttagataagttttgcctttatttacattaaaactctaaaggtaaaaggtagatcaatgtccttcattccctcatcaaaaatagttttgtatgaatgtttctaaactaaaacaaatacagaataacctgtaaaccataccttctggagtcaggtgctctgttaaaattgaatgtgtgtgtgtgtgtgtgtgtgtgtgtgtgtgtaaaatgatgatccaaacaactaaatcctacaacttgtgagaatcagagaatcacaaaggctatgaggacttctgtcctttctttatgggaagagtggaaaagggatgctctcagagcagcttttagaggtttaaaaaatattctaacaacagatagagtttaactcctgcaccttcctattaagaatgctactgccaacctagctttctttacatattttagtattcagcaaatgttatgatttttcatttggaaaatggttagtatattgatggaagtttaagggcatggagactttttgaagctcaggttgtgctggtctcaaatgtatctatttccttagattacaaagttccatttctactgtaactgctccatcaaactgaggttgggatttccttcaaaagcacttttaattgctgtttcaatacttttcatgttatgtttttcacattatgtacaatttgtatgtgtactctattagattataatttccttgagtggaggaaacaagtagcattaatctgtttaatccctacaccaggatcttgtatgttgtaggtgcttaataatatgtgtattcaatttttgttattaatttaatgttaattgaatgcattctccttgtgtttttgtcaatctggtcctctctcctgagtctcatcagccatttgttcccaaatgggcaatgccttgttctcactctgaaagcacatttctcttccagctcaatttgttgatgataggctttgcttctcattcaattttaagtggacaccgatagtttttagaagaagtacattttataggtcacaaaatatatgtctttattcttatcattaatcatcaactataaataaacaggtacatatcaatatgtatggataatttttgccagaattttgaagaaatgttagcgtttactgtatgcttaatatttgcccccaactatttgaagtgcattcacacaacaaccttttgtgcaagtccttctctttattttacaattgtaaattaatgttacttaacacccccaagttctgctgagagtcaatggtggaatcaagcttagatttaatttcagagactgtactcttttttatgtgtttgtttgtttgtttggttaagtatacaagtcagttttttagtgtatccacagagtggtgcaacaatcactacagtcaaatttgaccattttcatcaccttataaagaaacctttagtagttactcccccatttcctcccaactccctccccaacaatatgaggcaactatgaatctattttctgtttctacagatttgccttttcaggacattttgtataaacaaaatcatacgatatatgatctcttgtgacttacttcttttgtttagaatagaataggctgccaaggtttatccctgttatagcatttatcagtacttcattcttatttactgacaaataataatattccactgtgcagtcatgccacattttgtttttctattatcagttgataggcatttggatatatctccacttttgggctatgatgaataatgctgctgtgtacatttatgaagaagtttttatgtgtacatatgtttcatttctctgcatacagacctagcatggcatcgctgggttatactataactttatgtttagctttttaagacagtgctaaactgtcttccaaagcagctgcatcatttaacattttaaccagcagtgtatgagggctccaatttttccacatcctcaccaacatttgttttttctttattttgtttacctgtgtgtaaagtcttaccccatgatgccaactgtactctcaatgttgtcctcaatgacctcttaatagataatttgccatttagggtaaacttcagtgggctgtggggtacacttaaaattaatagaagaatatttgaaaagagaaaagcatgaaaatacagggccatgaagttctgacaatagcctccttcatactgaaatcatttagcaataagcaacaaaaacttgaatgccaaagatattcaaaactaggtttggctttcatgactcatgataaaagtggttatgcacagcagccaaaatgaagatagtcattcagttttattttactataaagactaagtgagaggtgaggctcgcgttttcacgcacatgctgattgagagactggaaaggtcatagctgattgttcctataccttctttttatcgaaccaaatttgacaatacatatttaaaatccatttgtctgtttatttgcttcttttgtaaattatagttttctgcaaactgatatatctttatgttataggttcagtcggcaatgtgttgttgacaaggacaaaaggaatcaatgtagatattgtcgattaagaaagtgttttagagcgggaatgaaaaaagaaggtaataataatgatgatgataattaacattattgatgaaaagtgataaacatacacacacattctcattgattagtataactttttacatgagttctaattttcctcaatataataaggaggaatctatgattcctcaagttaaagaatttagcccaaggacatccagttattgagtggtatagccagtatttatctggtgactacctgattatggatatcattctctccaccattacattgtccaaggcaacaaaattattgactaaatggtataccaatattctgttagtgggttgaaattacagatttttttttttttttttgagatggagtctcgctctgtcaaccaggctggagtgcagagtggcatgatcatggctcactgcaacctaccaggttcaagcaattctcctgcctcagcctctccagtagctgggactacaggtgcgcatcatcacgcctggctaatttttgtatttttagtagaaccagagtttcaccatgttagccaggctggtcttgaactcctgacctcaagtaatccacccctctcagcctcccaaagggctgggattacaggcttgagccaccacacctgacacaaatgtattttttgttgttgttgttctcaataacaactgaatatcttttttcttttgatgaacattgaatgaacatctacttttcatgcattcatttatttactaaatacttgttgaacactgcaattttccaaacactgttctaggtgctaaagcttcaatagtgaacatagcagacaaaataatcttccctttcaggaagcttgtattatatcgagggaccgagacaagagactagatgtgctattttagtgtgtactaatttcatcttgaatatattaagtaatctgattatattctcctacattttaaatatgattaatttagaaacaaatgtattgaacacattgtaaacatgtgacagtgtgtaacagctacaaaattttatacttgtcagttttgctgtttggtcatgcctatcatatacaaagagatgtttttcacaactatttcacaaactaaaataatcaaatgaaaccactatactaaagaagtgtaaaatatatgaagcccatctttaacatagttagatttttctttgccattcaatattttaaggatacagaaataccattagttttgctcaggttggtagtgtcgaagacaacaaaaaataaagttcacaaaattaaaggagaagcactttctcatttaaaaagtgatttatttctaatttcataggaagctctatttggcagtttatgggactaattacacacttggtcaattgccttcctccatttttacttgaactccatgtttatccccacaaaagtgtaagcaaataacaatcctatgtttcctttatgagttttacaatttgtgaaatacaattatgttttaaaataggtaaattttatcttttgttcataaaagaatgtgttattttcttaaataaactggaaagtaatttcaagttttaaagttgatatatttctcttttttacactaacagcatagtagcaagattaattagatggaaacaaatagaagcatagttttatgtcaaaaatgatagcactgagattataaatgtttacaatatcttttagcatttttctaaagaataatcatgtaagtgaaattcataaacgcttagctaacatcttaattttttatctctgcatatgcatttccaaataagtcagtttaggttaaaaatcaataacaatttctgtaaaacaaaaagagcaagctaccagtaagtatgattttaaaataaaatattactgattcactccaacttacaaaaactcactctttctttttttttttttccacaaagaagtttctcagaatgcttctgggtagttgtttttttttaattattattattattatactttaagttttagggtacatgtgcacaacatgcaggctagttacatatgtatacatgtgccatgctggtgtgctgcacccattaactcatcatttagcattaggtatatctcctaatgctatccctcccctctccccctaccccacaacagtccccagagtgtgatgttccccttcctatgtccatgtgttctcattgttcaattcccatctatgagtgagaacatgtgatgtttggttttttgtccttgtgatagtttactgagaatgatgatttccaatttcatccatgtccctacaaaggacatgaactcatcattttttatggctgcatagtattccatggtgtatatgtgccacatttactatgacaaacccacagacaactcactctttcttaaaagcaaaaagtcctgtaattcctcctttaacttaatggagtggatatttaatagtaagttttaggtctctagaaattggtggatttctttaacaaaagcatacttgcagaaaaaaaatgatattttaatgccttattgctccagcagaacaaattacagccttaaccgaaataatttaggggctacattccttgtttcccttctctttggttaatgaaagataatttcacctctaaagttttgaaattcaactttgatatctattttattctctctctctctctttttttttaattttattttgagatggagtctcactctgtcactcaggctggtgtgcagtggtgcgatcttggctcactctgaccttcgcctcttgggttcaagtgattctcctgcctcagcctcccaagtagctgggactacaagcgtgtgccaccacgcctggctaatttttgtatttttagtagagacgaggtttcaccatgttggccaggttggtctcgtacttttgacctcagcctcgcaaagtgctgggattacagacttgaaccacacttggcctgattttattctctctctggtaaacatgtgagttaatattttccctgtcactcttccttatatttaaaaatgcagttttcagtaagggatttggggaattacattactcttttttttttttaaccctgaagtaaagaagcagatctagctttctcttagaaacctgtataatatataggatttcttcatctttccaaaatgctgatattcaaacctcaattttctcaggagagactgctccatggtacatcttttgctttattaatgttggtaaactgtcccatggacagtgttttataagagatcataatattgcaatcctaaaatcatcataactaagtttactttccatttttgctcgtgttttatagagaaaagaaaatggaagtttcaaaatctatgactcatattttctgatagtgaatacactcttatctttgacctggtcaatcttataggcaatgctcttcctctagttatcttatagttttattaactttgagagaatagaaaaccaccctattaaaaatacagcgtggcggaactggctgacccaacactttctaacacgcatgctgtcatgaagtctcaaacagcattgttttatgagctctagtgacaaacctgactattgctatttttgaaagtagtggagaatgaaaatatctttcttccaaggtcttttagaaagactttttctcactttttttacttaaaaaaaaaactccttaaaatctatattctaacatacactaaagagaagtgctcaataaatactgtgttttttccccctagctgtacaaaatgaacgtgacagaataagcaccagaagaagcacatttgatggcagcaacatcccctccattaacacactggcacaagctgaagttcggtctcgccaggtacctgtggcacggcagcatcaaaccctatttaataaaatcaaatgtccatgtaggcatcatgctaaaataatctaagttttttcaaaggtgctcattactaaaataagttacatctacacacaattaagagttttactttgaaagtttgagtgggactgctgacttaattttgactgttcttgaacaagactagttttaaatggaaaaataaaacaaatttcagtctaagattgttttttaaaaagtttgcttataagtttgattaaaaataatgaatagcacaaagctctgtaggcagtattttattttattgatggaatctgtacaaccagctaccacaacttttggggagtttggttgatatttgttatcagagcttctttccttgaaaatgacttctggatctttgggaactgctttggaagcagacatttaaatgaagagtcagaattcagaaaacacagaagagagaaaactttattattttaaatttctcaaataacagttctacagttaaaaaaataagtcattagttatatacataaaaataaattatttagtgttgtataaagaaatccttaaatcaaacttactttagcattgcccttattagaaatgttaatattatttttctattataaagcagattataaaattgccaagtagttaatcaggtcctataatgagtcagtgcaactactttcatttttgataacacaagggtaatatgatgaggttaacatcaccgttatcattattacttgaagattgcttgatgggcaataaagcttttagagaatgacctaaaggggagctatgagaaaatattcaaatacagataaagatacactcacacgcatgttcaaaaataagtttataaaaacttttagactgtgttttctttcagcagaaaagctttattacttatatttttatatagtctaaaattacaaatttacaaatttacaaatcttacaaatttattatatgttaagctcttcaacattgctgagtcacacattggttttttaatttaattttgatgggcttccttttaatgcagcgagacaaatagttcttgcttcttgtctccccaactgggtaaactttatgaaaacattttcttcataaacttccacaaattaaagaaaatatcacctttaattcaaaataaaatcaaagagcatattacatatggatactatctatctatttttatagccattttgaattgtgaaattcctcaaaagttggggtaaaacttagtgtacagatttgaccactaacataagatactgttcccagaggatggtgctatatatatgaaatgtttttaaattaacttgtaaacttataggtattttatttttcaatttaaatcagtatttcatttttcaatttaaaatgtttagtatttgtcaagatactgtaacaacaatagtgcctacttctatggcctttacttatcatagtcaaaagaaaaaaaggggaatgttggccatctattattttaaatgataatataatgcttttcttaatactagatctcagtctcaagccctgggtcaagcactgacataaacgttaagaaaattgcaagtattggtgatgtctgtgaatctatgaaacagcagctcttagtcttggtggaatgggctaaatatattcctgccttctgtgaattaccattggatgatcaggtacacatttaaaactttataaatgctttaaaaatgcttcttgaactttgctaagtttatgttctttccatattatttgtaatgcatatgctatattactgtatttggcaaaagataaattaggaggaaggattgggtttccttacccattcaccttgttctatcaagaggcacaactgtttgacttctattttaggggtgtagcaaatttattgattggacaagaactgaacaaaacactcctctgcccttttggaattttaaaagggtcatgtgagggagaaaggtagatagcatgtaactatcattgtgagacaaagtattagaagagtgaatgtctgtgaagcaaatggtggatgttgtgtattggcgtttactgaagctgctatataaaactcctcagaaataccaggtcactcctagacagaaaccacacaggttgtggtgttgtcttggtgggtacttcatgcaattaacgtaaagttttacctttcatgctgtcaattttattctagaatttattgtataaaagttacatgtctggcaaaaagaaaaacatctgtagaaacatgatcagaaatttatagagaaataaaatttacacaacaaaagatagagtgatcttttactaatacttctattttcatattttgtcatatgcccattaggatattttaataaatacttaggaacttgaatttcctaattgtactataaagataagtattttggtttcagattcattttgaaccgttcttactaagtagggtataattttttgtagatgaaaataattggaaaaattccctttctctcaccttaaattaaccatggtaagtgttataaccagtgtatatttatttttaagagagcgtttcacctggtgacaggaaaaaaaaatacagtgaaatctgaaataattcttaaaatgctctgtaactgccttcctggtgtgagtcacgaatattgacataccataaagatagcatggctcagaaggttatgccagtgaataacgctaaattgctaaaacctaccagtctcaccccaagcaatataagtagggttacgttatttatcagttttatatttttattatcattcttctttagaagttgctgacttatatattcagtgatttaaaaattgggaaattaaaatccagtaaccagtgaaaaacagttttaatttgccaactgattctttaatattaacagtataacatttattaattagccacaaattagtaaatgtctgttatgaataaggcatgggaaattagctttcagttgcactataaattacatcatttcatttaattctctcaggagctcggtgacaggtgttattatctccattttacagtttctaaaactgaaccctagatcagtaaaattcattcaataaattcatcaaatgaatatttattaggagattactgttcagttttaggaactgtgggtatttagcagtaaaaatacagatttcttcactattctcataaatgtacactctatttgagaaaggtggataacttaaaaaatgcaaaaattatgagaaagttcattccaagtggagataagctctataaaatgctataaaatggaataggatgagttgttggagaatggggataaaatgagaagagatactttaaactgaggaccagagaagttattgcctgagaccctgaaagacaaggggccaagcccaggagaatctgagaagaaagcactccagatacaggaacagcatgtccaaggttctgagtcaggcagcaacaatgtgaacaaggggtgttgcaagatgaagtcagagacatgagggctgggaggcaaagcactgacccctctcacgcctcccatcacctgtgaggccatgtttgacgagtttggatttcagtctagggacaataagaaaccattcaaagagttttcagcctggactagggtggtagcaatggagatgaaaagaagtggatcactttggcttgtattttgagaagcagcactagaatttactgcagagttagagaggactcaaaatagtctcttgttttgatgtgaacaagcactttggattacggtgtcatttactagatgaagataatggggaagtgttacattggtaggtgttaaatttgtaatgcttcctatacttcctagtggtgatgcccagcaggtaattgagtgtacgaatgaagctcagttgagagcttactgagaagaataatctagaaagcggcagaacccagacctcccatcttttccttacaagaagtctttgctttgcttttgtttatttagtttattacgtgcaggagattatgttttatatatgttttatcgtttagtactcatgagtacatgatgagattttttttatctctactcccattttgtagatgaaaacaaatgagtaagttcaaacgtactggttaacttacacaaggttaaacaggtagtaagtggccgtgctgggatttgaactctggtctgattctgtttcccttgcaaacagttaacttgtctgctttttttttttttctttctgctgccattgtattgatttgctagatagttttaaaatttttgaaaagtaagttctattgacatgctatgatagaaaactggaaggcttaatgatggcatgtatctatgaatactatagtttgttaaacaaaaagtcccaggcttaaagaacactgtaagttaacaagactcatgtcatcttttaatcattatatattataattaattgttaaactgagaatttttcattaaggtggcactgttgagagctcacgcaggggagcacttactgcttggagctacaaagagatccatgatatataaagatattttgcttttgggtaagttttttttttaatttaagaagaaattatgcatattttattcttgcaatattatacagggtctgttctgtatgtaccaagtatttacagacactggcaaatggtgctgtcacttcacaggtttaatttaattgtgtcctcacttggccttatttttccttgccttgactgtatgtaagttcagagtccatgagacaatcagggagcattaagatttaaaaataaaaaagagatgttgctcaataaacataatattgaggtatgttcaaattatatcagaatgaataattagtaaattatatggctgccttatggagtctcaatgtgttttcatatttcctcagagtctgctttttattttacacactttaaaaaaacatgtttacgtcctatgatcttattgcccatgatagcccacgatatgctacaaaatgatcaagtaaaaaagtattggtggtaatgactgaacaatttcgatagacaggaatgctagaagaggctaaggaaggataataggtgtggggtggtggggtagagaagacataaagaaaagacatttgtcttcattaattgctccaatcccgctaccttacttaacttaaacagttaggttttgagggttgagatccttctgacacttactagctctacctctctctggcatgtgtgaaaatatgactagattattttatttttgtgctagatgttttagccccaaatacaaataaattgaagacaatataacaatatttaatattattgcaggtttactatgtaaatgcactggtctaagtacattacatgtatatgtatatatattctctcatttaatccttgaaatagccctaagggattagtactactattttcagcccattttgcaggtgaagaaatggagacagagaaagtttaccaaaggtcacaaagctagaaaataatatagccaagattctaaaccacataatgtgattgtggagactatgccctgaaatgctattaaatacctctcttgaatttctagtaaacatctagaatactgttcttgttatagacctaaatgcaatatacctagaaaacaaaatgcctactgtatacattctagttctaaattgatttacccagaatagttaggtaagctaacctttcataaagaaagagtgaaactcaaaaaaagatagtaactatgtgaggtgaaatatatgttaatgagttttactatggtaattatttcacaatgtagatacaaattaaaacattacattgggccaggcatggtggctcatgcctgtaatcccagcactttgggagacagaggcaggaggatcacttaaggtcaggagttcgagaccagcctggccaacatggtgaaacctcgtctctactaaaaatacaaaaaattaactgggcgtggtggcgggagcctgtaatcccagctactctggaagctgagacatgagaatcacttgaacctgagcagcagaggttgcagcaagctgagatcgtgccactgcactccagcctgggcgatagagactccatctaaaaacacaaacaaacaaacaaaaaatcacattgtacaccttaaatatatacaattctgtttgcttgtcataactccataaagctggagaaaaaagagtgaggctaccattgaacatgctgttaccctgaggattgtctttgcctgcagtgaaagaatttagaatatttatctttttataaaaccagaaaataacaatttaactgttatttttggaagctataaaaattttcatcatattatagctagagaatttctaagttagaaagatctttagggaataggtggtccagctcgctacccaatctctgaactcccttaaagtcagccttataaagtggttatcccacctctatttaaagaagtcctggaagagaaaacatactatcagaggcaactcatgagaattcacatgctaatttaaaaaaaaaaatcaacctcctttacttaggtgtgttaaaactgtctcaatagtgtatgcctagaatgcctagagtatcaaagtgctgtttttaatccgctgtaaacaagaaagattctttagggtttgtattatagtcattagtgaataaaacgctaatagatgtctgacacagagaaaaactaatcattatatttagattttgtcaaatatcagcatgttattagtctgcacttttgtgttatcaccagtgactgatcccgttaaaatgcatgtgatcacattattaatgttcttggtcctttaagcatgcttaagtttttctagcataactaacaacaccactgagagaggaagtacatcactattccttcaagggtagactattttaaacaccggtttgttaaattttaaacagtgctgacaatttggggagacaggtggttattttgttttgttttgttttgttttctctctcataggaaacaactatgttattcaccgcaacagctgtgaagttgagattagccgtgtggccaatcgtgttctagatgagctggttagaccatttcaagaaatccagattgatgacaatgagtatgcttgtttaaaggcaattgtattttttgatccaggttggttttcaaaattccactagagaattaatataataaaaattgaactacttttcaatattagaatatttattgtctcacactgtaattaggttaaatctgtacactgcctctcttattcctttgttagatgcaaaagggctaagcgatccagtaaaaattaagaacatgaggttccaagtgcagatcggtttggaggactacatcaatgatcggcagtatgactcccgggggaggtttggagagttgcttctgctcctgcccacactgcagagcatcacgtggcaaatgattgagcaaatacagtttgttaaactttttgggatggttaaaattgacaatctacttcaggaaatgctattaggtggtgagtacattgaataatttctactttattgattagaatcacactaaatataagtttgacctactgatttttttgtccatatttaattcatctactgaagttgctgtgatgctcctgaatttttttccttctgctatgacataatgaactcaaggttttacatttagaaaatttgcaagacccatcagagagacaaaaatacttgaacagattcaaacccccattcgtttttttttttgttgttgttttgttttttaagacagagtctcgctcagtcgccaggctggagcacagtggcacaatctcggctcactgcaacctccgactccctaattcaagtgattctcctgcttcagcctccagagtagctgggactacaggcacacaccaccacgcctggctaatttttgtatttttagtagagacggggtttcaccgtgttgattaggatggtcttgatttcctgaccttgtgatctgccagcctcggcctcccaaagtgctgggaatacaggcgtgagccactgcacccagcctgaaacccccattcttattagcctccaccacctctattccacagtccctctgacttaaattttcagatccttccaaacatggcaaagagaaacaaatttcctgattttatgacctcttcaaatatatcatggtttttcatgccctgattcatttaaaacctcaaggatactggaattgcaatacaacctaatacatatatatatatactatcttaaaaatgaacattgtgctcctgaaataattaattgacacaaaatagtagaaagggaaaatgatatttcattgttgcaatacatgtcaggaataagttaagaaatcatttattttgcattccaatctagattaaatttccttgtaaaatcattatatttatttttagttttctggtgcataatttgttcctaatgatatctttctgaaatgaaagttgttcatgctattacagtgatcccaaatactataaacttgaggtaagtgattcttggaattgccttaacaacaggcagcgaacctaatgattccaggaaacggcacacaaggtccattattaatacacagcataatatgatgcaacattaatctagccaatgtacagtgaaagctgacattgttcttaatatgccagtggttctgtcaatttatttttgaattcccaaaaagcacttggcaaaaatagcgatatttaagctgtcaatcaaaacatttgtttcaaggtaaacttgctgttcctgattaaatatcactaacacagcatctttttatcttttgtaggggcttccaatgatggcagtcatctccatcatccaatgcatccacatttgtctcaagacccattaactggacaaactatacttttaggtcccatgtcaacactggttcatgcagaccagatctgtaagtttatagactacttttcaaccaagatatttcttaattacccaagaaaaagtggaattgtgggaaagaatctattagtaaccagaaatggcaaaaacttggtgtaatttcccatctgagactcagcagtagaagactgttattcagcttgtcacttattctccctagacataagtttgcttcctaaaatgaaaatgaaagaaaaatctttctacttcataggtctggggagcacaaaagagtatacaagtagtccttgctttgcatggtagtgtgagaccataaaaacgacaatgcaagctgaaaccatgcaagggaatcttaataatcaatgggaaaattatttcttgcttggcaccttcaaaaacgtttgtcaaaatattaagaactctcttaatgtttatggagactaaagaaatataatctttatacttattttgtagaattcaatacaaaacatttcagttggtacactgtaattaaaacattaggaatattgacaatcgaagggttttatttctctataaaaaaaaattgtgaaatgcagtttgaccagttcttgtcaccttctgaaacttacattaggaagtgaggattttttctatgccctgatgagttttactcgttgggaagtttggatcagctttcaacattttatcccttgcattctcaatgtcatggcatgtttctgagaattcatttaatgtgaaattttcttgccggtttcacttattttgggacaccttctcccctttcgacacatccagctttctcatttatgtggacacgttttccttcgctgggttcttggctgcatatttagagactcaaacaacagcagcggcaacattcccatggtcagctacttcttctgtgactgcatttatgttttatttgtatgtcacttccagcattatcactttttattcctttctgcacttccactgttgttggtcaattctaattcaattattcaattttgtaaaatgtgatgtgaatttaccactaggaaacaaggaggcaacacagccaccgtatgcagtttgttttccatgcctgaactgaatagaagatgctcaatgaccaatcatggacagactaaaagttgtgacatgatcagtcactgatcataaagcacatctgttatttaggtagctgtttgcagactgaagagttggcagtggggtctgtatttatgaaattgctcactcttaattgtgagttaccgtggtaactgaaacttgaaccatgttgttgccagactggtggtgtttaactaagccttggtaaccagaattcattcacatcagaattgtgcagtgagggctgcttatgaaaactccttggaatgcaaatgaccatataaatactatagagattgttagtagctaagttaatctattattgtagctttcatgctaattctattttttctaagctactctggtgatacaaatctctaattatttgattaaatatctagattaactgattaattgcttctgaatttactctaattaatcccagatttacctttgatctattgcctctgaacaccaaacctactactaactcactgagatgacttgagttattgtgatgtaactattatgcatacacttattgcctactgaatttacaatagtctttaatagctagctacagcatttttttttcttccaaatgttgtatgcaatgcaacaacaatttaccagtaccacctgacttctaggcattggtagggaacgtagaagccatgggactgcgtgctaccatgccatcttttagatacaagcacaggtagatctttgtgtaaatagtatctgaaaccaaaattatttgaatatatgagagagagaaagaaatgaaattgttaggaaaaaatataaattttagaaaaatatggcataatcttggatttccaatgtacttgaaagacattatttgggaccatccttgcagaatagatcttaccattttcatttaacagataatcaatagcagaaagagaggagcaagcctaataccaaactagagcgtttatggagttgtgtctcttaaagatcagttattcataaactcacaaaataaaacacattaacaacacaataaacattgtaggaatcaactgacaagagagttggacagttctgctggtggttgaatactttttaagggctagtattatagtattttaaaaacatatttgctgaccctagtcttttaaaaatcacattgttactttcatttttattcttgttctttccacatactatttgtgggatttgtttgcaaaagaaaacttggctttactatgctcatttgaaataatttatattttatgcaaagcaggatattaaacacaaccaaaatttaaattcatgcatattttcttggtcttttagagaaggctactgcagtcttagatctggtctaaatagccagaaataattgtaaaagcagattttgatattgatttgtcatttaaactgcacttaaaaattttgcttctaagtaattgctaatccatacttaacaataatataaagctaatgtattaatgaacaccaggtaaaaggagactgttcttgttttgtatataatgttttaaaactgttgagacataagctataaagtttacaaagcctcagcctgatcatcaaacattttctgttagttctgtttactatgtggaataatacaataacaataagcgtgagtactaaaatatttcaagtttctaaaaattacagaataactcctggattattttataatatggttagattttacaatagaaagaactactattctagacaatgaagttttgaaactgtaactttttacattcaattcaattttttatattcagttactttatattcaattactcaggcttgctctttgcatcaaaggggatgcgacaggcaagctcgattgtaatagaataattttgaagcaaaaaaaaaaaagccagtatttttcagatgcttttgactacaacttagatttcagaacatttataaagtatcttaaccttaattttttatgtcatctaatatgtctgaattagtggaatccaaaccaaatatatttttattttatgtgaattttgattataaaaaatataaacattgttttctaatatttgagaaaactgtccttctgttaattcttttcactgcctttttttcctgctaggtttgttagagaatcaaatgcttataaatgctattaggaaaggcagaaaacaccttaaagtaactatgaaaaaaattttttaacatgacctctttctatttaatgttatttggaaagtaaggtgagagtactctctaacagtacgtcatgggccaataatgcattctacaaatcactattctgtgtaggatattttaaaaacatttccaaattacgctaatgtgtattggtgttatgtagggtttaatggggtgaggaagactgactgccaccattagactcaattctctgattctttttcagcaactcctgaaaccccactcccttccccaccacaaggctctgggcaagaacagtacaaaatagctgcaaaccaagcatcagtcatttcacaccagcatctctccaaacaaaagcaattgtgaaaatgtgtttacttcagaacggcactacataaatgtgaaaagttgttgatcttgaaatatctcaagatagcacttttggcaaactcttagccaaggcttcttcattggtgctgttataagatggtgtcctattttcttgtttatacgttcattctgtttgttattgctactatgtaaaactttcacatgcaaccaatgtatatctgagtttgaagatgtttatatagggtattttttccaactgcccctgcattgtgcctgaaccaattgaatcttatgtatgagtttcatttgttttattaatgttaatttaaatctgtaaataattgctttattgtgatgtgatacagaacaaagtgttcgtttttgactgaaaatagtagatcagaaatctcagtttaatataaaatgagctaagtttttaaaaataaattataaacttggagattagaaaaataaagcagttgctgtagaataggctgtatctttttcaagaagaatctcttatggacagtctgtggtaaagaagcaactctttgctttagagttaaatattcctatcttaagtttagaaaaatacaaaaaaccattccaaggatgactggatactttttgaaatctgactttatttgaagatgtatgttaagcaaaaacatgttgcttttatcagttaggatacagggtgaactgtaacaaagaaacccctaaaacagtgactaaatcaagagaggaatctatttctttctcctgaaacaatttagaaaatagttatccattgactagaaattagcacatgcccacagctggctcccacggtagccaggagaattatctataggtggaaagtctgtgtcagccaaagccatgtcactctgagagaactgattctgaggacaagttagccatctaccacccatgtcccttatttggtcctcacaataacactttaggagagatatcattatcgctgttttataaataagggaaactttagcttgagggtttaaggaacataaccaaagttcacaaacataacaagtgagagaaacacattcaagcccaggtctagttgactttaatgaatctttggtgtggaatgaaaaatgtgaacttcttactcatagtgtggtttttaaatatatgcagttgagtgatgattggatactattcatcatattgcctataatatatatttaccgataagcagtgagtgtaaaattgttgtagcttgaataagaaaccacttttgtagttttaatcagactttctcttaaaaacattagataaaataaaagattcaccggatggattctgatgaaaacgaaaacaaagtaaaatgactggcttagcagattctttgaaatgtagcagcccagggatgtaccaaatgtcgaattctagactgaggagtagagttcattggagtcttaaactctctgatatcacttaaagctggagtttattttaaaacaaatgaagcatgggccacctcatgatgcagtggctcctctctggttgaggagagggaaaattggaaaaactggtcgagtaattatcaataattttttttaaaaagaggatcccaaactgtaaaagattgaaataatctttctcaggattttttaaatgtctaagattatgatgtcatatctcccacttaccttataagtaaaaaggttaatatcaagtaacttattagctcttaaagtaaaattgaacttattaaaagctatctatgatttaatagatttaataaaattccttcacgacctggtacccttgtgaaactgtaaaatatatcatatggggggagttttttaactcttattttttgaaaatttactgtagcttctatttcgtgaataagaatgttttgattttgatcatacaaataacttttgtagatttttgtttacttttgggggggttcccttagaagacattaaaaaaaaatactgccttggtctgtgcaggctgctgtaatgaaatactatgaacttggcagcttataaacaacagaaatttatttctcgctgttctcaatggtgggaagtccaagattaagggatcaacaaattaggcctctggatcatacatggcattttctagctgtgtccttatacataaaaggaaaaaggtagctctctcgagtctctttaataaagatactaattctcatgactgaatcaccctccaaaggccccacctcctaataccatcactctggggac

SEQ ID NO: 141 - DNA, 15231 bp, Human
ccccacggccccccttccctgtttgttcccaccttcccttgggaagaatgctaaagtttgtttatgatttccaaataatatgtagcccttaataacttattcagagtatcacgagcaaggagcccttcggttatactcataaatggcagcctgttgcactgtgtatctctcccccagggaagcaggaggggggcctggcatttctggattagccccaggaggacttttcctgcttctgagtggacagaggatcatccttggaaaattgctcttctgagattgaattccagatcctacatccctctgtcaatctgcctgcaaggtctgaagctggtcttagaccctctggtgctatggtgcccattaaacagacactgtagtctcctgttaataagattcaattaggaaaggggtggagaagggcactcaccgcctgagagtgtgtcagggaggcctgagtggctgccttcatttcgcgcctgctggaggcaggagggaggaaggtggtgagctcgctcagcagggaaggccaggctgcacccacctccctgggggctggggaaactcagggtgacctccagagcctcaggtggcagcttactgtatgatcgaggtgatttttaatgtctcagagcagccccagggtcagcagagacagaccaagctgtgccatctggaagggccagcttcgaatctagttctggcccctagggttgcaccagtgacttcaagcctccaagtctcagtttcaggttctttgattcttgggtcaagtgaagggtggagataagctgccttctaccaccacgcctgatacttaggaaagccccaatatctgggattgtttttgttgttttgttgaaaatatatatatatatatattttttttttgagacggggtctcgctctgttcaggctagagtgcagtggcacaatcttgactcactgcaacctccgcctcccaggttcaagcgattctcctgcctcagcctcccaagtagctgggaccacaggcatgcaccactatgcccgactaatttttgtatttttagtagagatggggtttcgccatgttgcccaggatggtctcaaactcctgggcttgagcaatccatctaccttggcatcccaaagtgctgggattatgggcgtgggccactgtgcctgccctttgttgctgatttttaatccttacttccactttacagatgaagaagcagagatctaaaagcatgttttttgcctgcaaatgctgacattcacttgtcttattgctaggaagaaatctctgtactttcgcggtctctgggagggcccctggtgagcagactgtccctggacctggttggaagcagtcgtggagctctcactactcccagcttcagctcagttggtccttaaaaagtcagttctctccccttgccataaatccccaccgtctctaactcccatcactaccctaaagcaaagtaggttttaaaaatgccagtaacacaagtgagaaaactgaggtcatttaacgataagtttgggagtaaaaccaaaaacaaaaaaggaaactgaggcccagagaggtgccataacttgctcagggtcacacagcacgtaagtgccaaaggcagggagctgtagctgctccagcgtggatatgccagggactagtgacaagcccaacccctccagcccaactccacccttcctcatgccaacaaaaggagaatcatttcctatttctggcatctttgccagcccacagagacagagagaagaagaaatatttccaaatataccaggctgatctttcgtagtttctcagtcttgctgtctgttgtcgtttgaaatctgtttcccacgagactctgggaagatggaggtgcagggcttgggtaacagctgccttcctcagggctgggtacctgctctccgagtctgtgtctccaggctgtgtgctcagacttgaccatgtttgggcatggaggcttgccccagatggggaccaaaagctgcttccctggagacgggcggggaggccaaacttcctgctgaagctctgtggcctcttttggggtgggggcgggggtccaggcagaaagaaaccgtctgctgctcaagacccacaggacgccgggaagactgtgagtaccgggcctgaaagcacttgggaagtgatttctctgaagaccgggctggagggagacaggggaaagcagcctgccacggggcagggagggaggcaggcaggaggactcccttcctctcggggctgtccttctggatggagggcccgtggtctggtggccagtggggagggtggcacagtggccaggttactctggtagtaagcgccctggccctctaggtcccagttctcagagtggccagaaggctgcagcctggagattaacaccaatgctggcacttgtcaccggtagagaggtgggacaaaaatagattcatcaagaggggtccagacttctgctccaaactttcagggtttccttcgttagtagtaatagctaatatttactgagggctgatttggggctaggtgctatgatacatgtctgatactcaatatggcatttgatctttagctgaactctctgaggcaggtaccatggttctcgtttcacagtcatgtggttgctaagtgtaagtggcagagccaggatttgattccatgtctgaggacctcagaatcgccctgtccacaccccaccaaactgttcaacaatgtactctattccttgtccttctaaggaaaaggatgtcgacccagctatcaggtcacccaggacactccaaagtcctgccttcctttgtccttctccatcttctctgaatctatcccagatctcaagtgacctttctaaatgggaagatatatcctggaacttcagagatatttagaaatgctcaaaactgggaagttcttcttacagtctaactgaaatccctcctatgatagctgaaacccacttcttccttttctttctgtcccttgggggatattgacagttcccatccttcctcccgccaaaggttctccctttggatgctgaatactaacttcttgctgaagtcatatctacactgaaccccacgcatggtcttaggaggatttatcatgactctataaactcactcagtgcaggcaacaatctcatcagaccattagagacgggtcagacctgaataagccaagtttccagacttctctgtgacagggaagcctctcctttcctttccttctgagctcctaaaactggtaaaaccaggttcctgccttcaccagcctcaggagtgcccaggggcctgagagggcactagaagccaaatagcagaggaggccatggccctgggcgctggggggggctgattagccaggaaggagccacaggaagcccccacaggtgcgatccagttcccccaggagagaaatggctttgttgtgggcactcagccctaggcttccaagatgggatttcccattggcttcaaatgatttatgtctcacagtatctggggtggggccaagtgccagtgacccttgcaggtcctggggaagcaggctgttggggcttttagcttacctccaggtgattctgttgctttacctgtgaatacatggagagtcttgttcaactgacgccaggtagaaaaaggcatgggctctcccattcccacaagatcacagaacaggaggaaaaggattgaataaaaagagttgaataaaacatctctctttgtcgggggcaatttctgcttgcttgtgcttttataatgtctccattagaatgcaggagaaactcacctcctggtgccaaataaaggagaaaaagttgtcattggatgtcacctctgccgatcgataggggaggtggaccagctcactgggaaggtgtgatgggtatccgtggtgcctgaccctggtctcttccctttagcggagatgcccgggtatgagggcagcctggctaaggggagggagtcaagaatctctgaatatttgaaacagtctagtagttaagagacgcctgagcagaaaatagagcactttgcagaaaatctctttggactaaggcctgtcacccggacactggctaattaaacaaacaaaaaccataatatgtttattactttagggacctggcaaggagaataaagtccccctgatatctggctaaaatttcccctaaattcccctaaaatttcccctaaaatggaggattacattgatagcttcctggtatttttggtagaaatggactctggttactttaaacaaataaaaacaacagcaaataaatttaccagaggctctaggacagcttgcggaaccatgggaaatcacgcggggaccatggctgggcatctctgtggctccaggcggcatagattgaggggctgtttcttgaagtctttgtcaagactcacactcctgggggagcgatcaggagcctagcaggggagggtggaatctttgcttgcattggggtggagtcaatgtccaggggaaaaacaaggagttgctgcctaaagaaagaggagagaaggaaagcaaccaccagcagaatgtgcccattctgctttgtcccaggtggcttcaagccctgaaataagaaagcagtcgctgaggccaccatgatgccttctttcttctttctttgcttgaagtaggggaatgttccttacaaaaaaaaaaaacaccggaatatggtaaacctcctgcctctcctgacaacctgcagctgccttctggggccctcctctcctttccctgcctgtgcccggcccagctagccctgccacagaactgtttctgggcagaaatactccaagtatccctgtgagataagtgccgtggaaggaggtgcatggatgatgcacatgtactgctcgctcaccgcatgggacctatgactgttgtagcaaatgatcataaacctgacggcctcaaacgacagaaatttcaccagaagtccaaaatcaccaaggtgtctgcaggctgcactccctgcagtggccgtgggggatgagccattgttccttgcccccgccagcttctgacgcactccttggcctgtggtcacatcactctaattgctgtctccctggtcatatcaccttagctttctcatctgtttaatctcccttcacttccctcttattaggacccttgggattacatttaggagctacatggataatccaatattgtctccccatttcaagagcctttatctttttttgttttttgtttttttttttgacggagtcttgctttgttgcccaggctggagtgcagtggcgcatctctgctcactgcaagctccgcctcctgggttcatgccattctcctgcctcagcctcccctgtagctgggactactggctcccacgaccacacccggctaattttttgtattttttttttttagtagagatggggtttcaccatgttagccaggatggtcttgatctcctgacctcatgatccgcccacctcggtctccgaaagtgctgggatttcaggcatgagccaccgcacctggccttcaagagcctttatcttaatcatttctgcaaagtcattgccacataaagtaacattgatagcttccagagactagaacatagacatcttggggggccattactgagcctattacatactgtgtgacctagggcaagtcactttacctctctgagccgtaggtcttttatctgcaattgcctctcaattgcacagggaaggcttacatggggtccaaaaagcaagacttctggaagttgcaaagctccaaatataaacaagagtgatattaatagttgagtaccttcccctctcacctgtcctctctttctgtggatcacctgtgaactgggctgatctcacttctgtttgcttctgtggacctagaaatgatcactgcccccagtgaatatggtgaagaagctggtgatggcccagaagcggggagagacacgagccctttgcctgggtgtaaccatggtggtgtgtgccgtcatcacctactacatcctggtcacgactgtgctgcccctctaccagaaaaggtactgagctctcccggcctgcccaccccccaaccctctcctaagggtctggcatctgtaaggaaccctggccttctactcacccctctccttgaccctcattcaaggcagcagggtcaagacgatgctcattcttaggttctagggttcaagtgcagggaaggtaggatgaactgagccccactggtctgagattctaggacctggtggtaacagacacatgatctaggacgtggtggtaacagacacatgatgcccttctcagaagaaatagcaaagaatcagagcaaaggttccagtgcaagtttgatcccaggaggaatcagagaattgcagatgtttacagctcagctgcataattctctcccctctgaagcctccctgtcaggtgggcatccagcctcctgatgaatacctcaagagacggggagctccttgcctcactgaacatacatttcatgtttgaggttttctgatgtgtctgcattgagccagcatctgcttccctgaagttctgctcaggaatctcagagaatggtccatgcccttgctccatgacatatcaaccacttgagattttaaggaaaagctgtgaattcctaattcgtgttctatttggaacaaagacactcagttcccccagcctgtccttaggataagtctcagacctgtgctctgggcacgttccagcagctgacagcccccttctgactggcaatgggtctcccacaggatacttgggagttgaagcacaactgatttactaatatgttgatgaacctgttagcctctcccgggcctgctgcagcctcactcttcacaacgctgaagcgattccaggctggactcttaatctggtgaagcaccatctagagactgtccccaccatctttcccatcctggctcaactcaaaccccttctacatctgctccttttaggggaaagaacacagctctccaacccactcagacctagcttcaggtcctgcaaggtctcagcaaagtcacttgacctttctgagtttctcttctgcctctgcaaaatgaagacgatatggataagaaagtctcaggtttggctgctcgtcagaatcacatcagggagctttgaaaaaacacccagggcctgggccaaaccacccaagaagttctgattcacttgctctggggtgtagcttggacacgggaatctttttagaagctccccaggttgttgcaagagtagccaaggttgagaaccagtcatatagataatgtctaagaccccatccagcttctacaattcctccctgtgtccggggactgtggggtcatgtgcctttattgctggatgctgaagacaagatgaggatcccagtcctggatccctctagaggctcccaggggataatgggttcaaatgggtgttctgtgtgtcacccagttctgagatgtgtatgtgtgcatgtgtgtggtctcctcagcgtgtggacccaggaatccaagtgccacctgattgagaccaacatcagggaccaggaggagctgaagggcaagaaggtgccccagtacccatgcctgtgggtcaacgtgtcagctgccggcaggtgggctgtgctgtaccacacggaggacactcgggaccagaaccagcaggtactgaactggagggatggggacacatccctttatccctgtcaggtgtgtgagcctgttcctaactgtccctgtccccgaggctgagaaagatcaacccacttgaccaggtctcacagctggaatgagactgagccagccctagctcttctgtgttggagtcacacagacctgggtttgaatctgccgctaactggctgtgtaaacataggcaggccacttagcctctcacctcctcagtttccacccttgtaaagtggaatgctaatgctgcaccttgaagagctgttatcaagtcagagacgctgtatataaagtgccacgcttgatgctgagtggatagtgggcactcaaacaaaagcagtgattagtgttagtactttcattctacaacctcagtcaaatgagggaccaggcccagggccagatcctcaaagtggaatcccggtgactccccaggaaaccagggactcagggctggagtaacctccataaacaaacatttagatggtttttccatccttgcatcccaacatcccaccctccccctccaaaacacaaaactcaccaccatatcctttcctaaagcgatcagttggcccatattctgtctctcttccttccttctttctttccttcttttttccctttcttccctccttctttcttttcttttttttcccctccctccttccctccctctctccctcccttccttccttccttccttccttccttgtttccttctttcctcctctcatttatttattcaacagccattgagcacctcctgtgtcaagcctgtaggactcaagaggagagagctcatgcatgaacagtgcctagcagggaagaattggcaccggggagaagaacagaggaagttacaggggttagaggagggggatgttttccagctgacaatgatgggggtatcagaaaggctcttggtgagattgcaccattgcactccagcctggcaacaagagtgaaactccatctcaaaaaaaaaaaaaaaaaaaagaaaggctcttggattaggcttttaacatcaggcaggcgcaggatgcaaggcatagagaatgaggtgatataggaagcgggtatgcctataggacgaggcatggcggagggaagggctaggtggagacagggatcagagggctgactacagaaaatgacccatgatggggtgtatgcagctggaaaaggctgtcagggcagactaaggtctgttcccagaggcctttgatcaccacaatatggaattaaaatgtgagtgtgtatgtctcaagatatgtcaactttggctatgcattagaaccctgtaagagtcttaaaaaacaaaactagggtccaacactagacatatcaaggtggaatctctggtcagagatccattcatggagctcccaaggtgattctaaggttggaaattattgctgttggcaatgggaatctttagggcatgatcagagtttcagagttgggctgggaagatggagcctacaggtgtgtgggtccagttactagacagaggagccaaggccgcagcaagcactcacgaccaagatgtggcctgcagcaggggagatgctgacagtccggacttgatggctgatgggacgggaaggggcagggtgcctgggatggggcgtggaggctgggggatcttgagagtgctgaaggtcaatgagaagtgggtctgggcagtgcaggatggtcaggtgttctgtcatcgctagtatgactcggccccacccggtggagagaggtctcagggcccactggaggcagctcctacccatgacccctgcctctgcgttggcattcagtagcccttgatttatcccaatgcaagaaacaaattttcaataactggtaacattctccgggagtgatatgggccagagcaggctggttttcaggctgcctccctggtcctgagattgccagctcagaggagcatcccctgaatgaactgtcagcaggatgtgaaggaaggacatgctggagccactgctgtcctctcccctgccgcccaggcttgaccaggtgtggtgctgatagcaggctgcaggagctgggaggaagcagtggaaatgcccttcgtgtttttgccaagcagctgggttgtgggctagctgctccttccgcctatgtccatcataggggttcaagtggctggggctccaggctagctgggtgtcctctggaatcactgtgaagggccaagaagactctcatcccaccctccaactctgaaggtaggggccatagtctgccctcagcttttcctgtgagtcttagcctggagcaggtgagttctaaattccctcccattgtctgtcctggggaccttacactgcagggcttgggaaaaagctggttggtttcagatcattcagataactcaggcttagctggacccaggacaggagagaaaggatgcattcaggccccggcttctgggtttggccatgaagagtgaattcctgcccagtgtcttgccaaacaggcccagcataaaagatccagaggaaccctgagcaggcagaggatacactaggcccaggatggacagaagcctctacttcagagctcatccatagacctctttttaagaaggtaaagaaggagctgttgttgcaatttcatagataagtcaaaacatattattattaataatagcatcttccacttttttgagttcttatcgtgtgctgggcttctgtgctcagtgctttacatgcatcatctcatttaatccccatgacagttctcctaggcaggtagcctcacaaacccattttacaaggcccagtgaggttgtggcagttgccaaggtcacacagctcagaactcaggcctgtctgactccatagccacactgctatttaaggagctaggttagccaaggtcacagtcagaggcattggagagactcaggccaggccccctcaccgtcagctcaggatgctggattatatgctactgaggacctggcagtgtccaacagctctgaatgccagattcctgaggagccagcgtctccccagcctcagctactccctggctggctggggccctagatctgagtgcagcatctgcatttcccaggctgtgagaactacagtgcaaccctcctctgtgttgctggagtgaatgccctcagggcaggcagcttccagggtggcacctcatataaatccagggagtggccgaggcctgcaaggaatctggctcaacacctgccatttgggtctcagttttacacattttgatcttgcacatgatttcactagggcaaaattaagtgcatgaaggaatcacacattcctgggtctcgccctcagtgatgcagagtgggtagggacctgggctatgggggccctgtaggtattctgctgcagatgggggcaccacacttgcagctcagaacagagataaaaccagataaaactccgctttatgactgctttgcatcactttccagctggcctcatctgaacagggcagaaagttcctaataacaataatcaacgtcagaattaaatgtgtgtcatgctctgctggcacaaaactcttttcaatgcattctttctttcctttggatcccagtgtcaaatacccgcttgccaacatagtttgtttgctgtacacaggttgaaactgcaaaggttttcaattttaaatttagctaatattttactttttttttttttttgaaatgggatctcgctttgttgccttacctggagtgtagttgcgagatcatagctcactgcagcctccaactcctgggctcaggtgatcctcccacctcagtctcctgtgtagctgggactacaggtacaccaccatgcccacctggataatttttaactttttttgtagagataaagtcttgctatgttgcctaggctagtctcgaactcctgggctcaagggatccttccccttcggcttcccaaagtgttaggattacaggtgtgatctggtttctaacttctcttaaagtgttggaggtctggctattatagatcttctggatggcctgacatccattgcctggagggagtggtgactgcctgtctggaggcagctggctctctccctattgacaggccctgccacaccctggcaattcttcctggcaccaaggcaagagtcagtgggcacctgtcatctcattgctttgcctgcttcaccctctgacaataccttcatgagccctgtaggcaattgagcacatgatctcgatttcaaatacacagcccacttggcctgtgtccctccctggtttccttagatagctctgtgtgaagtccttctttcataatatcctttgaaaccgatattcacccatttaagtgatgaagcttcagggctcagaaagagtgagaaatttgccaaaaattctacagccaatccaagcagagccaggactccaaggtaggacctgcgcccaggtgtgtagcctgtaccccgagcagctccagcaccgccatccacacacaagacacaaatgagagcgtgctctccagacctgtacagcgcatggcctgccaagctttagaccaaagccccgactccaatccaggggcccgactacaaagctggtatttttctttactccatatcaagcccttggctaagaaatggggatttccaagcccacagctgctcttgtttctccccacagtgctcctacatcccaggcagcgtggacaattaccagacggcccgggccgacgtggagaaggtcagagccaaattccaagagcagcaggtcttctactgcttctccgcacctcgggggaacgaaaccagcgtcctattccagcgcctctacgggccccaggccctcctcttctccctcttctggcccaccttcctgctgaccggtggcctcctcattatcgccatggtgaagagcaaccagtacctgtccatcctggcggcccagaagtagagccatccatccatgccataccacttgtcagggcacaggggactggctgggcccccagggctgctccccacttgcagcacaatgccttctccacctgccctcccactcttccagtccaatccacgctgtcttctgttgcaggactaacctttgagaaatccttttgtgaagtcattgcctgctcaagaatgtacagtggctccccaatgccttggaggccataaggccagccagttctagctctctattacctgtccccactcaactgactcatacctgtttccggctgcatcactatgtgccccacagagaacgatgatcgtcacctctgtgcctgagttctccctgttgtctcaaagcggtacccatcctcccccagaagctgtccccagcgagcctcccttctttgtttgaattctctaataagagcaacagcagctcccatttctagaacacatttacagtattactattttctaggatataaagtgccatatatatttttaattccaatattaataaatgtatgccaaacaacaatcagctgcaaggaaacacatgagaactcatcaaaattttagcggtgggatggtggttaatttctgttttcttccttatcccctttttatttttgctgcttttctaaatttttgattataggaagggtgtgtttcgtttgcttttaatcagaaaagccatggtagatgccattttggaaaagttgaaagagtgtgtccccctcacagaaaaagatggaagtgggtctggggacggagttgggttccagtcagagacaggccattcagaacacacaatcttaaaaacccctctgggccgggcgcggtggctcactcctgtaatcccagcactttgggaggccgaggctggtggatcacgaggtcaggagatcaagaccatcctggctaacatggtgaaaccccgtctctactaaaaatacaaaaaattagccaggcgtggtggtgggcacctgtggtcccagctactcaggaggctgaggcaggagaatggcgtgaacccggggttcggagcttgcagtgagccgagattgtgccactgcactccagcctggtgatagaacaagactccgtctcaaaaaaaaaacaaaaaacaaaaaatgaaaaacaaccctctggaggaaaggtcatgatatagaggaggatttgttatttaaattgagggtatggactctggcactgagcctgctggggaagcctatctcagatttgaaaagggcaaaatgggaagaagccatcacctttaccattcccactccaggaagttttcctagaacgatgactgtccaagtgtggtccctgggccagcagcatcaggatcctgtggcagcttgtgagaaatgcacactctcaggcccctgtcccagccccaccacgccagaagccctgcacggggtgggggtagcaatgttctgtgttctaacaatgcgtaggggattctgtggcacacctcgagccagagaactaccggtgtaggaagtgagcgtcctgtcgcgaggattttcagagcaggtgagtgaccattcggcagggccagtcctgagctgggtgtgaagttaggctggtgtctgaagtttcttccagtgttgtgagtccaagatgcagatcttgggtttgaatcctgtctctactctgcccgatttcatctctttgattcttagttttttcatctataaaagaaggactctttctggatagttgggagggctgaaggaatgtttgacacatcataggtgtttaaaatggcaactatagttttttttgtttgttttgtgtgtgtgtttttttcttaactttcattttaagttgcagggtacacgttcaggtttgttacataggtacacttgtgtcaagggagtttgttgtgcagattatttcatcacccaggtattaagtctagtacccattattaaagaaaatgtggtacgtatacgtcatggaatattatgcagccataaaaaggaaggagatcatgtcctttgcagggacatggatggagctggaggccaaatattatccttagcaaactaacacagggacacaaaactaaatactgtatattctcacttataagtgggagctaaatgatgaaaacacatggacacaaagaggggaacaacacacactgaggcctattggagggcgggaggtaggaggagggagaggatcagggaaaaagagctattgttagtaacaagaaaaagtcggccgggcgtggtggctcacacctgtaatcccagcactttgggaggccgaggtgggcagatcacgaggtcaggagatcgagaccatcctggctaacacggtgaaaccctgtctctactaaaaaatagaaaaaatcatagccgggcgtggtggtagccgcctgtagtcccagctgctcaggaggctgaggcagaagaatggcgtgaacccgggaggcggagcttgcagtgagccgagatcgcgccacggcactccagcctgggtaacagagcaagactctgtctcaaaaaaaaaaaaaaaa

SEQ ID NO: 142 - DNA, 18347 bp, Human
ctggctagccataggcagaaaactgaaaccagaccccttccttataccttatacaaaaattaactcaagatggattaaagacttaaaataagacctaaaaccataaaaaccctagaagaaaacctaggcaataccattcaggacataggcatgggcaaagtcttcatgtttaaaacaccaaaagcaacggcagcaaaagccaaaattgacaaatgggatctaattaaactaaagagcttctatgcagcaaacgaagctatcagagtgaataggcaacctaaagaatgggagaaatttttacaatctatccatttgacgaagggctaatatccagaatctacaaggaacttaaacaaatttacaagaaaaaaacaaccccatcaaaaagtggttgaaggatatgaacagacatttctcaaaagaagacagttatgccaccaacaaacatatgaaagaaaagctcatcatcactggtcattagagaaatgcaaatcaaaaccacaatgagataccatctcactccagttagaatggcgatcattaaaaagtcaggaaataacagatgctggagaggatgtggagaaataggaacgctttttcactgttggtgggagtgtaaattagttcaaccattgtggaagacagtgtggcaattcctcaaggatctagaaccagaaataccatttgacccagcaatcccattactgggtatataccccaaggattgtaaatcattccactgtagggaacacatgcacacatatgtttattgcagcactattcacaatagcaaagacttggaaccaacccaaatgcccatcaataatagactggataaagaaaatgtggcacatatacaccatggaatactatgcagccatgaaaaaggatgagttcatgtccttcacagggacatggataaagctggaaagcatcattctcagcaaactaacacaggaagagaaaaccaaacaccgcatgttctcattcataagtgggagttgaacaatgagaacacatggacacagggaagggaacgtcacacaccagggcctgccaggggctaggggacaatgggagggatagcactaggagaaatacctaatgtagatgatgggtggattggtgcagcaaaccaccatggcgcatgtatactatgcagcaaacctgcacattccgcacatgtatcccacgagcaacagatgctcatgatggttgtaaaggatcaactgtattttaaaacataatttaatatatacttttaataaacacattcatattgttcaaactataacccatagatttttttgtttccttttttttaacttttattttaagtttaggggtacaagtgcaggtttgttacataggtaaacctgtgtcctggagatttgttgtacagattgtttcatcgtccaggtattaagcctagatttcttagaaggaaaaagacaccaaaaatatgttcttaaaggtcaagggctgggttttgtatgatagctagaccattatctgtaggatttgagaccctggtcaaagaccataataaaatattaatctttgctgaacacattcacttatctaaccatctagtcaaaatagcttatgcgctgcatttttaaagaataacaggtggccttttgtcattttatgcctctctatctgagccaaactatataatcatttgcattatacctttggctcaaaaacgtttatatgtttaggctatcaaggattatttttaatggttcctaaatcattttaatcctcagaactactttggccaatatttgtctttgttaaaagttaaaggtgagcactcagtattatgtgaaaatgaatgcaatatttaatttttagttttgtcctgttaacattagatgatgcccagatagtaagtctttttggtaatgtaatcagtggatgaggaatctgaccattgttgaaggttttgtatataagaagtcaatacaacattgaccaaaatactaaccagccagagaaacagaatcctaactatttctgaggaaactgtaagtagaacttctgctgaacaaaattgttatttgaattattagattttttctttatcccaagtgatgcatttttaaaggcttagatatttgttgcatattcacctgcataaatgtatctgtttaaattatggcttattcctctaggatttgatttattttattcttttttttgtatggacatgagactcttaattatggaatgacaaatttgtttattattgcaattagtgcctaatgtgaaagtctcataatttcttaactattgaattacaaatttgtttattaagttcctaatgtgaaagtctagtctctgtgactcttctttttgagaaggaatagatcagtaatctagtgacatataattggctgtattaatatgctatgtttaatatttaatatcatccaaatcaactgctgttgaattgatcattattaatacgattgtgaaaccttataggctattaaaacatttatttaaattataaacttttcaaaacagaagtctagaccaaattatataaatctccctggggatgtccctataaaagctggcccagggtcatactgaaggagtattacagtggggaagaacatagcctttggaaatagactagtttaaaatatgggctccactactttctatatatttggttgggcgagtcctcttttagccttaccttgcttatttgtaaaatggataatataatgctacctacttcatagagttgctatgagaattaaatgagataatagtcataataactatatttaactaacgtttatgagatgcccagcatgttaagaactttacttttgttatcataatgaattcccctaacatagagaaatgtactattacaggccctgttttatagatgagaacactgtcttagcaagatagttcatttcacgtataccatgttgaacacacagtacagcacacagtgagtcctctgtatgtgttaattactggtattttcctaggacttggcaacaagcattttgagaaatttattctgcccttgaacatctttgagcccattgagatgttctccaacgcaaacagtaggttaagtgtcctcactttacaatggcaaatcacttaatggaggtcatgtgggttcctgaaatgtttgatgaaagcctctggtttgaatgttacaacactactggttagtctttatatattagtttatctcttcctaaaatatcacggtaaaaacaaggcttagttaaaaactgatttttttttttttttttttttttttgagacggagtctcacactgtctcctgggctggagtgcaatggtgcgatctccgctcactgcaacctccgcctcctcggttcaaggactcttgcgtctcagcctcccaagtagctgaaattacaggcgcgcacacccggctaatttttttgtatttttagtagagacgtggtttcaccgtgttagccaggatggcctcgatctcctgacctcctgatccgcccgcctcggcctcccaaagtgctgggtttgcaggcatgagctaccgcgctctgccaaaaactgatttttaagagatacccttaaatctaatcctatactaaaccagtgggcaaactattagaccagagggtcagatttaggccttgagagttctggtctggttttactgtaaatcaggaactatgctatgtgctctgcatgaattactataaacgggttttcttgaaatattatcagcaactgggaagtcaccacttttcaaagaattccacttgaatccaaagatccaaatattacacattcttcactgtattcaagtcaaatatttctacatatgatctcgaagtattgctcctaacatacaatttctcaataaatatttattgaataatttatttctgacacactaaaaatgaagtgatttaaaactgtcctctacatggcttcccttcaaatatttgaggacaatatcacttctctattgaagctttttcaccagcttaatatctgaagattctcaaacttataatcagtgactacaacatagaaggaagttcaggtgttgtgggcctaataccaaatattgtctataaggctaggtgtggtggcttatgtctataatcccagtgctttgggaagcccaggcgggaagataccttgaggccaggagttcgagaccagtctgagtaatgtagaaacaccctatctctaaaaaaaagaaaaaaaattagccagatgaacacctgtagtcccagctaccctggaagcagaggtgggaaaatcacataataacctcaaatcagtaaatgtttatggaataactattataaacaacatttaaaatcaccatgattactttgaacacacgttatacagagattggatatagagaagtcaaaggcccacacatccctcacccaaatctgggctctcaaaataagcaggcaaaagtcttaaacacaaagcataataaggacacattgttatgccaattagaggctttttttttttgccaattaagattaattcagtatggcttgaaaccaagtggaaaatgttcttaaacaaaaggaatcaaacagtgaaaacaagttaagcattaaaagcttaaacatgttaagcattaaaacatgttaagcattaagttacctgtgctgacatccatatgtctcattttattgcccaatggaatataatcaaacccaagcattcctctacttagcacaaaggtaaaattggcataaaatataagcattatgaaagtataatggattaaccatggcacgggttattcttttctttcaggcaggtccaaaatgtggctgcttttaacaatggcaagtttgatatctgtactggggactacacatggtttgtttggaaaattacatcctggaagccctgaagtgactatgaacattgtaagttactctggggaaaaactctataaaactaaaagatgctattatttaaaatcataatgagttaaagattttatatgaccaattaaaaataaacagtaatattcatttattagatatatctaaaaatcaactaaaatttaaacttttgggtttgcttcctcagagtcagatgattacttattggggatacccaaatgaagaatatgaagttgtgactgaagatggttatattcttgaagtcaatagaattccttatgggaagaaaaattcagggaatacaggtatatataagcttcttttcttccttcctttctctcttttttcctttccttctttcttcttccttccctctctcctttcttcctccaacttttccttcttttgttcttccctttttcctccttttatttcttgctaaaaatgtaatgtcttgctcattctggaaatgcaaaaataagctatattttcagtcttcaaggagatcatcatcaagccaatgaaatagataagtaaatgagtgattataataatatgtgataagctcaagctacaactgtacataggatattaaactgaaggttttaataaaattacctaactcagctaagggagtcaaggaaagctcactctcagaaacagtaactggatgaagatctaaggatcaggaagagttagccagggtgtgtgttgcagaggggaagatggggaaccaattcaaggctcatttcctaaacacatacaggctaattttcactagtactattaaaaatttaccttttactcattgtagaaatgttatgaagtacaaaaagaaaaaaaaaagattactcgtaattttaccactcacagtttaccaaatttaacattgtgctgaattacctgagaatataattttttcaatagttttattgagatgtaactggcatataataagctgctcatatttaaggtgtgcagtttcataagttttggcatctgagaaatcaactccctgagaaatcatcaccacaattacgataagatattcaaaaataatcaactcaatcaggcaaatgtatttagtgctagtcatatggaagactgtttctagcctcacatttatcctagaataaggaatacatttataaagtttataaacattttcttccttaggccagagacctgttgtgtttttgcagcatggtttgcttgcatcagccacaaactggatttccaacctgccgaacaacagccttgccttcattctggcagatgctggttatgatgtgtggctgggcaacagcagaggaaacacctgggccagaagaaacttgtactattcaccagattcagttgaattctgggctttcaggtaaacaaaagggacaattaaaaataaacactgggctttaaaagcataggcatttgccccttctaatccagtcccattttaacaaattacactccaagtaggaggataaacaagtcattttcattctaatccattcttggattcttccatgtacctcattcctagggtagcttttccttcaaacttttgtgatctcaggagtctccattagggatttccagaaagtgattttccaaatggaatgaacaatatggctgaagcaaggaaactcacagcccctggaaaattccaaaggaatgtccatatggattcaagagagaagtaaaaacccatttaggggtaggagaacagcaatctgaatcatcatcaataggaggggtggggagagtgaaattcagatatcatggagagattatcatgggcttctctcactggtcttcttgtgccttattcctggaaattactgatggaggtagagaacagaacaaaacctggctgctgatgctaaggcatgaaagtgttccaagagttctaggagctgaaaggaaacctgtgtgtcccaggtgtagcgggaaaagggaaaatgacatgagtgaagactgaggtgcagatggggcagtagtggtgatagtgagagccttgggcctcattctgagtgcactgagaagttttaaaaagaggagtggcataatacagttttcattttcaaaatatcatgttggctgatttgtgaaaaataaaatagagaaagataggatttatattaaatgacatggaacacagcatacacattattattaaatctgacatttcatttcagggatagaaataattcccacctacagatactatcttgtttggattcaattgtggctgcaatgctgcgcttcagaaatgatgtcagttgtttataagaagctgccccaaagggcacctgacatccactgatggtctataagcatcaatgtttagagaatccagttttctgtatcccaaagggatcattagctataaatgcttgaattttagaaacaatagcaaggaaatgtattcactttcattttgtctttttcctttcagctttgatgaaatggctaaatatgaccttccagccacaatcgacttcattgtaaagaaagctggacagaagcagctacactatgttggccattcccagggcaccaccattggtaagtaatggcagtcaaggccaagtggtttacttctcataaacactttcccagtggttatggtaggcatgttagcaaccacactaattgctttccattcatttaatgcctccaacaacacaatgacatagggacaattataattcctattatatgggaaaacaaaacaaggggatacagttcgtgcaaggttacatggattattaccaatagggtagctcaggcagtctgactcccaagcacatactctgaagcattataccatacagccactgacctaagtttattctattcatttgaccatatttatggggcaggctcctatgatgtatcaaaagaatacagaaataaataaaatagatgaaaacttctgcctttgtaccatttatactctagagataggaggcagagaaaataaaaaaggttaaaaagtaaaatgtaatatattttagataatgctaaagctatggagagaaaataacccagggaattacattagagagcaccagaggggttcacagaaattgtagattggtaacacaagcactctttgggtaaagtcatgatgaaggtcagagagtgagtcatgtgcctacctagtaggcatcagatgttccaggaagacagaatagcaagtgagaagaatctgaagctggagcacacctagtttgttcaaggaacagcagtgaggctatgccttgtgtggatgaatcaaattgagaaagagacagagagagtgagagatgagatcacagatgttggggaggaaagactgttcggggctctttggctgttgtagggattttagctttcactctgataaaaaaagaaaactgcagaataattttgaatcgaagagttacatgattcataacaggatcccttttgttgccaggggcaaagagccaggagcagagaaccaattagaggactcttatagtacccatgcaggagatggtggtgacctggatgaagggtgttcttggaaaaaccattcttccacaaatagaaccagactacatattatatagttgtctatatctgaaagggttttttttaggccattcttgagtatcatcgatatgtcattattgacagtgggagggccttgcctatgtagctatactgcagcgttaaacttgataactacttgatcacatcctcatctgccagtatactactgcttacaaaattaattcattactgaatgtatttactatgtatagatatttgaattctcttgggtccttatttatcaagcatttactatgtgccaagaatcatgataaattctttctttacatgatttacttcctttagttcctaacaatctaatgaagcactcaccactatccttgtatttcagagagggaaacagtggttcttagagattaggtggcttgtccaaggtcacaaagctaataaaccacagagccaggattcaaattgagtttggtcatatttaaatttctactcttaacctttccacttatatactctactcatattaagtgttaattaattatctcattgtaatgagatacatttaaattcataaaaaatataaattcataaagaaattcataaaaaaattttttgtaaccatatgagtatcctaaatttggtctattttctaaggtcagataaaggtttatgataacttttaaaacgttccagcctcatgtccccatagaaaaatctatgaaaataaaacaaatataccaaaatctaatcactgagccagcagagatgccaatttctcaggctgtctcaaacaccatccttagtaagtccaaaataatgtcacacttataaaaacaaacaaaacaacaacaacaacacacacacacacctttttcaccagttccttgttctttttcaggttttattgccttttccaccaatcccagcctggctaaaagaatcaaaaccttctatgctctagctcctgttgccactgtgaagtatacaaaaagccttataaacaaacttagatttgttcctcaatccctcttcaaggtatgcaattctctttaattaagtgaatctaagacccttgattgcccatggattttaaagttatagaaagagaacagagttataaaaagagaacaatcatttttatatccaaaaatggaactgttcgcatctgtattatttcttccatagcactgaccatgtttgaatctccttacagcctgcgagatccccctttctttctttgttcttcatgtgagtcagcaatgcctgggagtagttttgctttttcacagatggtttgtttattaagcactctacacagttgtgtcaaggctgtgattccactccaggaggagggaagatgaaataaaaacaaaacaaaatagtcaaatgagaagactaacccacttgggccagagagactggaaagaggagggaaaggaaggggagggaaagggagaaaaggaggaaataaatcagtgattgagtgaggcaaacaccttgagatctctcatggctttcccttttggctttcctaagagctccttcatctttaaatgggcgatctcataagtcagtggtgtggatttcaataaattataaatattaagtgccttatgcagtaggcacacatgttatggaattaatcgttttgtttgacaatgcttaataccctaattctctcacccagtaaaaccaacacacacacacacacacacacacacacacacacacacacacacctctctctctctctctctctctttcctttaggggaacggtttagcctcaggttataaaatataaggattccatttccttctatggttttgtactattcatctcttttcattctgtattaatatgtatgtctaaagcctaagagaacttacctataggcaaactacatttggaaaacttttattaaaatctaaaattttttgatggcccagaaatatttattggctacattgattgagaacttatttcctactcatactcagattttctgataggcaatgcagacgtagattaaaatttagaaaagcaatagacctcaagttagaggcttgggtaaggattctaggtataatcgagctctaattagcccaagaccctaactcatgttaacctcatgtttcctcgtgtataaaatagagatgacaaaatatctgccttcctcaaagagagttggggcaaactctttcaattcttatactgagcctcattgcctctgtaaaggctttgctgaaaatatggccaagtcaccatttctcctcccaaacttttcacaatttattgctgaaatctcacatcttggcacttcattatgacagtctgtcatgtgtttttaagattttatcccacaactcctatcaccccaactagattgtaactctttgtgtcttatacttcctctcagcagccagtacagttctcagtgccacaatagatacctagtattgatatctgtgctgcccatttcacaactttattagggaattaactaaatgaaagtattggaaattcctaaaacaacatgtaagaataagaatatatcatcatcctcatcacacatgtataagtagattagataaactagtgagtcttttctgcagcttgattgctacaaccctctaatagtgcctttatttttcagtttatatttggtgacaaaatattctacccacacaacttctttgatcaatttcttgctactgaagtgtgctcccgtgagatgctgaatctcctttgcagcaatgccttatttataatttgtggatttgacagtaagaactttaacacggttagtatgcatttcaatttctatattttgagcaacatctttgattacttgtttcattgccacttagaagtggtactttatgagaactaggagtaggttcagaactgcgatatcctgataaacatgagagaaatcacaaatcattgctcccaatttaatcacttccagcatccttccatcaccccagttgcccctaaaccaaataaacaacatgaagaaaaaacacaattcactactcacttatgaccacctaaatactaggtgttacatttaaattctgtaagagaaaggactgaaccatatattttagcaggctcctttgtgagaaaaatgtctagatattgaataaatgttttcaataaatatttctaatgctgacagtcattttgataaatcttacagactatatttctgagcaactatttatgtaagactttgcccatattctttttttgagatagagtctcgctgtcacccaggctggagtgcagtggcgcgatctcggctcatagcaagctccgcctcttgggttcacgccattctcctgcctcagcctcccgagtagctggaactacaggcgcccgccaccacgcccggctaattttttgtatttttagtacagtcggggtttcatcgcgttagccaggatggtctcaatttcctgacctcatgatccacacgcctcagcttcccaaagtgctgggattacaggcgtgagccaccacgcccggctgactttgcccatattctttatctaccttttcattcactttgtattgagttggagtttcaaaacatatggacaaaatacactatcatagttaagagtatggatttagatcagtttaaattcaaaccctacatttggaactgacttaaacgtctctgtcttgatttcctcatccacaaaatgggttattgggaagatcaaatgagctagtatgtttaaagcatatagaacattgtacaaagcatatagcacatagtaatagcatataaggttttctactactattcatagacaactatctcccctccaaattgtcactttagttatatacccttgaacacctaagaaaattacatctattgataagaaggtataattctatgaagtgttgtggttacttgtcattccatatgtggagtttaacagagagtagcctgtcctcatcacacgaacaaaaggcagaacaaattactgtattccattagtgagagtcttataagaaaaataatagtaaaataagacaaaggaaacaaaggaaattagagatttcatcttctgcgtaataatttgcagaagaccatcttcagtctccaatgaagatggccaatttgtttcactatggccacagtccgctatattaatggcattaagagtcactatgaagtggccttctgcaactggagaaaggaacttcagtttgttgcttggggttctgcaaagcaagaggcctgtgtgtgaatatttaacctacagcactctagcactgggtagagaagcataaaagctgagaatttagactcagagacccaaattaaagtatctgtctccattctgtgtggatcttggacatttctttaaacttctttgtgccccaattttcatgttgataaaatggaactaataagttctcctcattaggcagctacaaattaaatgggttaacacatgcaattgcactttgcaaattctgaagtgacatacaaatgtgttgttcatatccttccagtaaatgctacctttaaacacttgacctgaatcagaaaacataaatctttactgtttttaagaaactgagtatgtgtcttagtatgtatataatatgtgtgtctgttgatttctagagtcgcttggatgtgtatctatcacataatccagcaggaacttctgttcaaaacatgttccattggacccaggtattcttttccaaatgctgttaaaatgtattttgtgagtctcaacccttttcactttacctaaacacattcttaaaatatcctgctgagtacacctggaaggtaatttttctggcactgactaccatacaaaaataactatgaatttatttcaaagaagaaaatgctttttaatttattttattattattatactttaagttttaaggtacatgtgtacaacgtgcaggtttgttacatatgtatacatgtgccatgttggtgtgctgcacccactaactcgtcatttagcattaggtatatctcctaatgctatccctccccccagcaaatgctttttatgacttggtatgcaagaaaaattattttgagtgaagctgcatttaaacttacataaataccttgtcctagattattaataatcttttggaatgagaaaaatgtttcttaataattgtttaaattgaaaataaactgcttggaaatgtttgaattttatttttcacaatataataatttttatttgtttgcttttaatttctctatgttaggctgttaagtctgggaaattccaagcttatgactggggaagcccagttcagaataggatgcactatgatcaggtaagcttcttaaagatggaattattcacattttgaacaacaatactaactatttaaatgttaaagaagaaattatgttaactgcgcatctgttttccaaaggaatgttgatgttctgtctctcattctcccacatgactatgcattcctgctctggtggctacgctcatttaaagaggtttacaaagctgccctcaaagtactacacccctgtgtgtgagagacttcccaggacttaccactacccattgccattacacagacctgtcccatatcccagatccccagcacactgtcctctcctttctgaagtactaatacctgatataataagctaataattctaactgttcatggaatttctggtcttcttaaacaataccctttcctttgttgacagccagaggagtgatttcaatgggatatattcccaaatagaagaaaaagatgccgtgcttgcaggtcaaggctggaaatattttacaataggcagaggcctttggcataggcagacatattaagcagtcctcacacttgctgtaataagaatccagactttggagcttatcttatctgcagtcaatatgagtttgggcagtcatttcttcatctctccacccaggctcaggaagttgttgacaggatttagtgctataatatctataagctcttagctcagggtaagctctcgggttatcactgactatttttgaacaagggaagcaccctatagtattttgtaaccttctcttcttccttttcaccacatccaatttttccatccaagtagtagctgaacaactctactaattttcatttgtttccatgacttaaaatttagaaggaatttatatgttttaacaacaatgtcttatgtgtagagaaggtgccccccaaccttgattttgcatttttgatatctttaaagttttcagaatagcatgagatcaaacttttgttgaaaacattttttcctccaccatcactttctcaaatctccaaaacacacaggcttgctttgagtctctctttctactggactctaatactcataatcagaggacttcatcttagaggaacaagaaacccagtccccaagtccacccttcttccaactaaaccaataatataccaggttggtctttaactaactgaagcaatgacactaatttaagagccagggccagcatctagaaaactctttgaataataggatgtaagtaaaataagctgggtttataattatgaatattctccacacactcccttttctctaatatttaggaaatataatagaaatcatgaaaatattagggaaaattacatatcataaaatattttgctatggcaagttggctattacacaaaatgtgagaatacagaaacttttagtatattggattactattcttgaaactatgatctaaaaaaatctaacaaaattctctctgggcagcaagaaaatttgagataattctcttattcctttttctgctttgtaaacctctttaaaatctatgtgtgaattgtgattttcgagaaacaggacatggggatgataataccctttctcagaatttgaagcaacattttgtaaatactcaggtaagtattcaacaattacagctccataactgaaacaactgacctatcccctgaccataactgggaagtcaatacaaagccaaaataaatgactcaggacattttgagatcatattttagagtgtttgggtagaaacaacctattaacaattagaatctaatcaaatccatttcccttagcttgagttgcaatctatgttcttaatttgtaagacttactgtccaaagccttgctattcagagcatggtttggagccaatggcatcagcatcacctatgaatgcagaatctcaggctgttccccagatctactgaaacagaatttttacttcaacaagatcttcaggtaattcacaggcccattagaatttgacaagcacttatctaaaacatattgcattcactttgctctgtggataaaggtggttttctctgtgcaatcattgctagaattcacttataaaaccgccagttaatgttatacactctacttgaatagtaagtactgggtttaaagtgtggttacctaaactctggttctttctcttgtgttttctagtcccagcctccctactacaatgtgacagccatgaatgtaccaattgcagtgtggaacggtggcaaggacctgttggctgacccccaagatgttggccttttgcttccaaaactccccaatcttatttaccacaaggagattcctttttacaatcacttggactttatctgggcaatggatgcccctcaagaagtttacaatgacattgtttctatgatatcagaagataaaaagtagttctggatttaaagaattatccgtttgtttttccaaaatactttattctctcatacatagtattttcataatgtttgacatgcagtgcttctttctgtaattttgactttagaaatatattggcatcaacaaacttccatttgtcattttgaatttttttaatttaaagaaatttgatttttcacctggaaatttatctagaaatacttgagagaatatatttctggggaggtgaaacttctcattttcccattcagtttctcttctgaactcacttatatatgagctgtgagccataagtgtttctaaaggacagtgttggcttcatattcgctctgcttatgtacacttgatactgagtatattgctttctattgttgatgaagctaagtctttccatctgtgtagtggggcctatcacttgctattttgcatatttaaccccatggaaaggccaattgggatataaactgaatcaactcactttcacttcccagggagtggagagcaagggtagtttgggaagcagcagatgaagtcaaccctgagtcaggaatttgggaagaaaagggtatgctctattattattattattattattattattattattattgttctgccctcatgtttttgggtcttgaccaccaaataggcaccaactaaccaaactatttttgaaatctctgccacagtgctggaaaccacaggatccagaaacatccccattgatatatcaattaggatgtacaactgccatcagtaacaacaaaaaaaaaggctcacccaaactttcaaaatttctaaacacacacagccttaccttggaaattttattaaccccacaaatttgtgacctcatattttatgcaattaagttattcagatcacacctattatactatgttacggtttgatgtataaaatataaatgagataaggaatatcttgtacccagcatagtgtataaaacatagtgagtattcacaaaaacctgttaacaatgtttattatattgtcacatccctcaacctttgttaggaagccccaaacttaatttgttttaagcaagaaattgctaaaagaagataacttgggagactttatttcaatatttcagtgaactttgttgttagactttactaaactgacatgaacatgtcggtgactagttacaaatgttcatggtggtggaagcagttgaggactcagatgttttatcaactctacttcctcgagaaaagaacaatcattagattcttgcagtctcctatgctattccagctaactgcctttcttttagtcggtactcagcagatacaggaagttttggtttggattttgaacacaattaaatactatcttattgctcctacagcagctttgctatctcccatttgttaatttgaactgtcaatttatcagctaattttcaagagtttatttctatctgcctgctgtaatcacaattttcaagtgtttatttctatctgcctgctgtaatcactccttgggcaacctcctgccatgtcaaactcaatcatttcaaactcaaattcatcatccccacatctctgagccaaataagtgtcaagttaatgaagttctcccagtaaccagggagtgagactctggaatcaactttgaataccgcctctcctctagttatcctttccctttgtaaaatagaaactgttaaacatagataattttagacagaacagtttaataatcccctttgtatgcattactcggtttcaactattatcaatacatagccttctttcataatctggttttatctgtatctctagccacttctctcatcttaatttgaagcaaatctcaagcatcacatatttcatccatgaggatttcaggatgaattactaaaagataaagcctctgttttaacataataatactgttcttacatctaaaattttaaaaatatctagccagtgctcagatttccaattatttcattaataatgtttatttatgaaatgttttatactttgtttagattgaaattcaaataaggcctttatcttttattacttgatgttgtctcatgtttctttagatatacaggtccatttgcccttgccctttttttttttt

SEQ ID NO: 143 - DNA, 27820 bp, Human
gagtgcagtggcgcgatcacagcttactacaagctccgcttcctgggttcacgccactctcctgcctcagcctcctgagtaactgggaatacaggtgcttgtcaccgcacccggctaatttttttgtgtctttagtagagacggggtttcaccgtgttagccaggctggtcttgatctcctgaccttgtgatccacccgcctcagcctcccaaagtgctgggatcacaggcgtgagataaaactatacttaggttttcttttttttttttttttgagatggagtcttgctctgttgcccaggctggagtgcagtggcgggatctcggttgactgcaagctccgcctcccaggttcatgccattctcctgcctcagcctcccgagtagctgggactataggtacccaccaccacacccggctaattttttttttgcatttttagtagagacggggtttcaccatgttagccaggatggtctcgatctcctgaccttgtgatccacgcacccaggcctcccaaagtgctgggattacaggcgtgagccaccgcgcctggcctgtacttacattttcaacttaagatgtatgcagtttggtgtatctaaattacacacccatttaaaacatggcaggatggcacctggttattcacctaggttcttctgtagcagtgaagaaaagaaaatacctccccttcttatctccaggtcaaggtacagtctgtgcagctcagaaacacttttaaaacaagctatattatttctaaacaaagttgtatttgaacagtgttcatgttcattttattcttttttttttttgagacagaatctcgctttgtcacctaggctggagtgcagtgacgcaatctcagctcactgcaaactctacctccccagttcacgccattctcctgcctcagcctcccaagaagctgggactacaggggcccaccaccacacccggctaattttttgtatttttagtagagatggggtttcaccgtgttaaccaggttggtctcgatctcctgacctcatcatctgcccgcctcagcctcccaaagtgctgggattacaggcgtgagccaccgcgcctggcctcattttattctttggagcttcgtctgtgaggttgccttcatttttgtcctctgtctagactctctaatagggaaggtagccctccacctaccccacccccaaagtaagtaaggtgtctgtcttcaaaaacagtcagttccactgagcaacaagtctcctgacttcctaggcccgcacaatctgtcaagagcaacaggacgacacgatgggtttgggggatcatgtgtccaaagggattttgttccagagatgctatgcgcggcatgatgtttccctgttaccactttgggaacacaatctcttggcaactaaacctgtaaactcagattaacagagctctttcccttcccaaagttggttttcctttccttgaatcttacttaataaacattgctgctcccagggttgagttggttttatgtgtttacgataagttaggttcaaagcgcccacgtgcagtgccttatctgtcctgccccggcctttcctctaaggagtccaaaggataaagcctggttataaaaggccacagccaacctgctgggctgtgagtggaagctctggtgcagcatggtaagtcagggccccatgtgggcaggggatttggcagggcgggggcagcccaggctacaagagggacgtggcccagaggcggggaagccaccacagtggagcccctgagtccagggtcctagtgtgctgctgtctaactcctgtgcactgggaggactcagcctcagggtccccacctcaagggagagccctgtggggcccgggttgcggggcgtctgttctactcactgtccttgtgacccgggctcctgacccagctgggtcctgcccctgccagcctcactgtgcgcatgggtctgtgtgtgtctgtgtttccatccatgtagatgctgcccccttggaccctcggccttctcctgctggccacagtcagaggtgaggatgctgtcaccattcctttagggagaaagtgacatgcctgggctggcctttggtgaggcagctagaggtatattaataattattataatgattatgaagagcattatcgttacttggagaaaacaattgtgccactcagagagtgttgactctcaggcagacacagggcaacgtgccggacacagagtatctcccgtaaccctcctacttggccaccttcttcctgcaaagactctcacggctgggagacaagtggagggtgtggtgttcccacctgatcccaatgcccttgtccttgcctgcagaccaaagtcatgtggatgtgccctctcccaagaaagcccagtcctgccaggcaagcctgcctttctgccatcaagcccacgtgtcctcttctcagagtcaccgtttctgtctctccagtttgttcccccgacctggttctgtccagaggagatacagatattcaagttctacttatcctaaaacacaaatcacctccgtttcttttggagccccctgagccccagcctgctgacttcccatctgcctacgccttcacaggcgtgcttcctccgggagtctttccctctccgtgggggctgcctcacctcctctcctgccagaatacctcactgcccaatttggtcccccaagtcctgctgtaggagacatggtctccttgggtccctgtgggggctttcttctgccttgtgactcttcccccttgtcttctcaaccccgccagcccactcttggcctctccttccatcctggccatgaattaaggccaggctcctgacggcagagaccggggtgggtgcgactgctcctccggccatacaacccctcttcatctcctttgctgacctgcagcctcctcctgccccaaatgtggacattccccaaggctcacgccaggctctctcctcatctctctcctcctagggccttccttcttgcccagcttcctggtcttcccgagttgcaagaagccctatcagggccaagcctcaagcctcaagcctcactctcacttccctgcccccagccttctcaggcttttctgcttctcagccccctgtactcgagtcccaaaaacacaggactgcctgtggaagcacagcattgccactgccaccaccacctcccctcaacctcaccaactcacaccttccaacactttcctgctctccacttaagagagcccaggtgtcttgcattcgagccccttcatttaaccagctacctttcccctggggcaaacattgcttaagcctcctagagtccacctccaagggtgcaccctcttcctggaatgaattcaacgccatcagtattgcttccctattagagctcctccctttcaggacagggttcatatctcatttatctttgtgtcccctcaagttctagctttattcccagttaaacttcttgggttcaaatcctgcctccaccactagctgtgacctcaggtagcttaccttgtctctctgtgccttggtttcctcagcagtaaaatggagataatactaattccatatttgtgttttcaggcttaaatgatactataccagtaaagtactaacatggtatctggcacatagtaaacaaatataaactattatgcatttttttaatgattcaccaatatttggcatcatcagtacaggagttgaggaagcataagagaaaggacccattataatcctttgggttggaattatgtcacccgtagtgaccatatcctgtgatcatgtttatgtcatggacacagaaagtactctcagacttagatgtggttacttggatcatggattacatgtattgagtctctactacacgtagtgtgatacacaagtcattcctgttcttaagaaacttactttttcaaagagcaaaagagaaaatatgaaacggcagagaatcaccctttcaaaaaaatgtgcataaaaggatgacatgaagacatgtgaattggtgtgggcacggcctatgctgtgtgtaatagagatgtcaagacaaagtagcaactctgtgctacagagtttgtaggcactcgataaatactcactatttgatgcttacatgtaaagagtcagctgcaagtttcctgaaagaggtggttttaaggcagcagtttgtattaggttggtgcaaaagtaactgtggtttttaccattgaaagtaatggcaaaaaccgcaattattttgcaccaacctatgcatcagcaattccccaatttgcctaatggtaaggggcacttactgaatatgtgtttctaggaccccaccccagaccctctgaaccagaatctctgagggagggacctatgaatgtgtatgtacaatacacctgttccccatactgccgcctgcccccacccgcccttcccaccccgcgacgccgcagcccccaggtgattcttatcatcccagaggtttggaaaatgatggcaaagataaagaccagcactggccttagccaaacctgggctctgtcctgcagagttttcctgtatggatatgacgttgcttctttccagaagttcacacatgtcctgtttgtggctcaccctaggaaaagaggtctgctacggacaacttggctgcttttctgatgaaaaaccatgggcaggaacccttcagcgacctgtaaaattacttccctggtcccccgaggacattgacacccgctttcttctgtacacaaatgaaaatccaaacaacttccaagtaagagcaggcatgtaagcgctgcatggtgggtgtatttgggccgccacagtggagtctttgcatggctgtctagggcataagtcactgccctggaattttccagaaactccaaggcatagaatccaaggcgtagctctcaggatcataaacacctgagtatctgatgaaatctactgatgcctaacccagaaacttacacattcacacacactggtgcagagaacttcaggggctaccccagcgtaaatgccttgttccctgggaggaagggactatgagcagcatttatggagaagcccaggcctggtgtagccaccggaaagtctgcctcgtttctacacaggagagtggagggggagaagcctcttgggcattgggggtgggggtgggtgtgaattcttcctgaagagctaggagacaggtaggggagaggggacatgtagccacaatagataaaagatgaggtcctctggagcaacctccagttttcagcaggtctgcccatcagaagcagatcagacttgctccagagtgtcagaagtgaccaggagacagtttcaagaaagacattgctgagaatccagcagctcacagctctggtccctgacagagtttagggagccaggtgtctgtcaataggtttctgaggtcacccactgtgggactctatctgacagaccagccttcttagtgcccccagcccagagtcggcttggacatggttacggtgcgtctcatctgtaggggttggtggcatcttctggcatctcatctgtagaggttggtggcatcttctggcgtctcatctgtaggggttggtagaagggggtcgagcagcctgtggcaatttagaagtgcattccaaagtctcacagctccactgaactgaatttgctcccacacttaagcttctggtccaggggttcctcaccttttctgtgccaggaacctctctggccacctggaagaagcctaaaggccccttcttaggtcaattttttgttgttgttgttttttgttggtttgtttgttttttttgagacagagtcttgctctgtcacccaggctggagtgcagtggcgcgatctcggctcactgcaagctctgccttctgggttcatgccattctcccgcctcagcctcctgagtagctgggactacaggtgtctaccaccacacccagctaattttagtagagacggggtttcaccgtgttagccaggatggtttcgatctcctgaccttgtgatccgcctgcctcagcctcccaaagtgctggtattacaggcgtgagccaccgtgcccggccaggtcaatgtttttaaatgcagaaataaaatatattggattacaaaagaaacgaattatattgaaaaataattaccaaaacatttaaatatataaatatgtgatatagtcatatatgtgctttttatatatcattaaataacaagatctaggggttggtctaataactactataatttaaaatattaatgagtataaatgatatttttagatatctgcaataattacattatgacctgaaaatacctgtgacttctaccggggacagagtcacaggtgttgctaataccactgtggtttattgtctagttttgtgattaactgaaatgctagatatggattaaggattaactaaaatagaaagtctgtgaatttggactttctgaaatctatccacaaccccaggtcaggagctccttctagtctgacccagctttgtgggcattgaagctgtgatatcaattctgaaactggctctaatagactcgtggcttggaaagggcaacattcaaattaatctttttaaattaaaccagctaatcactggcacggaaccagacaccattgaggcttcaaacttccaactggaccgcaagacacgcttcatcatccatggcttcttagacaaggcggaggacagctggccatcggacatgtgcaaggtagggccctaccacttggccactccctggtgagaccagcacccaacacacagattcaaacactgtacccccagtttcccttagactgggaaaagaaatacttcagagagagatgggtcctttttaaaaccaccgaggaaagcccagttccaaagggcatccattaccaagctctctctacctaccaatttctagccaacaatctcctatgaggctgaagacacccagagttcagtcaaaaagtctcgaggtggagactgcagcaaactgctgggcatttatccctgaggacttatgtaaaacccctttgtgatgttaaaaacacttaaattttaccctctaaagcaccgctatccaatagaatgttctgcagtgatgaaggtgttctatatatgcactgtccaaatcagaagccactggccacataagttattcagcacttgaaatgtggctggtgcaaacgaggagctgaatttgacatgttattgagtagtagtagtctgctcacacctgatttagtaagtggtctttttaacctggttgtgttcctaacgatgtgtgagacctcagacacgtcactcacccattccagggttcagtttccatatctgttaagcgggtactagcatgtccagtccatagcactgcagtgagggtgacgttatggcaggtataagaacatcaaagctctggcatgggctaggtgtttgacagacgtgaatgcctatctctggggtgtgcacctgggggctgtttataaattgatttctctcccttgtttgtcttccccagaaaatgtttgaagtggagaaggtgaactgcatctgtgtggactggaggcacgggtcccgggcaatgtacacccaagccgtgcaaaacattcgggttgttggggcggagacagctttcttaatacaagcactgtcggtaaaaccctgcctgggccctgtcctgtgggtaggggtcagagaggggcagggaggtaccacgtggcatggagaggcagcctggggacccgtgggcatgggtaggggccggcagctagtagcccagattgcaatcaagaagggcaattcccaagatgaagctctgcaaccttcctctttgcctgctgtcctgaagataccttgccctatcactgtctagctgtggggcctgaggcaaactaagccttggtttccccttttgaaatagaccttccttgcaggctgttctgcaagggtcacagagcaggctgggctgcccagcagctcccagtgcagaagatgagttttcatccttcgccaacccacgagggaaggccctggacctttctgcaggatctatcgggagggggcggggggagccagagatagggcccactctacccgcgctcgcccagacaggccatacccctggcagggacgaggaaagggagctgggggtggggcagtcccgggaggcaggccgtgtgcctcgcccgcccaggtggcctgcagttggcatggtggccgctggtcagcactgttgccccgcgcacgagccggcctgcgggactcgcaggctgcaaatagggagcggggtcgtcctaccccaggcggcgtgctcgagcccgggtcctgcccccatccctggcagggcccggcgccccgctctcagaccagcgggtccccacgcggtgctgtgggacctgacacgctatccctccgcagacgcagctggggtacagccttgaggacgtgcatgtcatcggccacagcctgggcgcgcacacggccgcggaggcgggcaggaggctggggggccgcgtgggcaggatcacaggtaggggtcgcggggccccgggccggagtcccaggcccccgggtgcgcacctcggaagcctcggccagtgcctttccgacggcgaagggcgcccctgatggtcctcctggggacccgattttttgtgatgaccggccttaaatttaaaaataattttccataatgtgtattagaaaatagataattaaaaataaaaatgcattcattttttaaaacaaaggctgggccactggctcacacctgtaatcccagcacttttgtaggctgaggcgagagaatcgcttgaggccaggagttcaagaccagtttggcaacatggtgaaaccttgtctctataaaaaatttttaaagttggccaggggtgatggctctgcctgtagtcccagctactcgaaaggcccaggtgggaggactgcttgagcctaggtgttccaggctgcagggagctgtgatagctccactgcactccaccctgggtaataaagggagactgtatctcaaaaaaaaaaaaaaaaaaaagagaaaggaggaaagaaaagaaggaaaggaggcaaggaaagaaagaaagaaagagagagagagagagagggagggagggaggggagggaaggagaaaagaagtgaggccgggcgcagtggctcacgcctgtaatcccagcactttgggaggccgaggtgggtggatcacgaggtcaggagatccagaccatcctggctaacaaggtgaaaccctgtctctactaaaaatacaaaaaattagccgggtgtggtggggggcacctgtagtcccagctactcgagaggctgaggcaggagaatggcatgaacccggaaggcggagcttgcagtgagcggagaccgtgccactgcactccagcctgggcgacagagcgagactccacctcaaaaaacaaaaaaaaaaaaaaaaaaaaaaaaaaagaaagaaagaaaagaaaaggagaaagatttaactagcacattaaatccatgacttaagagctattattttcagagtatggcaaagtaaaagaaaaaatgtgagatggttttaaaaattcgtcagttccacgtaattgtttgaatgtctctactgcgccaggcaaagacagaaaatgcaaatgcacactgagacctgccatatagaaggcgctcagtaaatactgaatgaatgaatgaagcactaaactgaatgcatataaggcaaagacacaaataacttaattttgtgcagccaaatcagtttgtaacttcaccaaacagttcacatcaacatttaatgagcgtccctttgcccaaggcactgggtgaaggatgagggggtattggtttgtgtttatgtagaattttgcagtttgcaaagtcccttctcttacatctcttcatgagggtttcacaacgactctgtaaggtaggggttgtcattattcctgctttcccgataaggatacagaagctcagagagggcagacatttgacctggagtagaactagggcaagaatacaggccactgtgtgccccctcctcccacgctctgtttctctctgaagatgacctggggacagcataatacaaagtggatggaatgggctgagaaaggagaggggttagattttccatttaaccatgaggaggtggtgtgtgagctgggtttggaggagaaagatttagataaaggaagaatgtgggaaagagcacagcaggctggagaatggcgtgagccaaacaaaggagtagatgctagcagctgggtaaggcctggggtcttgcagtctctgagagcagtggccaaatggtaatgtgtgaggacaaaaagaaaaagggaaagaaggggtgtacggaggctacccagatcctccacggagccaggcactgggtatttctgaatgttcatccacaggcaatgaccccattcccagcctttctgtcccagactctctctcccaggcagaccaagaactgcagacccaatccccagaaccatagctgctggggtaggaggaatcctcatgcttagtctgccagtactggctttaaatcccagttcttaagagtccagcctgcctaccttctccctttcagggctggatccagcagggccgtgcttccaggatgaacctgaggaggttcggttggatccatctgacgccgtgtttgtggatgtgattcacacagattcttctcccatagttccttccctaggtgagttcctcaatcccatctcctgctgacctgtgctacagctaatgacattgggtccagatatcccctctcacacatacatacacacacagcaggggaggccatttgaaatagctacaggaatggcttgggcaccaaccagtcaaaatgggtaccagtcccaaataaatagctagttcaatgccagtggaatcagcgtgcagccctgggttaaacaaaaacccttctgtagtctatgaaaggttgtcaatcaatcttcaaactctgcatccttccccaatctaccagtaactagtggggcagatgtattcattcttaaaacttgacctgtacttgcaaaatacgaagttaatttttgaatatttttcttacttcttcagtcaaagctttggttacactttgttttgttggcaactttatcccattctttaattcttctaaaatcagtgtttttttttcaatattttcttatatagccactcatgaaacttgccaataaagggtatgtttttgatgatgatgatgatgatgttatcacttacttagtgtttaccatgtgctacactgaacattttgcatacattagcttgtcaattctgtaacactctaaaaagtgggctttattaccaccatttcatggctgaggaactgaggctcaattaggttaagtaattgacccagatcacaaaatctgtaagtaaaaccaggatttgatcacgggttcatatgctttgaaagccaaagagcctagccatatgctacggctcacaatataacaatataatgttatgtagtctccacataacaatataatgtagacatcaaaattttaaaatgagtaaagtaatacaaattgcaccagtcttgataggtctactggtgcataatggtagcagggcatatcaatatggtccaagactctccgagacacacagatgcacatccaaatgtatgtgtctcactcacccaaagctcagcctccccctcatctcacttcctctgccctctcctccgtcctcatcttgccaagcacccatctttgagaactttctgcagagctagaggcagtggtagctgtgataaagggagaatttgccaaaaagggtcttgctgtggccacaccctaactttggcaccagtcacctcgccgctcatctctgcttcaaatattttaggtttcggaatgagccaaaaggtgggccatctggatttctttccaaatggaggaaaggaaatgcccggatgtaagaaaaatgtcctttcaaccattactgatattgatggaatatgggaaggtatgtaaattaaagaagtaagacagcaattgctctgttcggggagaaagcagaatgcatggtctggccttcataatgctgacatttgccaccgtttatggagtgttgtgaaaatgtgccaggcattttcacagcaatgcaatgagatagttactctgattagttccagtttgcagatccaaaaactgaggatccgaaaaattacataactcaattgggcgtggtggctcatgcctataatcccagcactttgggaggctgaggtaggcagatcacttgaggtcaggagttcaaggacagcctggccaacatagtgaaaccccatctctactaaaaacacaaaaattagttgaatgtgatggcatgcgcctgtagtcctagctactcaggaggctaagatatgagagtcacttgaacccaggaggtggaggttgcggtgagccgagatagcaccactgcaccagcctgggtgacggagtgagactgtctcgaaatatatatataaaaaaagttacatagctcattcaaggccgctctatatctaagcccaatttctaactataaagccctgagctcatgccccagcctgtgtatctccctgttgtcggcatcctgggacagcggcttggctggcatgttggctctggctttgaccacctatcctacctgcagcacctgctccttgaagaactgcaggacataggccaagatttgaaggccttgacttgcttgctggttgctgttgttgggtgctagaaatggaaggggactttgctgagaagaagacaaaggagggatgtgctctgtgggtttggggtacacgtgtaggagggggaggcctggaggtctgggagacccatggtggctgctggccagctgtgtacatttctgttcatctgagagagcacggcccatgccctgccattaggcgacctcatagccccatctgatttgctgccccttgctctggccttttttgattcctgttgcccctcccctgacaccaggcttcactctcctccctgaaaagagaggttttgggcctgtgataattttagtctatttttctgagctgggagttccccaaggccaaggactatgttttgcacatttcagacactccagtaccctgctcagggcctcatccaaagcaggcacgaaatatacttttaaattgagttgagtagccttgtgtggcattttaatattccatgtgcttaatgtcaaagagcagagtcgataaagcgatcgccagcatccaccggcaaataaacggagcttttgccctctcaggtaactcctggggagatgtgaccattccaggctccctgaaagcacaccagagtcacaataatagctgccccctcccacaaacgatgagcaaggcacacataataggaacgagtccaggtttaattagagaagcaatgtcgagtgaacaagcccatgagcactggagtgtgtttctattgtgtcaagctccgagtcatccaggcagtgggcactgaggaataattaaatccactttctcctccattatggggtcccagggcagcaattttggatgaaagaaacaattaagtttgaaacaggttctgttgtccagtgatgagcaccagtgtgggcacagggaacgtggcttcagctagaagtcgctgggccgagggccgggagccgtggagtacgaagccaccctgggcacaaagggaagtgttcctttctcagtgggtggcgataaagccccgcagaccccccaggagtggtccgcaggtgtgccagggtcactgtgcatttctccatgggaagttttctaccaagtagccagagaaatgaaaaaacacctttccggactttttctaaagaaaaggatgataaataaaatgcagtaagagagtggccagaggccatggccaccttgccatcaccgcttttaccttgtgccctgcatagcaaagaggaagaatcaaaaagcctggttgatggggaaggcctgcccggtatgtcctcacagggatcctcacagggataggatgcggtctgcagcagcattggatgggccggcatggtaactgtttttaagatggggatgcgctgccttcactcacgcatgcgaaggttttcaggtagaagtggagatcctggcttcttatgaaaaaatcagaggaccaggcgatttggggctttgaacatgtgacacctggctagactgtgtagggttagaggggccctttttacagctattgctatcttctcttagtctctctctctctctctgtatgtatgtgtatatatacatatatatacatatatacatatatgtatgtgtatatatacatatatacacacatatagtatgtgtatatatacatatatacatatatagtatgtgtatatatacatatatacacatatatagtatgtgtatatatacgtatatacacatatatagtatgtgtatatatacgtatatacacatatatagtatgtgtatatatacgtatatacacatatatgtatgtgtatatacgtatatacacatatatagtatgtgtatatacgtatatacacatatatagtatgtgtatatacgtatatacatatatagtatgtatatatatacatatatacatatatgtgtgtgtatatatatacatatatacatatatatgtgtgtatatatatacatacacacacttgtatatatcatagcgtatgtgtgtatatatactatatatatacacacacacgtataccctctctatgtctctctcctctgtctctgcatctctcctctgtctatctatcctctctctctgtctttctgaatctctctctttctcatcactatctctttttgtgtttctttttctctctccatttctctctctgtctctgtctctctgtctccccctccaccggctctctgtccctctctgactctctgtctctctctctccccccaccaactctctgtctctctctgatgctctctctttctctccccctcaactctctctatctctctctgactctctgtctctgtctctctctcttcccttaccaactctctgtctctctctcccccaccgactctctcgtctctctctgactctctctctctcccccgaccaactgcctctgtctgcctctctctatcactttctctctctctctctctccctcaccaccccaccctattcccagcccccagccctcctcattcatttgtgttacatgcctggcccctggaagagtggacaaaggtgcttgtcaggacatgtcactcctccacagtcacctagccctgagtaggtccctgctcagcaaatgccccaagatattcaggagccgacacccatcggtgaaatgtgcaggtgattcttccttagtcagaatgagttgttcacacttaaaagtgaaaggcctcctttgagctcccgggacctttgtttttttcaggaattggtggctttgtgtcttgcaatcacctaagaagcttcgagtattactcaagcagcgtcctcaaccctgatggcttcctgggctatccctgtgcctcctacgatgagtttcaggaggtaggttaccccaggaggctgaggaagatgttgctggccctgtttggggtgtttttgtgttcctgtggcttagaacagaacaaagagatgtaactctgcaactaatgcagggaggtaatggaaattctgcacctcacaaagccatcttcccccaggcagcagggtgggctggagggggaaggcacagacctgactgtgctgggcccttactagggtccccagttgttcatttagaaaaatttccaatttgcaaagaaggtgaaagaagaataatgatgaatactgtacacctgtcacttagatgcaccagttgctaatattttatatgtgtgtgtgtatgtatactttttctaaattatgtgaaagtaaattaaagacattatgacatgttacttataaaaactttagcctccatctcttaaaaacaagatccttctcctatagaataacattcaagaaatgtatctttgatacactaatattttctaatatatagtacatattcaagcttctccagttatccaaataatgccctctagagctgtatctgtttgcctgccttctttctttccttcccttcttcttctttttttttttttttttttcgcattgcaattattttgttgtctctttagtcacctttagtcaagaacagcttcccattttttcttggtctttgaagacttgccagttatgaggctttcagaccaggtatttggcaggatatctcactctctgaaattgtttgattttttaggcggtgcttcagtgagtaatagcaggtccttctcagtgtattacaactaaagagattcatttaatgttcacttattatttgatgacataaattcattcattatttgatgacttaaactttaattacttggttaagatgtttaaactcacattttgtcctttcaaaactaattttaaccttgacattcttgggttgaactgaggtcaaaaggacatcgtatttgatctccaaggtctgtgagtgttcagtgagaaggcttcactgtgctagttcttgttgggtcatggataacaacatggcctccagtatttgtctgattcctaccaaatcacaaaacagctctacacatcatgcattttggatgtggcatgaggtcaaaaagcagaggacaatgacactgtggcataaagcaatcaaatccctgattcaaagacagcaagttgcctcctctgcgcctaattaaagaactatcatttgagaagcaacaaataagaatcaacaagtctggagaaataattcacattaaagtgaaaatggtcctggaccttcccttcctcacttcttttgaaataacttgccatctctcccacttctccctacatatattatatttcataccccattcatattttaattttactgcttcctggatatgacttgttttcccaactatattccaagtttttgaggcacttatttggatactctgcagggcctagcacagttctatgcacaattccaagggtggaagcatggatgcatgggtgcatgggtagatagatgcaggagtgcatgagtcagtgggtagatgagagaatggatggacacatggatgcatgggtgcatgggtagatagatgcaggaatggatggattagtggataggtatgagaatggatggatgggtagatgaaaggatggataagggatggatgagtagatggatggttgcataggtaaatgaaaggtggatggttgggtgggtgatgggtagataggtagatagacataggaaggaagctgaattgattgactaacagacaaattatgtttttttttttccactagagtaagtgtttcccttgtccagctgaaggatgccccaaaatggggcactatgctgaccaatttaaggggaaaacaagtgctgtggaacaaacctttttcctgaacacaggagagagtggtaactttactagtaagtttccattttactcacttcaaattcttgcgaataattttcaaaagtgtgccaaccttattagtcagtatccttggtaacaatggatagaaacttaactacaacaagcttaagttgtaatgaaaggacagtgaaatggaatttgtgttgggtctcacccctttaaccaatactcctgaccagcagagaaaagtacaatgattggcccaggctgggtcacatgttcacccacccctgttgctggaaggatgcatctattaacagaagagggcaacgtgaaagtcactgtaagtcaagaagtcagtgcagtaatgactatctattatattagtcctcctacatacacacactttgtggtgatgtcatttcgccctgcttcttattttaaaagtacaagatagtaaaattatcaagactcatttactgtgaataatagcacataatggctggaaaggagagcagttattttctaagagagtttcaaatttaaaaatttatatcagcactttacaaaacacttttcacatacagtatttcctgtaatcctcaaaatatttatcataaaagataagagtttggcagaatctataaaatcttatatgcacattcctttaacccagtaacttcacttctcagagtgtaccatagagaaatacttgcgtgtgtgcataagatgatgtgatcaaggatgctcgctctttatttttaagagcgaaagattgaggggaaaacctaaatgtccaccagttgtaaatgactaaatactatagattaaatactacatgtaaccattaaaaagaaggttatacctctgcgtactgaagagagaaaacctctaaggtgtattaagtaagaaggcaagtgacaaaacaacatgcaacacacccattgtcttcattggttcagactgctgtaatgtagtaccatagactgggtggcttataaatagtagaaatgtatttctcacagttctggaggatggaaatctgagaccagggtgccagcatgatcaggttctgctgcacattgctgtcttcttgctgtatactcccacgtggtggaaagaggaaaagagcactctctgtggtctcttttatgaggttactgatcccattcatgtgggctcttacccacatgaattcagtccattgtaccatgtatcagtcaaaatacacatgtgcagtatcagctgcccttcattcatccaagagcacataccttgctgtgttcataagggactgtgctgaactataatatttactgacccctgagtcccttgctcccacctagaacctaatgtacccttaattcctgggccccaggaattcaattaagtcacagtcctattgcctctcacccctggaggattcagagcttggaacaataatattttcatagatcattttttcaataagatgagttcattaaatgggttgtatttctttggacaggttggagatataaggtatcagtcacactttctggaaaagagaaagtgaatgggtacatcaggattgctttgtatggaagtaatgaaaactcgaaacaatatgagattttcaagtaagttcaatggtaatgtgaaatgatcatactttccataatagattattcaaaattgattgagtataaagtgctttataaatctaggcatctattatacagaaccactgaatcctagaatgtcagagctggaagaaagtctcaatgtctagttcaattgtcccattttacatatgagaagagtgaggcccagagagagggaactcactatttaaaatgagtcatgtgctaactccttttggaatgtcagtcacctgactagattgttttttctttttttgttattttattttattttagattcagggggtgcatgtgcagattcattacatgggtatattgtgtaatggtgaggtttggacttctagtgaacctattacccaaacggtgaacattgaacccaatggataaattttatcccttatccccatcccaacctctctccttttggagttcccagtgtctattctttccagttttatgtccatatgtacccattgtttataagtgagaacatgcagtatttgattttctgtttatgagttatttcgctgaagataatggccttcagcttcatccatgtagctacaaaagacatgatttcattcttttttatggctgcatagtattttatgttgtctatatgccaaattttatttatccaattaaccactgatggacacttaggttgattccatgactttgctcttgtgaatattgctgtgatcaacatacaagtgcaggtatttttctgataaactattccttttcatttgggtagatacccagtagtgcaattgctgggtcaaaatgaagttctatttttctatcaaggtatttgagaaatcttcatactgttttccataggggttgagctaactgacatccctaccaacagtgtataagcattcccttttctccatatccttgccaacatctgttattttttttttgactttttaataatagtcattctgactggtatgagattgtatctcactgtggttttaatttgcatttctctaataattagtgatgttgagaatttttttatatgtttgcttgatgtttgtatgtcttttgagaagttctttgcccactttttaatggggttgttagtttttttcttgttgatttaagttccttatagattctagatattaatcttttgtcagatgcatagtttgtaatattttctcccactctgtaggttgtctgtatactccgttgattgcttcttttaatgtgcagaagatctttagttcaattcagtcccatttgtctattcttgtttttgctgcatttgctttgaggtcttagtcataacttctttctttctttctttctttcttttttttttttgagatggagtttcactcttgttgcccaggctggagtgcaatggcaagatctcggctcactgcaacttccgcctcctgggtacaagcaattctcctgcctcagcctcccacgtagctgggattacaggcacctgccaccatgcctggctaatttttttgtatttttagcagagatggggtttcaccatgttggccaggctggtctcaaactcctttcctcaggtgatccacccacctcacctaagctaatgtacaggagagttttatcctatgttttcttctagaatttttatagtttcaggtctcacatttaagtctttcatccatcttgagttaatttttgcatatggtgaagaataggggtccagttttattcttctgcctatggctaaccagttatcctagcaccatttattgaataggtttattcaataaccctttcctcgttgtttattcttgttgactttgtcaaagatcagctagctgtagatgtatggctttatttctgggctttctattctgttccaatgatatatgtgtctatttttgtaccagtaccatgctgtttgggttagtgtagccttgtagtatagtttgaagtcaggtaatgttataccactggctttgttctttttgcttagattgctttggttattggggctctttcttattcatattctaaaacatgaattttagaattgttttttctaattctgtaaaaaatgacattgttaatctgataggaattgtgttgaatctgtagatcactttaatgatattgattcttcctgtccatgagcatgggatgtctttccatttgtttgtgtcatctacaatttctttcatcagtgtgtttatcgtgctccctgtagagttcatttgcctccttggctaaatgtatttctaggtatattttgtgtgtatggccattgtatatgagattgagttcttgatttggttctcaccttgagcatttttggtgtatagaaatgcaattgatttttgtgcaataatttgtattctgaaactttactaaagtgatttatcaggcctagcagacttttaggggaattgttaggattttctggatataaaatcatgtcatcagtaaacagagataagtagacttcttcttttccaattggatgccttttatttctttctcttgcctgattgctctggctagaacttacagtactgtgttgaataggagtaatgagagtggacatccttgtctagtcccagttcttagggtgaatgctttcaacttttctccattcgacatagggttagctgtgggattgtcatatatggcttttattattttgaggtatgtttctttgatgtctagttagttgagggctttttatcatgaagggacattagattttattaaaagctttttctgcatctattgagattattatatgttttttgtttttgattctgtttatatgttgaatcacatttgttgatttgcatatgtagaaccacccttgcattcctggaataaaacccacttcattgtgatgaattatctttttaacgtgctgttggatttggtttgcttgcattttgttggggatttttgtgtctgtgttcatcagggatattgcctatagttttctttctgacttggattttgtaaatatcaaaatctcttcaggcaaggcacatctgtatggcacatacccaacacacaccccatcctcacacacataggtacacatatgaagcctgtggccatctcatccatgctgtgtggcctcagcatctggcttctgctgggcatgtgaggtgcttggtaaatatgtgttagatgaatgcataacctgtacaataaagttaggttctgtttttgcactaacttttacataaaaatgtttgtgttgaattaaatgtccttgacaaattcctgtaatacacatgagatgctaacaaatggcacctgctgaaccacatgcatctttaaacataagacattgccccaaatagtcctgtaacaaacttagagcattaatatgccaccccaaatattcgacttagctgtaggtaaaaactaaaacagtggaaatctggagtccagtatttttaaaaggtgtgttctgcacaaatacttttatgttatggcagcccctggatgtgtatgaagtcatccaaggtgtttgcagaaaaccaacaacagcaactattgtttagagaagtgatagatcgcaatcatgttatgtattcatatatccagctgatataacattttatgtctatattttcagaggatccctcaaaccagatgcaagtcacacgtgtgctattgatgtggattttaatgttggaaaaatacagaaagttaaattcctctggaacaaacgtgggataaatctatctgagcccaaactgggggcttcccaaatcacagtgcaaagtggtgaagatgggactgagtatgtattttttattgcatctaagtttggttatttatatttacatattgatctatctgtctaggcattcattcatccaattgcccacctactcatctatgtacccatctactcatccattcatctacccatctatccatttctctatccttttaaccacttagccacttacccattcacttattcctctacccatccacccagacacctatcttatcattcttctggccctctggccattatttgatcttccctccatccattcatcttcccagctgttcatctcaactctccatccatccatctgatttactttgaaaaaccaaacgttgttttccttaggcaaaattcaacttggcaggggcaaggcaatgattgtaggcacagattcaagaaacgggcaaatatgaatggctattttatctcaaacaataaggaaaacacttgggaagcacatagtggaaatctctgagttaattccagttgatgtgcagttattaatgtaaacaggtttgtttggagactatagcattagagggatacacactgtgttgggaatctggctcatagtggcaagttcttccattctgagagaatagaatcctacttagtaggcattgggagagaatataactgtttttaaaatatggaaagaatgacacctcaaaagaggataattcaaaaacaatgggatattagagaataaaggaaacataaatgttgactctcaactgatcttgttttaagatgaggaagtaagatttggaaagtcaagtaacttgtctaaggtcatgtagggaatctaaagggaaaaatattgaacttcagaatgttttcaaaacacacaccaagacttagctcagctgcatgactcaactttgctggctgtaaaagtggcaataatcccaattactcagtatattattggaaggatcagatgtcacagtcagcgtgccatcactttgtgtacagtagacccccttacctggggggatgggtgatataatccaagaccccagttggatgcctcaaacctcaaatagtaccaatcctacatatactatgattttttttcctattcatacatactatatgaataggaaatatgctggacaaagggacacttcatgtcctgggtgggacagagctgaacagagcaagattttatcatgctactcagaatgatgtgtaatttaagcttatgaattgtttgtttctaaaatttcccatttcctattttgggacctcagttgaccatgggtaactgaaaccatggaaagcaaaactgcagataatggggggctactatgctcagttgtaaggcacaacaaggactgggacccaggtcttctgacagcccctccagtgttctttccactgtgcccatcaactcagccagctggatgtgaaactgagaagtccatatggtctggtagtgcaatgcaatgtgaaaatgtctggatttctcagtatttaagtgggggtggagttcctgttttaagtacaatatagaacacatactgtataatccaaacaccagagtccccagcccacatgagggctctctcaccaagaagctacattctgaagctaacccggagggaaggccagcttggccacactgttccccttgcatcaaagtcacctgcaagggaaggaagaggccagaagtggccagcttctcatgcttggtgcttgctccaacctgacttagttagtttctcacggttaataaccctccaggatcttttttatttttaagcaattttattgaaccataattcccataaaacacaattaacccatttaaagtgtgcaattcaatggcttttagaatattcacagagttgtgcaactatcactacaatgttaaaatcttttcatcaccttaaaaagaaaccccagacccattagccatcatccctccacccgcacatccctttttctcagccctaggcatccactaatctactttgcgtctctgtaggttttcttattctggatatttcatgtaaatggagtcatacagtatatagtccttcatgactggcttctttcatttagcataacgttttcaaggttcatccacgtagcatgtatcagtactgcattgttttttattgtcaaataatattctattatacgactatgccacattttatttattcatttatcagttggtcatttgggttgtctctacttgggggctattatgaataatgctgctatgaacattatgtacaagattttgttttcatcctcttgggtatatacctaggagtggaactgcttggccatatgataactctgtttaacctttagaggaattgccaaactgtttccaaagtggctgccacattttacatttccagagcagtgtatgaggggccctctctgattttaatttgacagagaaagtcccctctgtgctggctggggcactcttggtccctggaactcattgctagacccaaagaggcagtcccatcagagtcccctcagttttgcagtttgcaaagcttcagtttgacatggctgattcactttccacccattcagagcccacatggggagaggagtgctctttgagcaggttttgttagtaagaattacttggactctgcctggtaaagcagaacttttcggtcaaggggagccgaatccagggggttgcccaaatgctgtttactcacctgaagtcacatttccacaagcaaaagagcctcatgctgacaatcttttcctccacaggtataatttttgtagcagcgacactgtggaagaaaacgtcttgcaatctctttacccttgttaaaaacgtggtgcggctattgcggtaataaaatctttaatgcactcggtttgagggtgagctgttagtttgacattctctactttctgggttcacatttcagaaatgatttgggggattggagccaagtttgccacaggtgatgcctggaacttctcacccacttacctctgccaccatctctctctttccaggcactttaggtggcccattccagcggattttatttccttagacaatgaacttctgtcctatttgtaaaggtcattgttgctctcacttgctgcccaaccagcttttaacatcctagggacacaaggtagacaccacataagcattcagaaaatacaaagagaagaaaagcaaaaaaggagaatgaaacaaaaatcccgagatattgccgcattttgtggcaggtgtaactccaaactctgatgattttgattaaaatccacctgcggcatggagacagcggggcttttttttaaaaaaaaaaaaaagttaatgcatgcacatgttacaaaattcaaatgatacagaaaagtattcttatgaaaggagaatctctttcccccttgccttcaagtctctcagttcttcttcctagagacaacctgggttttttcaagaaatagtccatatatccttatggatatatctattttacacactcaaccctgccacaccctttttgtctaagcacagatgatagaatactgtacacactgttccacatcttgcatttttcactaacaataagttgcatattcgtctctaatggtacaggaagagtttctccattcttcatatagcttcatagattccactgagagatgtacatggtatgtatggttggactattttctattataaatattcatgcaattaatatcctttcatgatatattctacattatatagctgatcaataaatatttggaatatgtttattttgaccaatattgccaaattgctctctatagcgattgtatcaatttattcaacgaacaacatagtaggttgaaccataggcaattacagttttaaaggccagaaaagccaaatgttgacaatttcatgtgattcattctaatatgagagcgtttcacactcttaccaacatgggtattgtcaaatcttttgccaatttgataggtgaaagtgtgtttccttacattgtaatttgctttattttattatgagtgaggtttcagtatttaatgggctcttggtatttcttcctctgtgaattatccaaattctttgccaattttaggcatctttttaatacagttttcactttaaacagctctttaatattaggaaaactggaatattccatcatatgcgaatattttgctcaatctatcctctacccagggaggaaaaagaacggcagcaggagggcctggggcagctgctcacagggcctgtacctgtctgccctgtgcgcagctcatacttaaagggttctgcaggtccccatcaccccagtggcttcccggagggctccaaccacctgaactcacactggtcagaggcagatgaggcagccaggcctgggttttcatatctccttcctgagcctgatactggccaccagcctgtgtggtcttttttttgaggctatgcccagatttgggggggccaaggacctcctcaacaaagctgctggggcccgtgtggagcgcagccgtggaagcctggcctcctgaccatgcaccacttcccatttgcccccagcagaactgcctggggaccccagagagtaaatgggctggtgccaggtagagggtgttgctttcagggcctgggggttgtactgtaggtgcacccgttgcgccagggtggggttattcactgttcaattcttagaatcctgaaatggcttcatctagcagattgagaaaatggcatcatgacagcagtggctgttgcttcaggagaattgcacgtaattcttccttccactgagatttggagaataggggtaaaggagctctctcttccctttaaggggaggcctctaatgcaaacagaact

SEQ ID NO: 144 - DNA, 22652 bp, Human
  misc_feature (1)...(22652): n = A,T,C or G
cagccttgctagaggcttagtctaattaaatcccctagagcatttaaacaggagccagtgcattggagcacagtgtatattgactgatgcacggagtttcctcattgtcttaggaaagggtatgctcgaacctggtgctgtgtgctaaagaatagtaacagtgagtgcaacaggtgctgctgtctctgaattccaggcctggcttgggttcctgtattggttagctactgctgcataacaaacaatcaccaattcagtggcttaaagcactgaattaaagcatttatccatgctcaaaaatctgagtttgctgggtggttcttctggtcttggctggatttactcatgcctctgtggttacagtgggttgagtaggcagtgccactaatcttggctgggtcctttacatacttgggggacagctggctttgagttgttcaaagatgttgctgttaccacacttaatgaccaaatcaagtcataccatgtctagctcagattcaagaggtggagaaataaactccacttcttgatggaaggagctgcaagatcacattgcaaagggtgtgtgtacaggaggaagggatgaagaactctgaccaccttcccagtccatcaccaagtctagcctgtttctccatcctggggatgcctggaagtagggaggaaacaggtcaagggccaagagggttttcacattttctcttttgactcattctgtgtatccctcttgttctacatggttgacatccagtgaagcttgctgattactagctcaacacaactgaatattcaacaactctgtacagcctgaattcaaatcttacctcatcactcgttagtcgtgtgactttttaggcaatttacttatctctctgtgcctcagttcccacatttataaagagaggcttatgggattgttttaaaacttattaggtaatacacgtaaggtgcttggaattctgactgtacttggtaaggcttcgtaacagttggcagctattctttatgattccaggagtcctttccattttcttaagaggaaggcccttaggcctgcacccttgtgttttggttatttaagattgagaactttgacaccgaggcatatttaacttggcaaggggaggcactcatggtgtttgctttgtgaaggcttatctgccttgctgtgtgaactggctgggctgttcacagatgcagaggtctctggttatatcatgatggctttacagggtccaagaattatctgcaggtgtgcaaccttcagaggacctggggaaactcaacagacatgacatgggcctctgggggctcctgaacccaactattgagattacagtggcataatgcaatcattgctattgttttaaagtgttgtcttttggattggttcattgcatagcaatatataactggaataggcagttaatgggaggattgtggtcagaagctactgtgagggctgttgaatttttctccaaagctcagatgcccagtattcctagtcttcgaaagagagagaggaagattgagagagagagagagagagagagagagaagaagttttcttaatcagagatttctctttactttcaactaattgcaggtattttcatctattctaaatgagaaatactatcctctatcattagggtttgctgctgtgtccctattgagacttgtaaactatttggtgatgaaatagaaaactgaaaagtgagggcccattcagctcacaagtacatgcatagttacataggtacaaggttggtgacttcactccctgctttaaccaagcattctgtcatatttccagacttgtgggaagacttgacagctattattaatcttgttttgtgtatttgggcagattaaagtattaagtgcgcacagcatgggctataatcacctgctgttttcttgaagtagtgtccaaatgataaggctggaatatatatttttagaaagggctggacactcgatccggtgggagggaacatctggaacattagacagggtaagccacctttgcaactcctttccccctgctgtgacgtacaggtgaggtaaacagtactgaagtccagggcgtcggtgctcactgctctggcaatgcccggtgagactgaattatgtttaaatttattgtagatgctgatcttctggacaatcacacttttcctgctgggagcagccaaaggtaagaaacaccactcctgccccgtaggaagggcttaaacttaagctctcagccctggccagagaaagctttaactgtggcagggctcccagcagctccagggtaccagagagaagatgtgggctgacactctgcctgggagagtaggctgggcagtttaagggagacctgtttctggggatccccccagtggcctaccttcatgctcggggtgcccaaggccagacatttctaggtaaagcatgaaacatctgcctgagttaacatattgacttatcaatgcccatgatcacattggtcaaataaatgtatcagaagagctaggaatgggacttagaactttccagttttgagggtagttctaaacaaaggctccagtggtgtccctgtgggattcaatgggactgatactactaccggccagtagtaggtgggcactggggtcaagaagagagtgggaggggttgcagtaggttcatccattgtcttcagactgtccctgaatagaagagtgaccaggcccgaacagcagtgacaccccagagcacaccttgagagcaaatccttgagcagattcaacctttctctgtaggaaaagaagtttgctatgaggacctcgggtgcttttctgacactgagccctggggcgggacagcaatcaggcccctgaaaattctcccctggagccctgagaagatcggcacccgcttcctgctgtacaccaatgaaaacccaaacaactttcaagtgagacctctgtcatttaaatgtcactgtaactggcacggggctatgcccaccctgcagaccatgaataccttatctctgtgccctcttcctccaccatgccccaccccatccctcaagctgccccccagacctagctagacctagacagagcaggtctttagtaatgttggcttgaatgaatgaatggttcacatttgccagaacctctagctactgtgtgattctggtctggggcaaacagcttactgtctaacaaaaaccacagggaaggtaaaacctcaaaccacaatccaggcctagtggaagcagtgattactcacctggagagatggggcaagaaaagggagatcagggtgggcttcatggaagaagtggctttttgctaagctttgaaaagtagaggcattggcgcaggcggagatgaggaaggaaaaaggcctgtgaggctgggctgcgaaaacatgcagcacttctgcgtctgtcacagattctcctcctctctgatccatcaacaattgaggcatcaaattttcaaatggacagaaagacccggttcatcatccatggcttcatagacaaaggagatgagagctgggtgacagacatgtgcaaggtaggagccagctctgatccctgtggccagctgaggccaacacttctgctaacatctctgcatcactttatgcactcaagaaatctttacatattaggtaactttatgcaattaaaatgcttctcttcacaaaaattaaaatgcctttccatgtttccgcactacatctgcacactgaagcaaccacatttgctgttagaaaagtactcctactacctaatttctggttaaaccaaggcctgatgttttctgcttccatttgtagtgagggtactttgtatcctataagcgagggactataggggtttctttgttcaaatttttcccacatccctgagaggctgacatgtgttgctgtgaccacttaattgatcccagcactttgggaggccaaggtggatggatcacctgaggtcaggagttcgagaccagcctggcgaacatggtgaaaccctatctctactaatgatacaaaaatcagcctgttgtggtggcaggctcttgtagtcccagctacttgggaggctgaggcaggaaaattgcttgaacccaggaggcaaaggttgcaatgagccaatattgtgccactacactccagcctgggcaacagagtgagactccatctcaaaaaaaaaaaaaaaagaaaactaagattaagttactacaatgacagaatagaaagtgtcacctacatgtaatataggtcagaaggagagcaacagaagaatacacacatgtgcacacacacacatacatacatggacatgtgtgcaacttgtgcatacacacacaaacacacacacatgtgcgtgcaatataccacaatataccatcatcctttctatttatgtggagactagttcaatcgatttttctgtcacctaagaatttacctaccccaggagcctgccttccacacatacattaataacaccaaccagtaatgtcaaaaggaaaaattacaaacccagaaaattaaagtcattctgcacttgcccttggtttaacaggcatttcactcttggcacctttcctgtcctatcattaataagcatcttattgatacagtttatactccaaattctccaggcttgtgaaagtttcctcaggattgcttgaaaatgaaagtcctggccaggtgcgcagtggctcatgcctgtaatcccagcactttgagaggccgaggcgggtggatcacccgaggtcaggagttcaagaccagcgtagccaacatggtgaaaccctgtctctactaaaagtacaaaaattagccaggtgtggtcgcaggcgcctgtagtcctagctactcaggaggctgaggcaggagaattgcttaaattcggaggcagaggttgcagtgagctgagatcgcgccactgcactccagcctgggcgacagaatgaggctgtctcaaaaaaaaaaaaaaaaaagaaagaaaaaaagaaaagaaaagaaaagtcctgaggagaaaactcccactatctctgtgcatgtgatcacacatattagtatactatatgtggaatgattccaagtgcattttaaatttatagtaccattttaaattcaagctggtaatatgtactgcctggcagaactcctaaagatatatcagctcctttgacatccaggaagacattttccttccagaattcttcaatctcttttaaatcagtacagttctatttttcaaatatctacatgtgtctactccatgaagtactgtgtcatcgtgactataaaaatagtgaaacttctctctcactttccagcagcctggggcatcgccaagagcctgaaaggaccccttacagtcaaatccacaaggtcatttagacactggccaccggagattgcacctaagacttttccttttcaaaacaggactcttttcatgatgcaattgtttttcccttactaaccaaccttactgaatttggttgaaggaaaccagagagtagccagcttccaattaatctgcaagctggagggggaatcagtttgcctttctcatagcattcaccctgaaggataactcctaattaccaacaggattccctaacagagtctagtttatctcatgccctagctaggagaagagagaagtggccatttctgagccctggctggataaggtttcccctgctcccattatctccccaaccccactatctccccaacaccagaaactgttcgaggtggaggaggtgaactgcatctgcgtggactggaagaagggctcccaagccacctacacacaggctgccaacaacgtgcgagtggtgggcgcccaggtggcccagatgctcgacatcctcttggtgagtcagctggctggcctatgtgaggagggaagcagtgcctgctggtctctgtttggtagagatgcagctgagagttatggattaaagaaggacaaagaattgatatccagaccttacttctaaaactctgaaatttgccttcataatgacacgccagtggaagcaaaaataagaatcgctaacacttagaaagtggttttttaaaaatcatcttcaatttacagataaagaaactgaggcccagaaagtttaactagtttgctcccaaagtcataaagcaaatgaatagaagacctgccttttgatccagaccatctagcttcagaattcacccacaacaccaggtgggctctgtttcgcgtgaaacacagcatggccagagagagccacagagagccaacggacagtacgtgcaattggcatgtaccagctctactggcctggtggtatgggtcctattgatgttggggaattccttctgccacaatcatttcacttatttcttcctatactgtttcattatagctaactccttcagtctttaattctttaagttgctaatcctttgtgactattttctataccaggtaatgactacagccatttctgtcttatagttaaagggtctacaaaagaatcaacttctgcactcctgcagaaatcaaaacccatggtatttgtgcaagaagtatgatagaccaataaatgaagtgcctttgggtgaacgtctctgagatcaacatgtgcaaatacctcatagctctatttgatttgcttgttcaccagtacttttggagcagaatgtcaggagtatgtgaggaagtaaagaagacacatgagatcccagaccatcaaggagcttgcagtgaaaacttgcaatgccagtagagtgcgatctattagtgggttctgatggggagagtaggagctttacaggaacacatagaaggcagctaatccacactgatggggtggggaaagggcttaaggaggtctcccaaggaagagacgtctaaattgacagctgaaggctagtctgttgatgttagctggcaagtgcttgggggatagacaacaacaagaagagaagaacaaaccaggcccagaggtgagaggctatgatgtattcgagggtctgaaagttcaacaaagggtttggctgaagagtctagaaaaatagatgatgagttaggaaagctcggaggccttcagaatgagtttgggcttgatcctgaaggcaatgagaggcatggaaggttttcagcagaggagtaatatccattaggctggcattttagaaaaaccacagcaaaaaatgtcctgaaaatacaatcttccctctccagacagagtatagctaccccccttccaaagttcacctcattggccacagcctgggagcccacgtggctggagaggcaggaagcaagactccaggcctgagcaggattacaggtaaggccccagaggcagggccccagttttgtccccagaaaccccagaatgaggtctcaagaatgcagcccagttcagagctcccctgaaggagactgtcccccttggctgtgatagagctgcttggagcctgcacagaacattttagggagcccccaagaagctcatgcgccaccttcacggcaagggaagggtgattttgttcctctttgcttcttccacctctgtcctagcccctcctttctaagtcctggttttctggtggtgttcgcctctcaacaggactgggcacccaggaaaatgcagagtgagactagtatgaacatgagcaaaacataatcaaggagggtctatattgccaattctttctcccttctctttgaaatcaagggcagaatagaacctaaaaattgtttcccactgcttctactagtagaagaaacccagtcgccattatggccaaaagcattcttttaacccaatcaaagcatttgaattataacagcaacagcaagatatatctacataatatgatggtgataataataataataatgctattataattattatgataagcatagattaagtgcctgcttatcccaaatactgcacaaaatgctttatattttcttatataattctcagaactgaagaaaaaggctcagggatgcaaataacttgcccaaagccacacaactcatcagtgggagaactgagatccagacctggttttgccgatgtttggcttaagcaactctttataagaaatctctcttttattttcagctggcaactacattcacgttcctattttatcagctgctgtaatgaagccttcaaaaactattaacaaatccaagatccctactaagaaggaaatttgtcaaaaacaataattattaatatcttacttatacacccatgactatacaccaggcattgtgctaagtgctacctattaactcatttaatctataacaaccatatcaaatagatgccattatcaccccattttgtaaaatgaagaacctgaagcacaaaaaggtagagtgacatgctcaaggtcatgcatcttgccccaaaagcagctgagtaggaatttggagccaggcaacctagacccagaacctgtgttcttaactatgataccacattgcttcacccctttctttctacaagcttggggagagaaaggatgatgaagaagaaagatacacaagtaaatgggagactctggtgtggaaaaaatccttgcttaaacaaaatctaaatttctttgctcatttgtcctcctccatccacgccactgggaacccttttgcaatgagccacattcagactctatgtcctcatatttagcacccaaggccatggcactgcatcactctggtgcatggtacccattgagttgggcagtgcatagcccgggcagctgtacaccttggtgctgctgacatctacagtcaggtctattgttctgcagtgctgatcatctcttttagggttggatcctgtagaagcaagtttcgagagtactcctgaagaggtgcgacttgatccctctgatgctgactttgttgatgtgattcacacggatgcagctcccctgatcccattcttgggtgagacctatgatgctccagctgtgagcatgcacaactgtgttttaaccatgaaagtcctgcatgacaaaaagctcattgtttttctaagcatttcaggttttggaacgaaccaacagatgggtcatcttgacttcttccccaatggaggagagagcatgccgggatgcaagaagaatgccctgtctcagatcgtggatctagatggcatctgggcgggtaaagtcatggtggggtgaggggagcagggcgggtactttcctggagtgaccaatacctttctgcagcaaatcttaagaataaaaatgaaactgtctttaaaaatatacaattccctcttctggggattatttcagaaaaaatgtagctacatagtatttgttatatctcagctttactgcttttgtgcttccttaaaacattgctgtggatgtcctggcatgtacaagcaacaaagaattataaaactgtcacttaaagctgtgactccagcaatcagttggtagttacctaatacagaaaggaaataccataagagcaaacatcctgactgtaactaagagacttttgctacaaattctctcttgggagtcagtgataaggttcaaaatgatgtaatcagctccctttcagtagctagaatgagaatattcccagtggtttccacagcaagcctatttgcacaatgagagccattgctcacccatgttgagtaggaatgaggagcaatcacagttaaggaaggtgagatgggagactgctattggatgtggttattctttattgttgatctagcacacttgggaagaaagggcatcctgcagacacagctctgactctgtatctaatgaggccaaaaggacaatggacaggtgaagttttcatccagacttgtcatgtggcaccacacggagaaaacccttagtagtctgaccaaatgtaatgagtaaagatttttactgaatttcatcaaaatggcttggcatatatggatgccatcaaagcaaatattaagaatgaggacaggccagctgtggtggctcacgcctataatcccagcactttgggaggccgaggcgggcaaatcacttgaggtcaggagtttgagaccagcttggccaacatggtaaaaccccgtctctactaaaaatacaaaaagtagccagtcgtggtggtgtgtggctgcaattccagctgctcgagaggctgagtcaggagaatcgcttgaacccaggaggcaaaggttgcagtgagccgagaccatgccattgcaccacagcctgggcaacaagagcgaaactccatctcgaaaataaaataaaataaaataaaataaaataaaataaaataaaaaataaagaatgaggacatatgcagtttgtctttcacagcctcatgagggtttgcgtgcatagggcagtcaaaactcttcatcagtaatggcccagcaagctcaggccaggtctagaaggtataatgtaacatttgtcacttggcaggagttgcagggagcccagaaaggttgcaagtaaaatcaagacactatgagagtgaagctcatacaaaaccacctaaagttatccagcccttgtttttatttgtataactgccgcatggaaatgtcctcgcattggcttggtcatgtcacatctggtcatgtctttgaggacctccagcatggtgcctgggacatgagatggcactaaggttagagggatgggccgaagacaagatgggcatgggtttaattaccagctttcccacctattagctaagctgtaaatctgaggctacactctgtagtcctttctgtaacataggaatgagatgataatgcataaataaggatgatatggtacccacctcctaggaagactgaggattacatggacaaggcaggtaaagtgatcagaatgttgccttgtacacagaaagcaccctctatatgttaattgtcattatggtggctgaattttggatttatcttaagtttctgaaaatacggtcctactttggaaccatcccatttggagagagaggcagagaagctgttacaggcccccaaccacctgttcaggtctccttattcgttttcccaggaacccgggactttgtggcttgcaatcacctaagaagctacaagtattacttggaaagcatcctcaatcccgatgggtttgctgcatatccctgcacttcctacaagtcctttgagtctgtaagctattgtcctgcctcgagcaacaagcatcacccctctgagggactgctgtcctgctgcgtttgggatttgcaatgccttctcactacacgttttgcattgaccctcagagttcatggtcctgtggagtggaagagaaaaaaaagtaaacaacttttggcaggagatggctaaaattttagatgacatgagttatgtggcagaggaaaactgggaaatcagagagaaagagcagtcaattcaatgatatagaggcttcctgcaggaggcaacctctgaatctagcttaaaaatgatacagtttagaaaacacaggaatgcacatttctggcaagggcagagcgagagtagaagaatgtatagagaataattcacaccagagagaaagcaaggtggatgctggagtcctatatgccaggctggcaacaaggggagagatgaagaatgacaggttagagcctgcctattctggctcacgagagccagcatgagtatcccttcccaactccaaattcagagacatcatgttggtagcctgaaactggccacagtcagagtatttacaccactgaaaatggtaagcactgcaatccagggtttttgtcccagagcttttgctgcttatcattcaccagctccactcaacagaaggtataattgatctaacctgggtcctgggcatcagtattttttaaagctcctcaaataattctaatgtgttgtgcctaaaagttgggaaccctgatccagatgaaggtaatttagagatcatctgctccaacccctttgttgtcacaaaggagaacgcttaggctgtaggaaaattgagtgtctgccctctcagatgtatcgatcatacaaacacaaattctccttacagtcccatctatctcttctcattaggacaagtgcttcccgtgtccagatcaaggatgcccacagatgggtcactatgctgataaatttgctggcaggacaagtgaagagcagcagaaattcttcttgaacacaggagaggctagcaatttcgctcgtaagttgcactttgactacctgcccatgtaaagaaagtatatagtttctgttacaaatgaggggcttgctttcaacctgaaatatttgtgggtacattttaattatcttagaaatggacacatttaccgaaactattgcagttacaagtaaactgaggatttagacagagtgtgcatttcttccgttctatttctgcggcatgaaatgagagcaagcaactagtataattaatgggatgaggccagtttgcacatccttgtgaccagctaccctgaatttttaccactccacagttcattgtttctttcctttttaaggccgcatcagacacacctgttctcttcattcagcaaagacgtaattggtaccagctctttgctgggctatgtcccttaagaagcccaactccattctctgctttcccctctgtctgtgcatccctgatgcccaggggctgcctcgctggtggagtgcaggcaggaatcagggggaaggatgatttctctccaaaacctgctgaatggactaagacacagggtagagactgggcatgtttgggccactttgtaccaacctgccccatgacagttccataggaggtgacccagtaaagacagaggttacatattcatataaatgtataacacatcttacatagtttttaaagtcagatttattgaggtataatttatatttggcaaaatgcacgctgtttagcatacacttgtatgagtttggacaaatgaatagttgtgtaaacacctccaaatcaagatacagaacacttctatcaccatatatatcactctgtaatttttttttttttttttgagacggagtctcgctctgtcgcccaggctggagtgcagtggcgcaatcttggctcactacaacctccccctcccgggttcacgccattctcctgcctcagcctcccgagtagctgggactacaggcgcccgccaccatgccaggctaattttttttttacatttttagtagagacggggtttcaccatgttagccaggatggtctcgatctcctgaccttgtgatccgcctgcctcggcctcccaaagtgccgggattacaggcgtgagccaccgcgcccggcccactctgtgtattttttttgtaagaagacattgattaatcaatccttccactgatgttgtgatgcatgaaatacttgccaatatttcaacaacaaattaaacactcaaaaaccaggtattcattcctcaatcaacatttatttatgggccacagactatgctagacactgaggatgcagggacgaacaagagactcctctcatgaaattaataatccagccaaagacagaaactgggcaagcaactacaagcgtgttgggcttggtggctgttgccatgacattatgggacagagaacctggccctgaccagaaggagggtcagggtcaaggtctctgaagacacgaaagatgaataggagttaggcaagaatcatgtctgtgtatattaatgtacatctgtgcacatgtgtgggtgtatgaatgcatgtgtgagtgtgtttgtgtatgtacctttgtgtgtatgcatgtgtttatatacgtatgtatatgagtctgtatgtttatgtatatgtatgtgcatgtgtatgtatatttgtatgtgggtgtctatgtatgtgcgtggttatatgtgtgtaggtttgtgtgtgtgtgcacatacacatgcatgtttgtgtagatgtatttgtgtgtgtgcacatgcacatgttgtgtatatgtatttgtgtatgtgcacgcacatgcatgtttgtgtatatgtattgtgtgtgcacatgcatatgtttgtgtatatgtatttgtgtgtgtgcacgcacatgcatatgtttgtgtatatgtatttgtatttgtgtgcgtgtgcatgcaggccctgggacagcatttcaggtagaagcctaagtgacagctgctcgtgcacctgctctgtgctagagactgcccagggccctggggagcagagaggaaacacagtccccgccctcgaggtgcttgccaggctgcactcccgagctaccttcccaaatgtggagacaagcccctattccctctctcttcaccttaccttactgtactgccattctggggcagagctggctaacagaactttctgcaatgaggggcatattctgtgtagccattagcctcatgtggcaacttaacatttgcaacacagctaatgagtttgagaaactaaatttttaattgtatttaatttggatttaaatgtaagcagccacatgtggctggtgacctcctccctgggcaatgcagttctagagggggatactgctaaatacatacttctccataaggccttgtttgatttgtagattaacaaatagaatttcttatactttggctgggcgtggtggctcacgcctgtattcccatcactttgggaggcggacacgggcggatcacttgaggtcaggagttggagaccagcttgaccaacatggcgaaactctgtctctactaaaaatacaaaaattagccaggcgtgatggtgtgtgcctgtagtcccagctactagggaggttgaggcagaagaattacttgaacctgggaggcagaggtggcagtgagccaagattgcaccactacactccagcctgggtgacagagtgagaccccatctcaaaaaataataataataattttttagaaaagaatttcttatgctttgttgcctcagagtaagagaaggagacaagtctgggatgtaggctacttattttgtgtgtgaataaattgaactcttccatctcctgtgcaggctggagatatggggtttccatcacactgtctggaagaacagccactggtcagatcaaagttgctttgtttggaaataagggaaacactcaccagtacagcatcttcaggtaatttcctattttaacactacgtctcatttgatgatatacacagccttcaaaccacacacttaatttgaacacttatcatctctttatatgtccactggtttttaattatagtcatgcaacatgtaacaacattttagttgatggaccacatacacaacagttgctttataagcttgtaataccatatttttactgtactttttctatgtttgggtgtttagatacacaaatacttaccattgtgttccagttgtctacagaactcaatacagtaacatgtagtacaggtttgtaacctaggagcaataggctgtaccatacagcctaggtatgtagtaggctgtgccatctacgtttgtgtgagtacatgctatgatgtccacacaatgattaaattacctaaggacacatttctcagaacatatctccattgttaagcaacgcaggactatataactttatgtactgatgttaattgcagacttctgctaataatttttcttttctgttataaacctaggcatttcgtcctttctctctcttttttttttttttttttttttttgagaaagagtctttgctctgtcacccaggctggagtgcagtggcacgatcttggctcattgcaacctccgcctcccgggttcaagaaattctcgtgcctcagcctcccaagtagctgagattacaggcatgtgccaccacacctggctgatttttgtatttttagtagagatggggggcgttttgccatgttggccaggctggtctcgaacttctgacctcaagtgatccacccatctcggcctctcaaagtgctgggattacagacgtgagccaccatgcccggcctctttctcttaatagatgtttttttaaacataaatctaatattacttcagatatgctgttttctgattagtgcaataacacatgcttattgtgccatactatgtggccaatttgttactgtacaaataattcttccaaaacatataaaatgatatgcaggaattctattttattttctattagaaagctttaaggaaaaattaacttgagttttaaaaaccatagtttgaggtgctagcatatagctggcttttccatttctccatcctttatttggaaattaattcggaaaaataatcctgttaatctagaatagaaaacagcagcctggcattgtatggtaattagaactcatttccgtgaacagggatgtttatgtttctctatttcaagggggattctcaaaccaggctcaacccattcctatgagtttgatgcaaagctggatgttggaacaattgagaaagtcaagtttctttggaataacaatgtgataaatccaaccctccccaaagtgggtgccaccaagatcactgtgcaaaagggagaagagaagacagtgtatgtatctttgctggctggtgcctaaaaatgtttgcagagattcatgttataatgaaaacccaccctagaaagttacgtgtagttaagcaagaaaagccaagaaaatttacccatctgtggccccttctccccaaacaagcaactgacaaacagcataaaatgtttctgttgggtgcaccttattgggtgttctcagcactgcctgtgggaatacagaagataaggctgcactttcaaggtaaaatgagaaaatacaagaaagagaacaagaaatcctttctgaagggtacaagtttataagtatgggctagtgaatagctatacttgaaagaggagaagaccaattacatttcaggataataaaacggaaaataaatcggttttaggaaaagatcgaaaattttacataggacaagaatgcactaggattgcaatacttgtgagatcctgacctgtggtctccctggctttgggcctgaataagcacagggccgtgggtaggaaaaagggacagctggaggaaagttggagtggtgacctgagagggcagagcgactgtctctcaaacctcagaccccaagtctggctagtagaacatgtggctttgtgggaaggagatcctgggctctcagccaccgatgttcttgaagtttggggttaggtggagtcaccgagttcaggtcccagagattgtcactcccccaggtggggagggtggggtggcagagtagaatgggggctgactccacatctgggtctcctcgaactggatgacttagtgaggttctccttatccccacgaggcaaggagaacaaagaggttggccctgccaggtggtgggtggaaccaggaggcctcataagctagagcatagtacagaggaggctgggccgggctggtcgggagccctgtgcaagctggaggtgcaaccaaatcctttcctccctgaccccatcagaggatactcagcctctaaattcagctccccaaggccccattagcaagcatcccatggcctggatcctgggactgtgtggttaaaaacatgtcaggtggtggcatcattggaatcttaaaaattagaggtgttcccaggagatgacttgctcacaggtaaggcatacaagtccaaatcagccagggcattgcatcttccaggttttctgaggaaaggctgaggctttctgaactttctgcaaatggaacagaacatacttaaggctgcacctgaggtcctgtgcccatcagctgtcacctgcattccagtggctgagtgcagctcccctcgctgtctgctccagaaagactctttcttaagagcagctggatataagacatcaggttttctaaacagaggaaagtcaaaacagcttcaaatctctcaaactagtttgggaagtaaaaacactgaattagttgaattactcaaacattttcctgttatgaaaatggccagtaacatttaataataataataataataataataatgaagaagctaaagaaaatcaagattttggtccaagctcttctcagaatcccctcatattttttagtaacctcattggggtttcaattcctactaaggaatctgccgactaggattccctccaatgacacagtatccaaagagaaaggcagccctccccctctttatttctccgtccccctctctttattaagtacctttggtaaatgtacccttgcaaatgactttattcagtacctattgtatggcctggcaaacagtaagggatgcaaacactgagcctacactcaaggagcttacagttcagctgttgagaaaaatcagacttatggttcacagggaaggtcaaaagaccaaataaagaactcccaggagaggctcataaagacagtgnnnnnnnnnnnnnnnnnnnntaataataataataataataataataataataataataatgaagaagctaaagaaaatcaagattttggtccaagctcttctcagaatcccctcatattttttagtaacctcattggggtttcaattcctactaaggaatctgccgactaggattccctccaatgacacagtatccaaagagaaaggcagccctccccctctttatttctccgtccccctctctttattaagtacctttggtaaatgtacccttgcaaatgactttattcagtacctattgtatggcctggcaaacagtaagggatgcaaacactgagcctacactcaaggagcttacagttcagctgttgagaaaaatcagacttatggttcacagggaaggtcaaaagaccaaataaagaactcccaggagaggctcagaaagacagtggccaaggaggaaagcagagggccgcggggaggctgtgatggaaggaagggcagctctcaggatgaggcagggagtaggagggaggaagggcacaggggcagggcaacaggtccaagtgcatgaggggcgacagggcccaagtgcagggaatatgatcggaggcctccgatgccaagttagggcttcttggcagaaaaaatgaaacacagaagagaaggtgggaaggggccaaggaacaccagtgaggaaatggggcaaagcttccgagctcacaggtggtgaggcctgagagaagtccgtggttcttgaacaaccacaaaaataactgcttacatctgcattgttttttgttaattgtaagactttttacatttaccatcatgggatgttacgttcttatcatggaattctcaacagtcgtgggagaatgactgagatggaatctcgctctgttgcccaggctagagtacagtggcatgatctcagctccactgcaacctccacctcctgggttcaagagattcttgtgcctcagcctcccaagtagctgggattacaggcatgcaccaccacgcccggctaatttttgtatttttagtagagacagggtctcaccatgttggccaggctggtctcaaactcccggcctcaagtgatccacctgcctcgacctcccaaaagtgtggggattacaggcatgagccaccacaccaggccttgccttgctcttttgatactgtgtcattggagggaatcctagtgggcaggttgtttagtaggaattaataccccaataaggttattaaaaaatatgaggggattctgagaaaagcttggaccaaaatcttgattttctttagcttcccagttactaactacatccttcctcagagtcctcagataactagccccgaagcactcaaatgtgggagggaaaggtcatgaggaactccagggaggaacgccaggtcccccgactccagagctggaagacaaggtcaaggaaggcttgatgtgtgatcctaccatggaaaatacagcctctggcatcagatggacctgtttttgcatctttgttattctgctgattaatggagcgccctttgtgcctcagtttcctctcctgtaatgtagaactaatcatcagaccccctcacacatgtgtggtgaggatgcagtttgcataagtgaattaagcagcataattggctgcagatgagaagggctcagggcgtgttggccgctgtccccttccgagagtgactggaagacagcatccctctgtaagccaggctgctgggcctatggaggccgccaggcgcctgtggggacaaggaggtgagagtccctgccttcggaggccaccgtcctgtgtgacactccagaaccatagcagaccttgtcctagagcctccaggcagcaagcgctgtaggcgctggttgcagctccagccctagtgccccctcgtgcctcctgaatcactcatcaactgtgacctgggcttaaccccttaagaaaaaccaaaccaaaccaaaccaaaccaaaacaaaacaaaacacctggcttttgctaaggtgacccaaactcttacaaagcttccttttctccccaggtacaacttctgtagcgaagacacagtgcgggaagacacgctgctcaccctcacgccctgctaagctcccggggcgacgaggctgctgcgttcacactaataaaatccactggtgcatctgtatgctctgggtctatctcctgccgcggccgcctcccggggatacatttgggaatggaacgtttgcaaatgtcccgagcacgtccccatacctgggtttctccccgttaactttgggtcacacggtttccctggctcctgtgcgtaggtcgactgtcttctccgtgcctgagctggtggcgatggactgaactccggagcctcagctcagggataccagcctttagccccgtccctcacttcacagggaggaaactgaggcccagaggagcaggtagctgttcaaactcactgagtgactcgctgtccccgtcaggtcggagggccgggccccggacccctatttcaaggaccctccctgactcaccgagaccaccccgagggatcgcggcaggcccgggaggaccagcctctctgaggaggtagatttgagggtgaggggacccctcgttggccctggctcttggggaggtgcgcagaggcgggcacaggtgcagggcgctcccgggcttccttcccgctcccctgggtcgaggcggcctcgcggccacctaagcacagagcggcgcggaggcggggcccagggcgggccctgctgaaacgggcttttccgtcagccaatcggctggggccccgaggagcctcctcccccccccacccgccagtctggcgtccccatgggcccaacccatagagacctgggaggagcgggcgttctttcaggaggcgtttctgccccgcggtgtcccaagtcaccactccccccagggagtctctctgtggttcaccaagccccgcatcctaccccggcagtcctggtgccaacttctttttctcttttttcttttttttttgagacggagtttcgctctgtcgcccaggctggagtgcagtggcgcgattctcggctccctccaagctccgcctcccgggtccacgccattctcctgcctcagcctcccgagtagctgggactacaggcgcccgccaccactcccggctaagtttttttgtatttttagtagagacggggtttcaccgcgttagctaggatggtctcgatctcttgacttcgtgatccgcatgcctcggcctcccaaagtgctgggattacaggcgtgagccaccgcgcccggccaccgacttctgtttctaacctgcgtggccacgtcaagctatcattgaacttaagacttgaatgcgagtgggcttcgattatccctccaaagcagggtcgtggcgaggatcaaaggagcgaccttaggaggggccttacaggacagggtgcaaggcgagtgctcggtaaaccgcggtgatgacgagggtgataaagacggcggcggccagggacacccaccccttgggtggtggcaccaagtgggagacagccaaaccctctggttctctgtcagtttcagcagcatccgcagtgagcccacaccccaggcaaagaactcaatcaatggaacgtagattcgccaaacatttatcaaataccagctctgtacccacccctgtgccaggcattggcaggagaggaaatcagaagacatgctgccctcaggcagtgcttggtgttagggaggctgcccctgaaaaagcactgtgatgctgcctactaggtacaaaaagcaaggtaggtcccaggccagggaatttcagaaggaaggagcaagacaagaaggctccacagagatggtggttacaggaccaggcttgaaggaagatgtcctaccaagaccgcagcctggcaggccagctaggaggaggcggcatctgccaatacccagaattgataaggaccatctgagggtagtgactggaaccaaggtataagggagggggtgtggctggttggccatgggtgagagccctactccctggtcaaggacagtctgtctcaccatgcttcccagactgacagctatgggtgtgatgacttgggaaaaacaattttaaaataggaaggaaactgagaagagagaaactggagagaggaagc

SEQ ID NO: 145 - DNA, 36974 bp, Human
ggcttggcccttactccctccatgacaatttcagacagatgagcaggagagtggcagggtgcaggactggaggacaaaagaccagaggagatggaggccctgcagacagcaggggagggaaggaggatgaggtggtgtagacagcggagtcagcaggacttggtctgtccaggggtgaggagagaggtggcccaagctttccaggctgagcatagagagaccacaggaattgaagccttgggcaggggggtgcccagaatgcacctgccttctgtttcagggctccatactcaaccaaggtgcccctcagccagaactggacacattgccagagaactccaggggtcatctggtcggctcagcctcccggtttccgacagacagtaagcccaccatgactccctccatcgggaaagggaccctcaagactttgatcagacctttggactgggggtccttcccttcactgtgtctcaagtaaggcactggtctagaggaaataaggtgaagtcagatgatagcaataccactaccagtgcagtggcacatgcctgcactcccagctactacggaggctaaggtgggaggatcacttgagcccaggagtttgagaccagcatttatttatttactaacagactaaataaataaaccaacaataccaccaaccagtaaatgagaacttccatgctaaacacttcatgagcttatctggaaattgcacctctcctgatagcaatgagattggtgtgggaattccatttactcataagaagacagcctcggccgggctcagtggctcacgcctgtaatcccagtactttgggaggcgaggtgggtggatcacgaggtcaagagttcaagaccagcctggccaaaatggtgaaaccccgtctctactaaaaataaaaataattagccaggggtgatagcgggcgcctgtaatcccagctactcgggaggctgaggcagagaactgcttgaatccgggaggcggaggttacagtgagccgagatcgtgccgctgcactccagcctgggcgacagagcgagactctgtctgagaaaaaaaaaaattaaagaaaaaaacgaaaacagcctcactggccaggaactcgcccaggatcgcggccgggccagtatacagttgagctggttcaaacccgaggtctatcatgtccttaatgtcctatcatgtcagtcagttagcctgcctttcatattttccacacttacaggtcaccatagactcacctgaactgtgagaagtagaggaaggcgtcccagaggaggtgattttaaagcccaggtttgagatgggtatgcatttccaggcaagagagcccggccggtgcaaaagcaaggcttggctcacaaacgggaatgtggggggtggagacagggaagggagaagtcaatccctgggcaagacctcctggagtctctctaacaaataaatactactttccatgcagtagacgctgttctaaacactttacaaatattaactcacttggtctttctacaaccctacgaggtggtactgttactatccctagtgcaccgaagtcacccagcggccgagtgagaactccagtccagctttccacccgctactccgcgcatcccagcttgccttacagccgggtaccggctccaccattttgctagagaaggccgcggaggctcagagaggtgcgcacacttgccctgagtcacacagcgaatgccctccgcggtcccaacgcagagagaacgagccgatcggcagcctgagcgaggcagtggttgggggggccccggccccggccactcccctcaccccctccccgcagagcgccgcccaggacaggctgggccccaggccccgccccgaggtcctgcccacacacccctgacacaccggcgtcgccagccaatggccggggtcctataaacgctacggtccgcgcgctctctggcaagaggcaagaggtagcaaccgcgagcgtgccggtcgctagtcgcgggtccccgagtgagcacgccagggagcaggagaccaaacgacgggggtcggagtcagagtcgcagtgggagtccccggaccggagcacgagcctgagcgggagagcgccgctcgcacgcccgtcgccacccgcgtacccggcgcagccagagccaccagcgcagcgctgccatggagcccagcagcaaggtgagtcgcgcgcccgcgggccctcccgccaggaacaaaggcgcagactcctgcccgccttacgccggccagggcctcccccgccgccccgctgcgctgtgcgcccggggcgggccgcgcgcctctccgagcctggctcggtgcgggtcccgagcgcagcgccccgccgggccgctggccgcagtggggatgggcttcggatctagcgggccggagggcgccgcgtgcgtagttggcgccggcactgagcacatggcctccttccgggggcgccgcgccgtccacgcggccctgctggggctggggacacagggcccgggagcggcacgtcgcacacgacctcggcagcggcagcccagcctcggcccctcccggtgcgggggagggggcccgagcgcggcgcccattggctgagcgggccgagcccccggcccggccccggccccggcgcgcggaggagtcaggagccgcccccgctctccgtctgctcccctagcccggacgcccctgtaggtgggcggcctggtgcgaggtgtcccaccggcctcccctactcctcccgccagtcccccgcggtgacgaggccgaggccgaggggagggcacttttctccaggcccgggctcgaacgcgggggttgagatgaacctccggtctcggaggctctcctttgcgaggagtgcaggccccaaagctttggcccagtctcgcggagatgtgttccgcggaggcaggtttaccctcggggccaggcggggagcgcaaccggaggggcgggggatctgggggccaggaaagagccccaggctgaagtctagcgggaagcgcgcacgccacggggttggggaatgagggatggggactctggggaccaacaactccctagataggatttctttttttctgtgtaagtgggcttgtcctgcagggcatctttgtagcgtccgcagagcgatttcttttcaacaaattgtttgtggagcccctcctgtgtgtagggcattgtttctttccacctcctttcctccccctagtctacaatattttcaagtcccctttttcttttgaaacggtccctctttatctattatactttgatttttccatctcgtcagctgggagggcacctggatggcccttgttttcttagctgggacgcgggggtagcactgaattttgaactgcccttcctactggctgtggaggtgtcccgctgagactgagcggggtggcgctgggccgcaccctcggcaggaaaaggccttccgccccacacctgttgaatccataaatccagacgacttggttcacccttcctgggccctcgcttgaggtgagaccccggggaagttcccggggaaggctcccaggatcttaggtgagccgtaagggtgggatataactaaacaaaagttcagtgagaagctcttctagctagtggcaaggaagtccaaatatctcagggctcttgcaggccacttaacttctgggcctcagtttttccatctgaaagagatcacttttgtcacttcctctagggaaggaactatctattcagcatactatgccagacatgggtatttatttgttgagtggataagggaatactacgtggagacagaaaagtggaggagaaaatcagcaggttcttagccaaactactttaagcgtcacggaccttatagccctgctggttactcactagcctggagctcagagaagggaaataagtttgccaaagtcacacagctagtaagtggttgaactggatttgaacccaggcccatcagatttaatttcatttctgtctccactgtctctcttcaccacaacatttcttgaattttgggcagaagggagagagtttgcctatcttcaaaggtggccccttgtgccagctggttctaaatagtgtagcaggtgggtgctcttcatggagtgttctccaagttttccactgtctacctcgtcagtaattaatgttggaacacctctttcacagtggtgtatctgtatttttatttttttatttttatttatttattttttgagacggagtttcgcttttgttgcccaggctggagtgcaatggcgcgatctcaactccctgcaacctctgcctcccgggttcaagcgtttcttctgcctcagcctcccgagtagctggaattacaggcatgtgccaccacacccagctaatgttttttttttttttttttttttttttgtagttttagtagagacggggtttctccatgttggtcaggctggtctcgaactcccgacctcagatgatctgcccgcctcggcctcccaaagtgctgggattacaggcctgggattacaggcgtgagccaccacgcccggctgtatttttaaattcatgcacatgcagtttgatactaacagatgatatgccttcataaaatagaaatttcaaaagacagatagatacaagacagcagttatagtcattttcccctccaaatcttgtgtagatcattccatatacattctggaataaagcccttccctttggagactgctgatttgacctgcaagcacagcctttttgtgcatgatgttagaggcctggggaggtcatatcgcttgcctttcacacaagatctgaaaaccaggtgtgtctggctccaaagccttggttctgctatgttcctctttgtctcctaggaaatgggaactgacttaactaacttccccgtgttccattgtgctcctctgtaactcacagtaatgagcttagctgaataggaagtaggggacagatggaatcaccttgcctacaagccaggggttcgcccacgatctctcctgggcagcacgcaagggtgagccctgccccagatgtctcaccccacccttcgtgaagaacttgtaactagccttgcctatgcccatcactcatcacttttctggccagtctctaccttccagaaaaggaaaaatcagaaatctgcaggctttctcagcccctttgtggtgcagacagcatagttttttgttttttgtctttttttgagacgaggtctcactctgtcacccaggcaagtatcttggcttactgcaacctctacctcccaggctcaagcgattctgtcacctcagcctcttgagtagctggaaccacagacatgcgtcaccgtgcccagctaaatttttgtatttttggtagagacagggtttcgccatgttgcccaggctggtctcgaactcttgagctcaggtgatccgcccacttcagcctcccaaagtgttgggattacaggcgtgagctaccgcacccggccaaacatagatgtttgcatatgtggttttgaatcccagcttagcttagttgcccagttttcatcattacagtgtctaggaattcagaaaagaatgtacgtctctgtccccatagatgctccataaatatttcttgcttccttggactcccatgatgccttacctgggctgtgggtgacttgtacctgggccttggcctttatccaaaagctggcattctggcagtatgagcttttggggagtcaggatgctggcccatgggtattaagtcaggtaaatcattaaagctcccactaacccattcttcctagtaggggcttgttgggaagtgagtaggcatggcacatgggtgagagtgccaggccagggagggtcagctcatgtgagtgccctgcgctgctttgggcttctttgctttgcttttttgccttaggcttcctgcctacctttctgaatttgggtcacccttgggatagtttgaaagggacattcatgtccattaactccaagggtcctcacaactgccctgtgatacaagttacagtgacctcatggtccaataaaaaatgactttgccaagatcacacactgagcctcccaccccaagacatgctgccagcctttccaggatgacattagagggtggaaggaacccagagcaggaggggccttccagccatggcccagccctccatttgacaaatggggaaattgagtccagagaagggaagagatttgtccgagataaggctatcacaaaagatttgaggcgttctatggagctgtgttttgttttgatttttgagacggagtttcgctcttgttgcccaggctggagtgccatgacacaatctcagctcaccacaaccttcgcctcccaggttctagtggttctcctgcctcagcctcccgagtagctgggattacaggcatgtgccaccatgcccggctaatttttttgtatttttttttagtagagatggggtttcttcatgttggtcaagctggtctcgaactccagacctcaggtgatccgcccacctcggcctcccaaagtgctgggattacaggtgtgagccaccgcgcctggcctagctgtgtttttttttaaagatgctttcttctccacatgcctgtctgtgccatcctccacccaccccaaatgagcaggaatccccagacacaggacttgccatgccataggagcctgaaagttggattagacgtaacttgacaactgaaactctactgtgaatggaaacaaaacactagatgttcccactaaactctgaccttgaagaagtggctttccttggagccttggtttccttctcagtaaatagagacttggctacccccagtggatgtggtgagactggccccgtgccctaaattagagaagtggctattttaagtggaaagaccctttgtaaggccagtctgggtgtacaaatgatgtaaacagccccaagatgatccttgtctagtaccgagccatccagggattcgaccctatttgccccggagctgggccagcctcaaatcccccgtaatcagcttgtgacttcaaggagctcagctttgcccagtgcctcctggtcacggggtgtcggcccagagctctgctcaagtaccaagggtacagccatccagctccctgcttccccaagactggcaaagctggggaggcctggaacaaagaggaaagtgtgcagtgttggcttggggcctgcaacctcaccccttcccccacctcactcctgggcataaaggtgataaagccgctcactcagtctgcagtctggtaaccgacgtccccatgatggcggaggctgggaggcctcctgaccagattcatgggctcagagaggctgtgtccaggcctgcaggcccagccctggctaccctaacaagcctccaattgttacctctctccacgggaggggtggactggagcctgaggctctgtcttccagccaccaggcctggcagtagctgatgcataaacattagggttttgcagtaactgagcagggctcccaggccttgaacctgggcagaaagaagacagcatctcctctctttgtgaccacactgacttgcctccctgaggcttctgcaccctggaatgggagagagctcttgccaggcctcagctgatggagcctttggctactgaggcctctgctggacaggaagtctgcctatgtctcctagcccagtttatctccccctgccctggcatttgggagtggggaggaaacggctccatcagaaacagctctaccattggaccttaggccagccacacttcttgttggagcttgtgtcctcagctgtactggggatgagagctagctgtctgggtcagcggcactgaggctccaggggagcatgtggtctgtgcagcaggcttggggagtgctgagcagcacagattgggtttcatagcacagtgggagcccagacaggccagctagccataagcacctctgctggaggaagaggtggactctcttgggctggagggcccagttcaaggaaagaaacaaacagctacactgggctccttgatcacccagctgtggcagttcttcttgaggacttcctgcccctaggtgggggctgccttcagctccctgctgcgtgtgataacttgggtgtggccctcacagctgtgcagaagctattcccagagggttctggccccaggtaaacagattctgctctgggctcgccttgcctccatcccacagccctgtgtgctgtctgtggcacagcctagagcagcactgcctcgtggccctggcccttatgcggctggagctgatcctgaagtccagtgtcccagcggtcatggctggcatcatcaccatctacaacctggtgatggaagtccttatccccaactcgctgatcgactgcatcagcctctacgggaatctcctccagccaagcgctaggctgagtgtaggcctgagtggcccggcagccagctatgtcatcagcactgtgggggacacagtgctgcctagaagcccgggctatttgtgggcttgatcctgatcctcattttcactgcatggtctcattctctccacaaagtagcctttgagcccaccagccacagaatgtgatataaagatcacccctgcttattccagaatgaacagcctgagacacatatcccttcagtagttggtcttgtgaatgcagtgtcctagtgcaaatgcccatcatctgttgaccccatccttgcccctgcctgccccatgctgtggatatctgggccccctcatcacccatcctggccccctgaccagtgaggatgccccctcccatctagggtactctgcgtctaaggatgaattccagtgtaattttctctcttctgtaggtttatttatggaagattggacctgttcatacatctgtggggcagccctccatctcccagctatataaagtctctaaccacagtgttgcattgtggggttaccatgtggtctgacacttccttgcatgaactaccctcactccagccctggacagtccagggcctagcaggcagtgtgtggggcctaccaggtcctggcatccaagctgtgtccaataaagttcttagatgtgactggaaaaaaaattggattaaaaaaaagcttcagaagttacagagccaactacagagaagcataataaatgaaagagtgtcttctagttttgacagtttggtgtttaccctaaagacttctctttgtgcatgtgtagatacatgcctataaatagaatatttgtgtagttggatcccactttctgcatagttctttgcaacccattctgttcaccaacccaacccttagaggtaaatactggcagtgtttctctctgcacatacaaccaagtgccactatacaagttcactaactccctgttccttacacaatatgtacatcctattgctttttttcccccctgaacaatctaccctggtactcttcataacacatacatgttatgtgaaacacagatgtgtttcattctttccaatagctgcataatacttcattacaggcatgtcccaccatgattaagaaatagcagccccatcaccttcttcataccactcaccacctgatgtattacatgtatttattttctgccccagccttcaactaacctatcaagttccataggcagggatttggtatagttttatcgctgaatttccattgactagaagagtgttgggagcatgcattcaggcataatctttccttagcaatatcatttattcatagaagatcctctcttatggagaattaactgaagcttagaggaagagacttttttttgagacggagtttcactcttgttgcccaagctggagtgcaatggcgcgatctcggctcactgcaacctctgcctcccgggttcaagtgattctcctgcctcagcctcccgagtagttgggattacaggcgcgcgccccccacgcccagctaatttttcgtatttttagtagagacggggtttcaccatgttggtcaggctggtcttgaactcctgacctcaggtgatccgcccacctcagcctcccaaagtgctggaattacaggcgtgagccaccatgcccagccaggaaaggacttttttaaggtcacacaagtggaggagctgggacttaaatgtgtctgctgagagtgacagtgaactttgcatgtgcccaatcttaccaaattaatgttctcttagttgaattattgcccatctcaccaccaaatgtgtatcttctcaggggtgtcagtttccccagggtccagatcctggccccacacccacacatggccaaggagccatttacatttaacattccataataggatgcataccttttcggttatttagggaggatgtggttttgcctggaaggctttgagaatgctgggcagctagctcaggggacgtggggcttaaagcagaggccgatcaacttttttctaaagggccagatagagcgtaaatattgtcagctttgttggacatgtagttctcggcctgccactcagctttgctgttgcagtacaaaagcagctgtagacaaatgagtgtggctgtgttccaataaaactttattcatggtcactgaaatgtgaatttaatataattcttacatatcacaaaatattagtcattgtcttttttttctccccagctacttaaaaatgtaaaactcattcttagctgccatagtttgccaactttggcttatagcaaatgcagcaaagtggcccaaaggtttctgagcctgtgcccgggctgtctcagctcagagtgggcaaggctcagagagttgcttttatggaatttgacctacatagaaagcaccaggtagaaaccttgtttccttcagggaccagtacccggaaacaagggggaggacctaagcaggaaagccatagaatttggcatcagagacccccaattggaaacttccctgaagcctagagtcccctggttctgcgcttttccctctctctcatttctcatctgtgaaaagggagtaatcgctccccaaaagcttgttcatggtggttaatcagaatgtgtgagcagcctctggcagggtgcctcagctcgctgctgctgctgctgctaaatgcaccagccccctcctctcagttctactttgaagactggcgagtgccttctgactcgagggcaaccaggggtgtctggaggttcagtcatgcaagggtcttgatatcattggaaggcttaaaggaagtggcttcaggagcacttaatgcttgaggtcaccctaaggtcaggttttggactgttagtccatcactcttcttttttaaaaggcttggcaggatggaaccggtcagagggtagaatgccaggctaggaaaccaaacaactctagtcccaaccctggcttttgtttgtatgctaggctgggcacctgccctctgacctcaggtgcctcctgtcaagtgccgatgttacagcagtctgcaatttcttgagcttctttctttcttattgcagccaaagctgtcttatttttttttcttttgagagtgtctcactctgtcgcccagactggaatgcagtcgtgcaatatctgctcactacaacctccgcctcccaggttaaagtgattctattctcctgcctcagcctcccaagtagctgggattataggcatgtgccaccacaccccactaatttttgtactttttttttttttttttgagacagagtcttgctctgtcgcccaggctggagtgcagtggcgcgatctcagctcactgcaagctctgcctcctgggttcaagccattctcctgcctcagcctcccgagtagctgggactacaggcatgcgccaccatgccgggctaattttttttttgtatttttagtagaaacggggtttcaccgtgttagccaggatggtctcgatctcctgacctcgtgatctgcccgccttgcctcccaaagtgctgggattacaggggtgagccaccgtgcccggctccaacttttctatttttagtagagacagggttttgctgtgttggccaagctggtctggaactcctggccttaaccaatccgcccgcctcggcctaccagagtgctgggattataggtgtaagccaccgcgcccagccttgaggttctttcttttaatgcccagaagttcatttaaatgagtaagaaacacaacaaaacaaattaaaagggagctgtcatggattcaggtaaacccctcccccactcctttgagccgtggactaagcagttggaaagccctgcgtcccctgcttccctgcacctggggaacccatgtgggatgctgtgggaagaggacaagatggagcaacatctggagtctgccagccctgggaccctcctcttgccaggaataccctgcctctgagtagcagtagccacgtgcccttcctgtgccaatatagattgagaacctgctgcaggccaaccctggggctggagcgcaatgctgacacactgacatgggtcaaaaggccacagtgtttggcaagttatacaatgtggccagggccatctggcatccgagcgttgggggagaggtcctgaatcttaacacctcatccatggcttcctgggagagggagggctcttgtgggtcgtgagacccccagcggtgggatagggagggtgaggggtggggacatgagaaatgcttctctgtgctggaccctgagcccagttgctggccaagctgggaggccatgactctcctaggagagtcaggatttgaactcagtctgcctgacttcagaggtccttcctcgacagccctgtgggcttggagtggagggttttgtggggtgctgtatttacctctcagagctctgatgttccagcactcgtcaggggtttgataaatggctaaggatgaacactggtctggcacaacagatactcacagagccagctttgcccaaaagccaaattgaaaagtggcaggtttctttgtttggcaattagcatgtgctgttccctactctcgtcactctggctgcagacacggtatgacccaggttccattccttttttttatctcactctgttgccgaggctggagtgaagtggcatgatcttggctcactgcaacttctacctcgcaggctcaggtgatacagatgtgtgccaccatatccagctgtttttttttttttttttttttgtaattttagtagagacctggtttcaccatattgcccaggcaggtcttgaactcctgagctcaaatgatccgcccaccttggcctcccaaagttctgggatcaccgcgtcctgcccctggttctattcttaaggagttcccaaactgagtggcagatgggtaataagctagagactgcagaggacatagcaagagcaaaggcctggaagagaatggaatgttctagaaagtagtctcatccccagggagtgctgatgggctgctggggatcccagactctgggctgtacattgctccccaccagtaaaaaaggctcccacaagaaaatcacaagctctatggggctagtacccttctctaagtcatcaccaactgttcatcagcttgacaccagaataaataaatacacgttgagtgaatggacttcattgccatgttccagttccagccactggctggtgggggcagatggtgctgaggctgcccgatcgagggtagcttgctattcttcgccgatccagcaaacacttgtggagggaattctgccaggcttcatgatggatactgatagaaaacgtaacagcaaccctttaaggaaggaactttcatccccgttttctaggtgaggaaaccaaggcccagagcagggctgccttgtatccaactccaaggtgaaaggaggcagcttgctgcatttaaacgtgggtctgcttccaagcccagcaatgatcaagccggctatagtgggcgcagcagagtggcagcatgaatctgagattggtcgcagtgtcttgtgcctactgaggagcaggggccatgtccctccccctacacctagcactgagccacactgagcacgctgtttcttaatctgactggtccccatttcttctccctgcacatactgttctgtccacctggaatgtagccttgccactgctttcccacttggcagactctctgtgtgtccttcacagcccagctccaatgtcacctcctgggaactcatctttttttgtacccaggcaaaactggaaatctttccctccagggttctcacagtgcctcataccagccccctgttgaagcccagaccacactagcctctcatcttcatctgcctccccactgcccccaccccactgtactggaaactccttccttggtgtcaggactgggtccagtttcatccggggccccagctctacttagcatgagacctagagcatgggtcactggtattttagtcagtcctagtgcagcagctgcctgggtggatgtggatatgacccagggagtgggtaggcaggttttctaaagtcgagtttgacctcgacctgctgatgacaaggtccagcggaggggtatgtccttggcctccagcagcccccattgacagaggctacagtcgagcagctgctcagtggggccccagggatgacttcagaggctccagacccctggaacatcagatgcagacctcagtaaaacagggcctgtgataatagcacttacctcacatagccagtgtcattcactcatgctctaccaacataatttttgccagatccatggatcatttgtattattttccacttaatgtttttatttaaattgctttgttctaagtaatatgaaatcacagggcttgtaaaaattattttgaataggtgattccattcacaccattcagaattcaaaaaagtgccaaaggctataaaatgaaatctccctttcaccctgtccccagtcacccaggcccccccggggttagaatgttacctttcttgtacattcttgttttttgttttttgtttttttttttttttgagacagagtctgctctgtcgcccaggctggagtgcagtggcgccatctcggctcacttcatctcccagataaagtgattcttgtccctcagcctcccaagtagttgggactacaggcacgcaccaccatgcccagctaatttttgtatttttagtagagacagggttttgccatgttggccaggctggtctcgaactcctggcctcaagctgagattatagatgtgagccaccgtgcctagcctcttgtgcattcttttaaatagatgtgtatattctccccctacccccagccaatttttttttttaacccaaaaggtagcatacaatatacacactgctctgtttttggtttcgcttttgttttttgggacagagtctcactctgtcacccaggctggagtgccatggggtgatcacagctcactgcggcctcgaactcccaggttatgtattccattatatcactatgccacgttttcttaaatgatagattgatgtcactgcattgcttgttttttaatctattctaatgtgttccagaaaaatacagtatatactttgcatcccatgagcaaatgcaggtaataccgcaggcagaaagcccagcacgtggcgggcctagcagtcgctgtttagtgagccctcctggtgatgcttagtgccttgccacagcctctgaattagtgtccaccctatgaattaggcttgacctggtgtgtcgctggggtcccccagaaatttgtcagctgctcactacccactcggaacaacagctctgggcctgaaggctccccagagaattgagagaagggagattctgggggcagtgccaggacatacggggggtgggggctgtctttctagttgggcaatgcagaggatttagagggaatggagtccctgtggtatgagggaagccccagcatgtggaataaatgtccagaggcaggctaaggggtcaggtagacagactaatgggaaggaaggatgcagcgcacacacagagggggctctgagctgcacactcctcctgggccgaagccttcttcctctttcgcagcctctgatgtgagagccttggcttttgcagtcgttgccctgactgacgctttcagagaatgaaaagaccatactgggaatatgcctggtaacagctatgcccagggctatctgtgatgatcttgaagtaaaggctgcttctgggttctgtggaaaccaaggcccagagacccacagccaggccatggccagctccacccacttccagggcccagcttggtatagtgtgcgtagtgaatgccagtcgtttctttggcatgcctcccgcagccctgttctcccacaatcagttaaaggcctgcctaatgtcacatttcctgacttcctcatttttatagctgaaaagagcacttttcttcagcagggctgacaccctgctggcctctcagtcacctgtggctaagcagggctcttcacctgctggcctctgcccttcctgctgccttaggtcctcggcttccaatggacagaagcaaactgctctttttctctcccatccctttgcccattggaaacaccttagccccacactcttactcaccttgtgcacttttccaaagtgcattcccgcctagcatgtcgtctatgtccatataaccttgggaggcttatggtttggggattattgccgtgaggagcactgggtaaggagtccggagccctgagctctgctgcaggctcctgagtgatctggaacttgcctcaccctctcagggctcagtttcctgccctgtgaacagcaggaagggtagggcaaggtgggatcacatctccaatgtgacaaacgaagctgttgccattttgctgacaagcaaatggaggataggggagaggtggtacatgggggacttagcctgctggaattcacagagcaaacaggcagatgggctggaatcagaagccagcggcttcagctccaaatccagggtgcttctcctatctatatctgtgctattcctaccaagtaatttgggccccctcgcataggagggctggttcctgggcctcccagtcagagagtctagaaccaccagaccctaggcatggctccaccagggaaatgagacccccaagaatccaaagcctctccctctctgagacctggctacagagagagaagatcatacttcccctctctccccaggaaatggcccggccagcccagtatcttgaagtcagctaggctggtttgggcacctaaggtcaggaattggccaagtttcctgggagaaagactggtgtggtgccaagagtcaggcaagatatctgaacacagaaacttgccagtccaggccctgccctgtagtaacctgctcccagacacgcctataacagtgtggtttgtttctccgcagaagctgacgggtcgcctcatgctggccgtgggaggagcagtgcttggctccctgcagtttggctacaacactggagtcatcaatgccccccagaaggtgagtactgtgccatcgttggcttatggacaccagcctgctctgttgcacatcacacatgcccacagtctcacgccaccacctgaattagagtcatttatatgaacgcactgtactgtctgcctctccagccagttttctggccctgatcatgtcagagactcttctcttgctttggaatcagggtggcagaattctagaatctcaggtcccacagaatcctggggtcttgtataggccctcttgaccaaccccccacccaactcagtcatttaataatatgtttgatgatataataaactcaaagcaaagctcaatacaataatgctgcatttccgtggcattctggggctgcagagggttttcatgggcttgtctcacttgatgctcactgcagcactgtcaggaggcagcaggcaccactcccagcctgcaggtgtgggaaacggccagagagaggaaacccgcccaatatcacccagctaagtcagagacagagctggtatccaacacctgcctgccaggtggtccttgagcctgcactcatacccatccacaggcagcacacttcctttatttgtaggttgaaaccgcgtcctctccctgaaggccctgtggcagtcaaagcagaaatggcgtcttgccctagggagccacagggggtgaaggtctgtgctggcttcctcctccctgccgtgcatcctagatctgtcctcacttgtttacttgaatgtcaggatgggaagggacctagaccatctcctccagcccagcctacttgcattaaggaggagagaagaggaaaagggggtagggggtaggaggcagggacaggaaaggaaactgagcccttcctctgtaccaggcattttgcttgtgtttatgagattgggtggtgatttccattttgtagacccggaaactgaggcccaggcagatgaaatggccgacaggcccaaggtcacaaagctattgaatgctggagtcagaagccaagctctgttgtttccatggcctcaggttgtcttcctaaccagctgccttgcccgtttaaaaatctgtaccttcccagagaggaccaaatgagagtgggcagtcctcacgtcaggaccacatttcttgtccagacggatggggctagaaagtgagtgcagtgactcccaaagatcagggtcctgtttgggggaaccaggtagtgtctagagttagctgggcttcttccaaataggcagacagtggctatggggccacgcccgatgctgaggagcaagtcaccaggaaggcttggcctgctgagtcatgctcagctgcaggggaggtgacaggacttttccaagtttgctgggcatggagaccgtgggcccatgcttggaccagccccaagccctgcatttgctaagtgctcttgacagctcttgccaaagtgtgtgcttcagaactggctccctttgggaatccttacagatggaaagtctgtaagacaggctgggaggaaacagagggaggttgagctctccacttggttgcacattggggtttccagaacgcccccagattctgatttaattggtctgggatgctgtttgggcattcaattaaaagcttcccaaccaattcgaatgtgcagccaaggttgacagctactggatttaatgatgtcttgactgtgatctcatagtgagttaatgacagaactaggactctaaggccaggacagaggaggtgttttccagaaacagaacagggttggggtgagcagggggccttcaaagcaaaatgcccagaagacagaaagcctggcattcagtaaagcgtgagtagtttagtgtgtcactagagtgaacaggaggaggggaaaggttggggaggtcaacaaggtaaggtaggcaagagccagaccacaaagggccttgtgagtatggcacggcacagtcagaaggggcggatgggcaccagcacgggggcccagctagggagcatggacttcaggatgaggacaatagggacccactgcccagggcagacgtgatcagacttgcattgtagggaaatgactcaggcgtctggtatggaggggcggacttaagaatgtgagactagagacgggaaaccatcaagaaagttgccgttggactagtgacataaaagcaaaccctcagaggaagaatggacaggatttggtcatcaattccgtgcgagggcaacagagaagggtttaaaaatggtttctaggtttctggcatgggtgatgtgtggtttgaagaaggagcaggtgtgccaggagctgagaggtggccgtgggatgtgcaggaatggaggcgtggggtgacacagctggagatgtgcaggaggcacctgtatgtatgggtctgtttcttagacccaggctggagaaaagttgagaattagtcactggtatccacacagtggagaaagatcttctagggagactgtggaataaaaagagaaatgaagattaaggccgggcatgtggctcacgctgtaatcccagcactttgggaggctgaggtgggtggatcacttgagcccaggagttcaagaccagcctgagcaacacatcaagacctcatctcaattttataattaaataaataaaaattaaaagtaaaagatcaaggccccagagaacaacccattgctagaaaaagaccctaagtagaagaacaagagctggtatctctaaaaccaggagaggataccctcccaagacagagggataatgtaagccatcgaagggccagggtatttgtctggtttgtccacggccgtgtccttagtgcctagaacggtgcctgtcatagtaatagacactggtggatagtgagtggaggaaggccatcgggtaccccaggggttgaactgggcaagcctctccacattgctgaatgcagaagaggcgatggtggccttgtggccactcgggctgactgggtggcacagcgtggatagaagcctcactacgattgggtgaagagtgagaggcagatgagaaagggtggagacggctcttccaaaagagttggtgggagagggagaaaagaggaggtttggaatgatggtatggctaggaatttatttatttattttaatgaaggttatttttaaacatgttggaaggaatcagcaggagagggtgaagataaggaagtgagggcggaggtcttccaggagggagggtggtgtcggagcagaagggaggggctgcctttggccaggagggactgagatacctttttttttttttttttttgagacggagtcttgctctgctgcccaggccagagtacagtggcatgatcttggctcactgcaacctccgcttcctgggttcaagtggttctcgtgcctcagctttccaagtagctgggctactggtacaggtgtgtaccaccacgcccagctaatttttgtgtttttagtagagatggggtttcaccaggttggtgaggctggtctcaaactcctgacctcaggcgatccacctgccttggcctcccaaagtgctgggattacaggtatgagccaccatgcccagccagggactgagagacttctgaagatgtagacaaatctgagatgaacttctgtgatccccggggcctcccatctaatcagaaataggcaagaggttataactgtcatggaatatgggcagaacctctgaccagggcatcacggggctggtcagcagcacagagggcccagatgagcctgtaaactgcattcataggaccatgtatggtcacctgtccaaaggtcacttcaggaaccagccccagcagaccgaagctggagatgtgagtggccagaactgagaacgctgaaatctagcggtgtttcttgggcaagcacccagacacttggtctgttgacttttgtactttacaaacacttctcacaaggctggctgtagtttttccaaccaggagccagattagaagtgatacatgtaacatgtgaagagaggacagaaggacccaagaagaagaaatgaaagtgaggctcagagcccatgtgtagtaacagggcagagagactcctgtgcccgcgtaggctgaaggcctgccctagggcgacacagagattccatctggccaaccctttcattcagccaggacttcctgagcatccacgctgtgccagatgcggtcctagacagtaaggagagagaagtatagctgtgaacacagcaggcacatgctggccctcagggagctgcctgagacacagtctgagccaggccctgtctccacagcagtgggagagaccccttggagaaagccagagtgtcactaacagagggcttcaaggtgctgtgagagcaaacggggcaactaatgctggggctggggtgacaggggagattaaaaaaagggcttcacgaaggacttggcagccatgctcgaccttgaagggttagttgacctcatagggcaggaggggcaggtgtctgggcagtgagaggggcttctgcagaggtgcaggggtgtgaaatgttctgctgatgcggaattgctaactgcctgcagtgggcacactgacttcccttgtctgtttagaagaacctctcttaggaaacagcattgggttggccacagtttgcctactcttgagaagagactttgccccacaagtggtgaggatgccagaagcttgttctcttccataaaacaggccccaaagggcttcctcctggaagtggttaattaatcatactaccttatatgtttacaaagcaccaccccataaattaccacctcacagcaactctacaaggcaggcggggctgacatcttcccctcttctaaatgagggaactgaagccagatgaggtatctggagagtgagaggctgagctagaggtgggctccaggccttgtgcctccccagctctgcacactgcccctgccctgctgtgagtgtgacaggacattcctgccatgcatcccctcctggaggaggaggacagagcagaagaggtgagcccagccacagagggagcagctaaatgaaccagggaatcctgaccatcatactgggctcatccgagcactgcctttcccctccccaaatgactgagctgccagtagagatgactgacggccactgagaaaccatgaagtcctggcccaagggacagtgtcaggcatgtctgagaataaggcatcctcagaatccagagtttgggccagaaaggcctcaattgtttgacaaacaacactccttgtttgacaaaggaggaacctggtctgcagaggaggtgaggtctgcccaggatgacccagcttggtgagtgaaagagctggaggcaacacccgcctcccaacccaagccctgtgtcccgtcaggctgaactgggcttcgtgctctaggcagcctctccttctctctcctatatccaaagagttctagtcctctctccccttcacccgtcaccactaccataaacccttactgcttacttatagcttgcccaggcattgttatacatactctagaaatagtaattcagttgttcttcaaaataaccccattaggcagacaccataattttccctgctctataagaaactggggcacaggaatgttaagcaattaaagcaaggacacacagctagtaagtggcaaggctgcaatgtaactccggggagtctggccctagtctgtgcccttgaccattgtggaagatggacacagtcccagatgggcacctaaacaccctttcactcacctacaactgccacctagctggcagtgtgtggtctcactttggagctgagtcaagctcagtcatgtaccaacatctcaggtttcccacacacagttgcacaatctcttacaccatcacaccctgtcatatcacatcacccctcaagcccttcagttagattcatggcttgttggtcatttagtgtcaactctgcacctccaccaccgtgctgggcaccagcaacatggatgcatcagacagaccatctccgtgctgaggtttactgtacagggagcacacggtaccttacagttagtcttctaaaggcgatgatggaaatgcgagcaagcacagtgggagcagggaaggaagagggagagggtgcttcgcccttagagcagggtttctcagcttggcactgtgatgtttctgctggtgttgtagaggcctgtcccgtgcattggaggatgtttatcagcatccttggcttctgccctctagataccagtagccagtgtggcaaccaaaaatgtctctgggcattggcagatgtcctatggggtaccaaagccgtctctgtttgagaaccagttgcagtggagtgggaggggtggttctcgggaggaaggctttccagaggagtatctgtgcatgttctgaaaggtgattaggcccaagcaaaggtgtgaggtgtctaggtcgtatgagggagtcactgcgtgtgccttgtgagtcatagttggggtagaggagacactttattgcaagagctgagaagggcttcgggtgtggccacggcagtgggatgattcctctgtctaccgggaggcctggcctggcctggccttggtttggaggctagccatgtcagggctgttccagggaagcagcctgggtggtccagccctctgcaggggggttggggcccagctctagccccaacctgggcctcttcccccaggccccaaagtgaggccccaggggacccagtgggcagggttatctgtccagccccacctggaacatctggctccaatctcccagctcaccctggggtgtggctgagagttgctgtggagatgaaggccctgggctgagagcttgtgggaagggcagtgtggggccagccccaactggaagacaggggcaggcaaggaacaggggtgaaggccaggctgagaggctaagccggagaagctggccctttcctccttgtaactggcgctgaaagcttggctggcagtttagccccttcttccccacaatagcatcccgtagagcacagggagagttgagaccgagcctaaacctggcccagggatccctgctggggatgacctaactgacctagtcctcctggggtaaaggaatgtctagagggaaggatggtgagaccagccagaggttccaaaacgcatacccctcctggcagtggtctagaatcctagatcaagggttggcaggagggccacatccagccagcagcctgtttttgtgcaacccatgagctaacaatggtttttacatttttacaaggttgagaaaaaaagaacaatgagtgacagaggccatatgtggctcacagaccctacctaatggattctagctagccttttacataaaatgtttaccccagtccggctctggagcactttgacttgcatgctccctacttacagggaactcaccacctgtaaggtgggcagcctcataccctgaagtctagaaagctcttccttcccctgagctggagtctggccctggcacctctgccctctggggctacagagtgctgggttcctctgccaggagcagccgagcagggtctggagactagctttattccctgaggcaggcccgtagttccttcaggttcctccttactcttacattcttagggtaatgatttctggcaatttcaaaatggaaaaccttgtccctaaggctcctccgaaagtggtgacttcttttcttgagagagcaacagtgacagcagtaacagcttacccatgtgccaggcagtgttcgccgcctcatgcccctctacaaaggggaagtgagaagttccttggcagatgggcagacatgtagtctcacccacagttgcctcgactggcgggaggtggtgtggggattcccaggtgtccttaggcttgggcaggcctccccctcaccccaggagagccaccgggtgaggaatagcttcgcgtaccagaagccatccggttcaaaggatctcagctgcccagagtcaacctgcttctccagggtggtctccatggtgggtgtcctctaggctcagtgaggcacctggacagagatctgtagtagcccctcagctctaggctggccgacaccatggcagtccccccaggaactaaccagaaccgctcctccctcctcaacacgcttgccgccacccagactccacagctgggtgaagagactgggctgggaagggagcagagaagcgggtggatggccgagcctggcacatttggtgtgcaggactccgactgcattctgaggggtggttcactgtgggaaatggggtctgactttggtggataggaagagtcgggagcagaatccagatgagacccagggcaggctgcctgggtagagaagtaggacagactcggaggcagaatcgagaggacctggtgatggatggatgtggggtggtggcagcatcaagtgtttaaatcctaagcttgggacgggcatgtgaggtgggagcgttcagaacaggcacgtgccaggtctcacctcacacatgacccagggttgcggaggctgctgggagccggcgggattgggcctgtgggatcctgtcagggcataataagtagactcttctttcctgaggtgcacccagacacttctagggaggatgtgaccccagagcttttccccatgtagggttcttctcattctccagcatccccctgcctttcctgggccaagagtcagcgtggaaccccatacgaatccccagggaggagagggcacagagcaccggaaccagcagtaggaattggaaaaccaggcgtggcttcttcccagaaatctcaggcatcaagaggcagaaacccactccccagcctcagcttggccaggaagtgctgctgtgggctggagaggatgggtctaggccaaggtgaacatgcagagagctggctgctcacccttcctccaccccataaagtggtctgagtaacagagcagctaggcagcgtccaggagccagccctggacaaggttgggtccctttgactgtgtgaccacaggcaggagacgtaactcagggtggagctctggtcacacctcacttacacacagccctcttgtcagttgccccaacatctcaagagatcttcaagcttatttaggtagtttcaagccttacttagcacctatttactctttctttgtatacaattcaaacaaattccatttgctgacttcttggcaaatttcaaaagaggtgtggagagttgtacaagacaagcctctgaaccacagagggttgggggaataccttagaactatggaatgcagaaatttagccatcaggagccagtctgcacagggacaaacacctctccttgcccctggagagagccccaagggcagacaccattgccctgcagccctgcttgtaggtctggttgctcaggagagcaaagtgaaatctcttcacattttcaccccataatgggtcaggaaagattggaccctcagaagggcaagcgccatttatctggaccgttcccatatccaccctcattcagagcagcctgttcttggtggagcctgataaacggggcattaccgttcccaaccagtcctcctctggggttagtttcgtccacagaagaacactttgcattttgttactctgttttttgtcaaaatctgccttctgtctgcccccagcagaatcaaggggttctaagaggagagcctaacacctttggttcgattcctccatttcctcaccaggtatccctggcactggctctgggacagaccatggtgtgaatcaactgtcttcctcagggaagacaaactcctggagtcagggaaacctggatctcgaaaggtttcagcaataaggccaggggtaccttccaggcaggagtagtagcatctcaaaggcgtagaggggtgggagatggtgtgtagtgagtgcaaaggtgtggtaggtagggagattggattgatacctggcaggagccccgattttgagttacgggttgaaggcttggggagactctgttagtggtctgcacagccttcaggccaccagtgtgcagtggggtgattttagggatgatgacaccaagcactgtttcactgattccctgcagcactgtgaagcagctcctgctaatgtctgcactttagaaatggggccatggaaactcacagatgaaataacttgctcatggtcacactggaaataaggggtggagctaggacctgaatttagttgtgtccagaatcagagttcaggtttctattcactgccctgcatggcgtccttggaacggacaagcagatccttagggcttgcctctgccctaccaactgtcctcgccccttggagcctggcctccatcagatgcctgctgacttgggacaggttgtgacagggcaggggaaaagatggctagaggctgagcacccacagcaatgggaaggaaggcaccaggaggcaggcccagcatatttgaataggtgggcatttctgggactgcaggctttggtttggcaagtgtgcctgcccacaccttcttcttctgctagacctcagtgggttggaagggatagggaggaccaacagcagtgatggaggctgcagaggctgcataccgctgtgtgtgcatgaacctgtggcatgcacacacacggaggggtgttgggatgggttgggttcacatggaattgagtttgagctgtaagtggtaggggatgaggggcatgtgagtttgtgactggctaaagcaggaatatttagattctatgagcacgggtatgtgtgtgtgatggtatacgtgcataagaagccgtttctgggtaactagggcctgcactctgctatacgtgtggctgggtgggtctggccagtcccatggcactgagagtgtggtgagtgtgctcaggcagaacgggtgctgcctgcctaccacatccgtgggagctggccagggtgggggcagggctggtgggcagggctgccctaggacgggcgtttccagttcctggaactgcttccttgtgtggaacctttccccatacctcctagctgggcccttgggagaggggaggaggccgtgggtccttcaagggggtgctcgcaggccagacacaagggagctaggcctggggaacagaaagccacagcgtgagtctttcaagcacttctgaagggtgacatgtgtgagtttgtcacaccaggccctcagtgcggtcagggagtctgtacttcctggatggcggaacctgtctgtcaagccctgcttcctccccagcaaggggttggggggagggcctgatggcaggagatgggcccctggggctttgagacatggtgaggagaaaaggggcaagtgggaagacccttttccttctgtatttctcttttttttttttttttttgagacatagagtctcactctgtcactcaggctgaagtgcagtggcacagtcttggctcactgcaaactccgtgtcctgggtttaagcaattctgccttagcctcccgtgtagctgggattacatgcttgcgccaccacgtccagctaattttttttttatttttagtagagatagggtttcaccatgttggtctggctggtctcgaactcctgatctccagtgatctgcttgccttgatctcccaaagtgctgggattacaggcgtgagccaccacacctggtcttgtacctctctgttctatgcctgaacttccaccactgatcacttgccatcatcccagcaagtcacactgagcctgtgaaaccacagggcactggaaaccacacgttaggggaagtgggagagttggcggggctctcagatgaactccaaccccttgtttctcgcctggggaaagtgaggcccacaaaaatagagggacttggctcaagaacatgcagtgaatctgtggcagagccaggccctggccctctcttagggaggggtgcaaggggaaaggaaaaggaagactgggtcctggcccctggcttgctcacccaggctgcatctccccctgcaggtgatcgaggagttctacaaccagacatgggtccaccgctatggggagagcatcctgcccaccacgctcaccacgctctggtccctctcagtggccatcttttctgttgggggcatgattggctccttctctgtgggccttttcgttaaccgctttggccggtaagtaggagaggtcctggcactgcccttggagggcccatgccctcctgcccagggagtcccagatggggtgggaggtaggggagacttatctgcctgttccagggtattacctctgacccagcccctcggagcccaaggaatgtgggcactggcctgacctgtgaccccgtccccaggcggaattcaatgctgatgatgaacctgctggccttcgtgtccgccgtgctcatgggcttctcgaaactgggcaagtcctttgagatgctgatcctgggccgcttcatcatcggtgtgtactgcggcctgaccacaggcttcgtgcccatgtatgtgggtgaagtgtcacccacagcccttcgtggggccctgggcaccctgcaccagctgggcatcgtcgtcggcatcctcatcgcccaggtaagctggggcaggatctacctgcctggcacggcccctgcccacagcttcagtggctctcggatctgtgcccagcagggcagagtttctcttccgcccagcccccacagccttgcagaggacaactatggtacacaggtccagagaacacagcaccatggcctcccagttgacagcaagatgacttgactcttctcagtccctttcttctcactctaggcttccaaccacagggcccgccttcccccaacatgccgcaggctgttatgcacagtaccctctctccaggaggcttccccttccctgtccccaaaaccctcttgtggcagagtagcagcccccattctctgtgctggacacatctgtggccttgtcatttgtcctcccagcaacactgtggggtaggtcctacttttcccatgtgaccgatgaggaaactgagaaacagggctcatgctagtggcagagcctctagaactggggcccttccctgaagcagcagctgacacaaagtagggaaggccactctggcaggacggggtgggaaagggggtcagggcagaggcgctcacggcccctgcttcccccaggtgttcggcctggactccatcatgggcaacaaggacctgtggcccctgctgctgagcatcatcttcatcccggccctgctgcagtgcatcgtgctgcccttctgccccgagagtccccgcttcctgctcatcaaccgcaacgaggagaaccgggccaagagtggtacgggcatggccctgccctcctccccactccctgagccctggccttcttcccactctgagccaccctcaccttccctccggtccccccagtgctaaagaagctgcgcgggacagctgacgtgacccatgacctgcaggagatgaaggaagagagtcggcagatgatgcgggagaagaaggtcaccatcctggagctgttccgctcccccgcctaccgccagcccatcctcatcgctgtggtgctgcagctgtcccagcagctgtctggcatcaacgctgtgagtgcccccacccacccttcctgtgccccagccaagccctctggtcaagtgtgcatggtgaacaagtcccaaacttgaaacaacagatacgcctctgccgaagaagtttccctttagaccccaagcccgtaaggtcactgcagtgcagtgtcccttctgcctgagtatttgtccccttcattctttactcatcctgggtcccacatccactgctacagaggcagggaagggccacaatgtccaggtaggccccaacagtttctcttgtctggcaggtcttctattactccacgagcatcttcgagaaggcgggggtgcagcagcctgtgtatgccaccattggctccggtatcgtcaacacggccttcactgtcgtgtcggtgagtctttgcttactggcccccccagccaaaccccagggaggaggcagtgccatcttccccactggtctttgcagtgccctgtgactttctcagctcttgaggcaaggcctctgggtgggtgggttcagaagggcactaggcaggggtggcactgacactgtctctgcccacagctgtttgtggtggagcgagcaggccggcggaccctgcacctcataggcctcgctggcatggcgggttgtgccatactcatgaccatcgcgctagcactgctggtgagttgctaggttctggagagtgagggatgcgggagagtttgcctgggcttcatatcccaaaatgcctgtctcagccccaggctggcaggccttttggtggctgcattctccctggctgtgggtctgactttctggctcctgaagttgtctccttccaaaccacacacatcctctcttgaacttgctcctccctgcttgatggattctcagcgcagcacctctggtcccagaccccaaactctcacctccttaaggaattgctttgcctaatattaaccctttccaatcttcatctgtagcctcaattcatcttcacagcaaccccgggaagtagtgctgtcctccccatagaggcgcagaaacatgccttgcctcattcagttcacacgactggaggtgtagttcagttcttcccattttatgggggaggaagcttaagtcccagtgaggttagtaacttgtcagataaaggatgaagccaggaatcaacctcagtcccaggcctgtgactgtgaccgctgtgctaaccctgtgcctggcactcacacacaggcactcgtttatttagcctctgggcaaggaaagcaccatgactgtcattttacagctcaacctgggcttggaaagtttggtggttgccgaaaggccagacaggcagcaagtggaaagcccataaattttctaccctggcctcctcaagaatggttatatgcagaaccgtatgcttagcgcttactctgtgccagcctgagctgggcacctcacacgccttagaacctgaatccaccccacccccaggaatgttctgcatcctgccacaggcggactgtgctgcaggcacagacaggggaccatggggcctcttagcaccgtccacatgcacaccacattaccactcccagcgggtggactcaacacttgcagccaccctgcaggacttaaatcattttgttcggatgaggaaacttaggcccaatgctggatacacaacaaatccaggaccatccccaggcttcctgccttctcgcatagctctgctctggcctctgtagcttctgtttcccctgaggatccatcacaacccagtctaacttttccccctctccgtcatcctcaacaggagcagctaccctggatgtcctatctgagcatcgtggccatctttggctttgtggccttctttgaagtgggtcctggccccatcccatggttcatcgtggctgaactcttcagccagggtccacgtccagctgccattgccgttgcaggcttctccaactggacctcaaatttcattgtgggcatgtgcttccagtatgtggaggtgagaacccccactgtctctatactcaccatttctcacccgcacgcatgaccccacagtgctgtgcaaagtgctggcccagcattctcattaggaatcatgctgaggaggaaactgagggtaggaagcccaggtcacatgaccaagaatgctgacctcaactccagggttctccccttagccttgaatggtgctcctggagcctgttacattctaggtacaagcgtggtctcagttaattatgatagcatccctgggtaggtggatgttcccttttcagctcaaaggcccaaaggtaaagtgacttatccaaagtcctacagccaggatgtagggtcatgactccaaccaagtgtgtctgtgtgtctttcagcaactgtgtggtccctacgtcttcatcatcttcactgtgctcctggttctgttcttcatcttcacctacttcaaagttcctgagactaaaggccggaccttcgatgagatcgcttccggcttccggcaggggggagccagccaaagtgacaagacacccgaggagctgttccatcccctgggggctgattcccaagtgtgagtcgccccagatcaccagcccggcctgctcccagcagccctaaggatctctcaggagcacaggcagctggatgagacttccaaacctgacagatgtcagccgagccgggcctggggctcctttctccagccagcaatgatgtccagaagaatattcaggacttaacggctccaggattttaacaaaagcaagactgttgctcaaatctattcagacaagcaacaggttttataatttttttattactgattttgttatttttatatcagcctgagtctcctgtgcccacatcccaggcttcaccctgaatggttccatgcctgagggtggagactaagccctgtcgagacacttgccttcttcacccagctaatctgtagggctggacctatgtcctaaggacacactaatcgaactatgaactacaaagcttctatcccaggaggtggctatggccacccgttctgctggcctggatctccccactctaggggtcaggctccattaggatttgccccttcccatctcttcctacccaaccactcaaattaatctttctttacctgagaccagttgggagcactggagtgcagggaggagaggggaagggccagtctgggctgccgggttctagtctcctttgcactgagggccacactattaccatgagaagagggcctgtgggagcctgcaaactcactgctcaagaagacatggagactcctgccctgttgtgtatagatgcaagatatttatatatatttttggttgtcaatattaaatacagacactaagttatagtatatctggacaagccaacttgtaaatacaccacctcactcctgttacttacctaaacagatataaatggctggtttttagaaacatggttttgaaatgcttgtggattgagggtaggaggtttggatgggagtgagacagaagtaagtggggttgcaaccactgcaacggcttagacttcgactcaggatccagtcccttacacgtacctctcatcagtgtcctcttgctcaaaaatctgtttgatccctgttacccagagaatatatacattctttatcttgacattcaaggcatttctatcacatatttgatagttggtgttcaaaaaaacactagttttgtgccagccgtgatgctcaggcttgaaatgcattattttgaatgtgaagtaaatactgtacctttattggacaggctcaaagaggttatgtgcctgaagtcgcacagtgaataagctaaaacacctgcttttaacaatggtaccatacaaccactactccattaactccacccacctcctgcacccctccccacacacacaaaatgaaccacgttctttgtatgggcccaatgagctgtcaagctgccctgtgttcatttcatttggaattgccccctctggttcctctgtatactactgcttcatctctaaagacagctcatcctcctccttcacccctgaatttccagagcacttcatctgctccttcatcacaagtccagttttctgccactagtctgaatttcatgagaagatgccgatttggttcctgtgggtcctcagcactattcagtacagtgcttgatgcacagcaggcactcagaaaatactggaggaaataaaacaccaaagatatttgtctctagaggctcagctgacaaaatctgggagaagtttgcttttgtaactacaggcaggcttttttctccctgacatgaagaggggttgtaagaagggtgtgagaaaggaaaactggtacttagcaaatggaaatacctatatgtattaccattaggtataaagaatctatgaggacatccatctgcatctcaacaaagaagagcaggttgcgaagaatatgccctgcctgagcctggggacagggcggttaactggtgaagggctgaggccagatgaaaggaagccttatcgtgtgctcccaaaagacttctgttgaaaggagttatccgggtccccgtgcgggagggggtgcgggggcagggcaagaaggagaggccgggggcccaggtatcttactcctacgacgctgctcactcagggctgtccccactggaccagaaaggaaacagacggggtggggtggggtggggtggggtggggtggggatgggtgggagccccgcgccggtggccggacgcgaggactacaaggcggatggcgggcggagctcattcacactcgagggcccagaacgttggcagagccaggcagcacccgagccccgccccggcccagaggttcagaccccggtctgaaaaggcccgacaatccactcgcagctgcctcccgccctgggtcagtatcgacgtccccgagcaccgccatttcccaaactgcaaaatgtcagcgcaggcgcagggaagccggcccgccctcagcgtggtccagagtgccgcgacggcacagctgccggtcggtcccctgacgcctttcctctaggggccgcaatccaccccggggtagaagatttggggccaaggttcggccgcctactgccggggtcgatggcgcatcctctccagacctcacagcggtcccctaagcccggccaccggcggcgcacggacacgattggggatgggcggggccaggtggtttctccaccaatcagaggcgcattgttgggcccgacgaggggcgggctccaagactccaccaatcacaccctggcggttccaggcgctggcccttggggacgacctgggcgcctgcttgccaggcgatgcggtttactctggagggggtgacggtgacttgtgtatcgctgggcatccctggggacgtagctcacccgggttcctatcccgcgtaaggtgacgtctacggtttctgacgaaaaggggtaaatagataacgggactgttctccaggccaccatcttttcccagcagtgcttagttgtttcactgacagtgttatgagatctttcatttgaaatcttaggcgcaaaatctcctctccctggaagccttctggatcaggttttcccgggaacactacatcggcttgtatttcctccatcaaagcgctctccacgctgtaccggaattgagtgtctttccaccacattgggggcgggggcggggacgagggcgggggttgggggggtagggcagctgccgcaggaacacgactgagccattccttggt

SEQ ID NO: 146 - DNA, 21043 bp, Human
ttctaggccctcaaccaaaaccctaaaggaagatacactttctccaattcaccactgggaaaaagtttatctctttaccaagcgtccttcacccaccctgccacctccagtactgaaagggttgcaagctacaaatgaatgggcattaggaatttgatagttgatattcctcctccaaaaaagcctagatactatctctcacttacccagctgtttaaacacaaaccaagttgttttgctttgtttactctcaacctggaaccactcttctctctccccgattatccctccctcagttctcattcctattttcttctcctgcttagcttgttcagttttcttgtatagcttagtaatcagatacttatgtaacacttttctttcaagaaactcacagtccataactaataggatattaataatcttttccagttatgtgagaattacttgccctagtccctttttatactttataaaaagggaagaagggaaacactataaatgacttgtgggtcagaactcttttgtcctattattcttttttttttttttttgagacggattcttgctctgtcgcccaggctggagtgcagtggcgctgtcttggctcactgcaagctccgcctgccgcgttcacgccattctcctgtctcagcctcccgagtagctgggactgcaggcgcccgccaccatgcccggctaattttttttttttttttttttttttttgtatttttagtagagaatggtttcaccgtgttagccaggatggtcttgatctcctgacctcgtgatccgcccacctcggcctcccaaagtgctgggattacaggcgtgagccaccgcgcccggcctttttttctattattcactgaagaatcaccagcttcttggagagtacctgatacatagcgtgtattcggcaaatacctgcttaattgaattcggtatttattgcatttctagatgctataagcttgagactagcagaaagtgatgcagaattcagaatgggtgatatggcaaatgccttattaaatatagggctcggcgcggtggctcacacttgtaatcccagcactttgggaggccaaggcgggcagatcacaaggtcaggagtttgagaccagcctggccaatatggtgaaaccccgtctttactaaaaatacaaaaattagcggggcgtggtggcgggcgcctatagtcccagctactcgggaggctgaggcaggagaattgcttgaacccgggaggcggaggttgcagtgagccgagatcgcaccactgcactccagcctgggcgacagagagagactccatatcaaaaaaaaaaaaaaaaaaaaaagaggatatggattgtattccataaacagttgaacctcttattcctactgccctgatagttggtctggctcctagaaattcagatattttcttccctccaggtgagattatgcgaagaaaggaacactggcaaaattatttccctgattttcttctctcaggctgtctttccctcccctttaagattgtgtactccgtctcaaaaaaaaaagaaaaaaaaaagattgtagacccagcctataaattcataggatcaagaattcttactaacactctttctaacaaccttaaatctctgatagtagcacccacttgacttcgttttgtatggatagatttattctaatctctctgtagattgttttaatcccaagcagatgcgagagcataaaatagtgtatttgccctccctccaggcttttctggtagtattttgtctgtgaaactaagaggctctagctgctattagaagagggaaggagtaaggatgagcttttgaaaaaaaaaaaaaaaaaaaacccagggtggagagagtggaaggatgtggttttaagagaggggggagggagggcgttattgtctgtggggcgggggcgggggtagttctgataacacagaattccgagagatcacaagattgcttcaggggggtggggtggggtggggtggggctgggggcttgtcgccctttcaggctccaccctttgcggagattataaatagtcatgatcccagcgagacccagagatgctgtaatggtgagactttggatccttcctgaggacgtggagaaaacttgctgctgagaaggacattttgaaggttttgttggctgaaaaagctgtttctggaatcacccctagatctttcttgaagacttgaattagattacagcgatggggacacagaaggtaagaatgatataattactggttatttttgcttgtttgggatacactcagaaaggcaaatattaatggtaatctccttgttctattttctcctaagtcaccaagctatcttaaggccttttcatttcgtctctagcctgcactgctgccgcttcatcagttctctttgaatgtcatacagttctgttcaccttatcataggaaagtcacccggagaagttgtgtttgcttctcaggtttattttaggtaaccatatgccactgaggacgagatggttgagtgtttagaggatcgggctgcttggttgtatggattacaagtgtgggtctcagagccagtgtgaagacttctctggaagcattagaccttgaaaaggtctgtgtttgggggcacaggccagggtctggccatctgtttgtcctataacatatggggttcgtggatgctaaggagaaagaattccagttgtccttcctattagggttaaaatcgtgagtgcaggacatactaaaatattgagtgttgtatatgcattatttgcagggagaaaggcttttcttttttttctgattgagttttactcttgttgcccaggctggagtgcaatggagcgaccgcagctcaccacagcctccgcctcccgggttcaagcgattctcctgcctcagcctcctgagtagctgagattacaggcatgaaccaccgggcccggctaattttgtatttttagtagagacggggtttctctatgttggtcaggctggtctcgactcccgacctcaggcgatccgccggcctcggcctcccaaggtgctgagattacaggcatgagccactgcgcgcagcaagaaaggcattttttaccaagataaatttaactaaaaataaggggccaggtgtggtgggtcacacctataaccccagcatttgggaaaccaaggcaggaggatcacatgaggcctggagtttgagactagccttgggcaatatagtgagatcccatctctacaaagcagaaagaaagaaaatgtaggaaaataagaaagggatggaaaattatgagactaaagaagaaaaggctctcaaagatagtgaatgatgagaggagacagaagagatttttactaaacggaaaaagatttaacagagcattgcactggcagggccctccggggtaccgatgcttagctgggactgagacatctgggaggctgcaggcaaggtcacttctcctgctgaagctcccagcctgctgcctaatctgcccgacctgaaaggaaaggagtttaagatatgaaaggttgaagggattttgggtggtggggtgggggggaatggcgtagaagttggcctcaggtataaaaattgagctgccccaaggtagaaatggaaaatgtctcgcccggctgaattattccaggcaaggtgaagatgaccggttctccccactaagaaatgtctcttatatgttgggttcgcccttatatgttgggttcagagtaagtactttcttcccctgcgcgggagttagggatagcagaactgtatttaataaacgaagactgaaatggggccaggatgcagtgagtagatccagtaggttacatggtcctgagagataagagactcaaagagccacccagcagtgaagacacaaactaccaccccctccaccaccaccactgggcttccgtggagtctggggtacagatcagactgcactgtatttgtttccagaatggtcaattcttagtaatcctacccgagactgtctttttctctgccctcccagttcgtgagtggaattctatgcctacatttgcctgatgcaagtttttaaatatttccaaactgaccaacccagtttctcttaacttcttccttccccaattttctttcatttttaccaagttaacttcacattcttatctccagataagttctttagtataatctattcctttgtcttccccattaattacctaaatctcattggatgttcttttcataccactcataactcaaattctcctaatacagctccataattaataagaaacagtcatcaatcacaagttttaaggactattctctcctctgtcttccctccctccaggtcaccccagctctgatatttgccatcacagttgctacaatcggctctttccaatttggctacaacactggggtcatcaatgctcctgagaaggtgagtgccaggccacaataattagaatttagaatagggaagttattcctttaagtagggtttcaggaattcagaatttaaggccaggcatggtggcatctgcctggagtcccagctactcctgaggctgaggcttaaagatcacttgagtccaggagttaaacaccatcctgagcaacacagttagtgagggtccctccccaaactaggggattttaagacaaactttgtatctatcctgtccaagactgaagatggagacaatattggtggggaaaattagtggggtcatctaatcgaagcacaaagctcacttactcccggaacgctgggcggtgctgttcttcctcccactctttcacctcatagtgatgcacatcctgtattatcccttaggggttagttacaaagaagctgggttcccttagcagagggctggggtagactgtgaacatcggtgctgccacctactgggattttcaggacaaatagaattactattccagcgagagttaacataaattccaatacgttatctgccccttccattcctgtctatttattcccttgattctctaggaaggaaatgatccctaatgtttgtcttttgttctcatccaactgtaacagtctgttcttccaccaacccttttattttgcagatcataaaggaatttatcaataaaactttgacggacaagggaaatgccccaccctctgaggtgctgctcacgtctctctggtccttgtctgtggccatattttccgtcgggggtatgatcggctccttttccgtcggactcttcgtcaaccgctttggcaggtattgactagaaactgggcaaggaagtgggctctaccagccacattgaggacaagtgtggagagttagggcagggaggtgatgatgcctttgaataagaacaccttgaattctaatcaagggaaacctagtccaactggccccgaatatgactgcccttgcttggagctctactaccctggagagctcccacccagctgtgcaagagatgaactgtgagtgattggcctttgcagtccagctagggatagttcagaattattccctagtaaactcaactatggggtttctagaaacatacttaatttacaaggtccgaagttgtttacttgtattataaatgtttttattattttacccaggattggtaggaattatttttgtctatggcaaatgtggataatgacaaaaaaaaagtcttattctatagaagcttaacaatatgttttagaaggtagaatatattttcatttatgactaatgaaggaactgttttaatttgccaattaggcacggtgtggtggctcacccctgtaatcctagcactttgggaaaccgaggcaagtggatcagctgaggtcaggagttcgagaccagcctggccaacatggcaaaaccctgtctctaccaaaaatacaaaaattagccgggcgtagtgacaggcacctataattccagctactccggaggctgaggcaggaaaatcacttgaacctgcagtgggggtgcagagggtgcagtaagctgagatctggccacttcacaccagcctgggcgaaagagcaaaaccccgtctcaaaaaaaaaaaagccggtgccgtggctcacgcctgtaatcccagcactttgggaggctgaggcgggcagataacaaggtcaggagatcgagaccatcctggctaacacggtgaaaccctgtccctactaaaaatacaaaaaattagccgggcgtggtggcatgcgcctgcaatcccagctgcttggaagctgaggcaggagaatctcttgagcctgggaggcgcaggttgcagtgagccgagatcctgccactgcactccagcctgggtgacagaccaagactccgtctccaaaaaaaaaaaaaaaaatgccaattagatattctagaaatgcaattggaattcacatttaaaaatcggtaaagcaacctgttttacttgattatgttgttcttttgtttttttaccccccaagaaagagggtcttgctctgtcacccgggctggagtgtaatggcccaatcatagctcactacagcttcgacctccgacctcagctccctgagtgcctgggactacaggcgggcaccatcacacctggttcccaactagaaatgttctgataatagaaagtgaaaaacaaaagttagattaaaaaaaaaagggatgatatgagcctggagaagaacagaataatgaggacagaggagaagttaggagcctctcactttgctaattctactttgtctttgattaaccttacaggcgcaattcaatgctgattgtcaacctgttggctgtcactggtggctgctttatgggactgtgtaaagtagctaagtcggttgaaatgctgatcctgggtcgcttggttattggcctcttctgcggactctgcacaggttttgtgcccatgtacattggagagatctcgcctactgccctgcggggtgcctttggcactctcaaccagctgggcatcgttgttggaattctggtggcccaggtactctagaacttctcatacttaatgagtgttagtttcatgggtcattaaaaaagttaacataggtaaagcactgaagaatatctggcacatgttcaattacatatggaagttttagataatagatagtagctgaagaagcaggctgaggccgggcgctgtggctcacgcctgtaatcccagcactttgggaggccgaggtgggcagatcacgaggtcagcagatgaagaccagcctggctaacatggtgaaaccccatctctactaaaaacacaaaaaattggtcgggcgtggtagcgggcacctgtagtcccagctactccggaggctgaggcgggagaatggcgtgaacccggtaggcagagtttgcagtgagccgagattgtgccactgatctccagcctgggtgacagagcaagactccgtctcaaaaaaaaaaaaaaaaaaaaaccatgctgagtagagaaaggaaaagaaacacaatttgtttattttttcacatggtaaaagaatgtatgattttctgaactttttgtgttttaatgaacttgtggcctgtgaagtatggggtttatagcattatctttgtgtggtttctagatctttggtctggaattcatccttgggtctgaagagctatggccgctgctactgggttttaccatccttcctgctatcctacaaagtgcagcccttccattttgccctgaaagtcccagatttttgctcattaacagaaaagaagaggagaatgctaagcagagtgagtatccttcacaccttactacatgaattatatggttgtggtttgttttagggatgattgtactggacctactttctgttacactctttccctgcctctcagaatccaagtgaggagggttctgattactcctgagtaaaattttcagcccctaaagaatgaggtgaaaaggcgggtttaggaatggatgctatcaggcagggtgtgatggctcatgcctgtaatccagcattataagaggccgaggcgggtcacctgaggtcaggagttcaagacctgcctgaaacaacatggagaaaccctgtctctactaaaaatacaaaattagccgggcatgggggcgcatgcctgtaatcccagctacttgggaggctgaggcaggagaatcgtgtgaacccgggaagtggaggttgcagggagctgagatcatgccattgcactccagcctgggcaacaaaagtgaaactctgtctcaaaaaaaaaaaaaggaatggatgctacccatcacctcacctcgtgcggccctttcctggctgccttacaggaagaatgaatttggggcagcacattctcttttatcctttcctctttcttcttttcaccagtcctccagcggttgtggggcacccaggatgtatcccaagacatccaggagatgaaagatgagagtgcaaggatgtcacaagaaaagcaagtcaccgtgctagagctctttagagtgtccagctaccgacagcccatcatcatttccattgtgctccagctctctcagcagctctctgggatcaatgctgtgagtgtgatactttagggtcaaacgtgtcttaaagtatttcacttaaaatgccgggcatggtggcggtgtgcctctgtagtcccagctactcaggaggctgaggtaagaggatcacttgagctcaggagtttcaggttgcagtgagctataattatgccactgcattccagcctgggagacagagtgagactgtgtctctgaaatttaaaaaaaggaaaaaaaaaaaagaccctggaaggacactggcaacttcagagtgaactgactttaccagtctgtttttacaactagtatagcgagcatggtagtttaaagagggcatgatagatgatagtttaaagagggcggcacaacggaagctagcatttggcaggtagcccttgtattccatgcaaatatcagcttcctgcatttgactgtggattgtaggaagagagtattcctgtgccttctagtcaatatggatattaagagcacccttgtcccacctttttaaatactgattcatcccctaagggttttcagatagtctttgatcaatgggattaaattattttgtaacaaagcattttgcaaaacttactattttgagcattttgatgctcaaaatagtaagttggttcttggaacttttctcctacctagcacaccaggatatttgtatttgaagtggcagtgcttcttatgaggggttagaggctgttatgtcagaatctatgaggagccaagtgtggtggctgctcatgcctgtagtcccagctactactcgggaggctgaggtgggaatatcacttaggcccaggagtcaagcctgggaaatatagtatgaccctgtctttaaaaaaaaaacttgggaggaaatacacagtagttagaaaaagcctcctaggtgattttgatgaatcccagtctcaaatttcttcatttggaaatgataatgtaggccacacgtattactggagaaaaatgtgctcccgagactttccagagcagcagagctgggactaggcaggtgaggcagctacgtgcaagtgtagccctgagaatgagcacctctttaaagaatgtaccttgcgttagttctgtgcctgtttaaaaaaagaaaaaagaaagaatgaaagaatgcacctgaggcaactccctagctgcctcaccacagtccaggccctgcaaaacaggatcagtaaaagatcacctgtgagaaatgacaagtgatccgtgagcagtctgagggacagactcctgccatttcagagtatggtgtgtacattctttttttttttgaaacagagtctcactcgatcgcccaggctggagtacagtggcacgatctcggctcactgcaacctccacctcctgggttcaagcgattctcctgcctcagcctcccgagtagctgggactacaggcgtgtgccaccatgcctggctaatttttgtatttttagtagagaacaggtttcaccatgttggccaggatggtctcgatctcttgacctcatgatccgcctgccacggccttcctaaatgctgggattataggcgtgagccactgcgcctggcccatcctttttttgaggtgaagtcttgttctgtcacccaggctggagtgctgtggcgcaatctcagctcaccacaacctccatctcctgggttcaaatgattctcctgcctcagactcccgagattacaggtgggattacagcccagattacaggtgcccaccaccataccttgcttattttttcgtatttttagtagagaatagagggatatcaccatgttggccaggctggtctcaaactcctgacctcaggtgatccacccacctcagctctctctcctaaagtgccggccttacaggtgtgacccacctcgcccggcatgtacattaattattgttggactaagctggctcccaatttagtcaatgagtagattttgcgctaggtataatctcacccaaagctggctgcatcagaattatgggggttgggattcctgagtcagctgaatttgagaatctctgtgtaagagacctgaaagttgtctgtaaaaaaataaatctgatgcacagcaggcttggaaatcacttttccaacctactttgcacaaatgatgatttctaatttcccttatgggcagatgggtaagaggttgcattgtatcatgtttacctagcagagtaaactatttaggtgagatgatgtaggggttaccttgcttggtgacactagatagcaaagtcattttactatgagaaattttattgagatgagtacatgtacattaggtttttgacgtgtagacattatgttaaggaaaagaattggcatacctatttattgcttgtttaaactgctcaagtaattacttttgcactagcctaatatatttccccacaagcttgacgccatcatataatatgttgagatttcttaacagtgttaattagccctagagcagcaggtttttcaataatgactctacaaatctcagtttcaaaacacaattatcttattttagaaaatatgaatatacatagtttacatcttacgtactagggatttaaagagttgtttcgtgagaaggtaaatcccaatgtagaggtccatattcataaaaaagactaataaatattgctatggaggcaaatactctgggtgaaataaactgaagtgaacctcggtaacctagataatgttcccttgttaacttgaggtctgagtccagtattttaatatctcttaactatggtagttatagcaactttagattttagcacagtgcctagcaaacaacataataatttatttaatatatattaaattgcattagtagctggtattatttcataaaacacttcaaaagggcctaggcctaggaaatacagcccaacctctgcttattcaatgagcaggataaggttattcaattagttcactatcaaattgagacatcgatgtccctatcaatgttttgagagtttggggaagagccaattaaaaaagcatttagctgggcctgatggcacatgcctataatcccagcaacttgggaggctgagaggcaggaggatcacttgagaccaagagtttaggaccagcctgggcaacagtgagttgctgtctcaacttataaaaaagaaaccagttagtaggaattacacctttatgtaagttagtgaagtggacataagcaagaggaaatggaacagtgggaataagcatttttagaagaaacaatgtaaatgagtagctagaattaagaacatttagagagagaaaggagggccaggtgcggtggctcatgcctgtaatcctagcactttgggaggccaaggcgagcaggtcacttgaggtcaggagtacgagaccagcctggccaacaaggtgaaaacccatctctacttaaactacaaaaattagctgcgtgtggttgcaggcacctgtagtccagctactcaggaggctgaggcaggagaatcgcttgaatctgggaggtggaggtagcagtgagctgagattgtgccactgcactcctgcctgggtgacagatccagactaggagataagatacagaagataattcatttgcagaagggatattagtattgaacgaaaacctagaaaaaggacttcttacccactgggacttttaagtttatttttgagggttctgtgtaactggtgtgcagaattgcatcaaagctgcatgttttcttttctcctaggtgttctattactcaacaggaatcttcaaggatgcaggtgttcaagagcccatctatgccaccatcggcgcgggtgtggttaatactatcttcactgtagtttctgtaagttggatggtttggtaattttgaggggagaaaagaatccttgctacagatgttcaaagatggattgcatgaccctaccatcatttagttacctttttgttgcttaattttcctttgggaaaaagagataaatttaatgttggatgtagtcttcactcttcaagcaaatatgggatggatgggaaaggagggagtatagaagggactatatagtatgctttgaacttggaattggaggaaaggtgcttggaaaaactctcaagctctgttactccactgtttttacactaaaacaacaataatcaacagaagttatctgtgatccccagaatatgtgagaatttttccccgtgaggtgtgcaatcagttccgtagtggacaccatctaggtgtcctgcgattttttaattatgacactgtctacctggagatagcatcagatctcacaggttggtggcccagttcccaagactgccccccactcctgatgccagtcacaagctccaggttgttttacctgtgcttctgactcaccagctgtagatcaggattcccacgacatcctctttgggtttgattaatttgctacagtggctcacaaaactcaggaaaattgtttcctagtttgatttaaaggatattttaaagcacagaaatacacaaccagatgaagagattcacggggcgaggtctggagggatcctgagcatgggagcttctgtctctgtggggttggggtgcactcctagcacatagatgagttgttgctgaccttcctgtcagcttccacgggttcagatatctggaagctccccataccctgccttttgggccttttatgcagacttaattggttctccatgattgaagcatggacaactgttctgacctgtgattggacaaaaagggaatgatctgaacccagctgggcctgtctgcttagatgatttgttggcctctctgtagcgtttcttcctctagggtgtggggcaggaccctctctgaaatgagggttttatgacccacagtcagattagcgtcctgccaagtgggagggcaggagaaagtcagagaagaattctgttatctgaggcctgctcctgaggcctgaagcatcccaacattatgacaaaagactctaccaagggctatggggattttgagccaggacctgtgaatggcacacaatatgtatgtatataaaatcataaatcacaggaggggtatccataacaagtgtcctgctgttggtaaggcagatttcaagtagctcagatgctgttttcatggaaaggaaaactgaagtttcatgtcatattcttcttccagctatttctggtggaaagggcaggaagaaggactctgcatatgataggccttggagggatggctttttgttccacgctcatgactgtttctttgttattaaaggtaggtgctctttgggtgaaaaaaaagggagggggaaagaagagaggttacagttgacttctgtgacacaaggggtgggttgttaaggttgcagtttgtcaataaagtcagaggagagaagcaggatgcccagagtttaagaaacatgggtcgtcagagaactggaggtaaactgttagaatccttacatttatagaacattattatagcttataaaataaattatctaatttaattcttagaataatatcaaggtaatcacacttaatagatgatgacatggtctcagtacaaagtgacatatatgagatcatatagatgggattgaaaaattcaatcctcagctgggcgcggtggctcacgcctgtaatcccagcacactgggagggtgaggcaggcggatcacctgatgtcgagagttcaagaccagcctgaccaacatggagaaaccccgtctctattaaaaatagaaaattagccaggagtggtggtgcatgcctctaatgtcagctacttgggaggctgaggcaggagaattgcttgaacccaggaggcagaggttgtggtaagtcgagatggtgccattgcactccagcctgagcgacaagagcgaaactctctctcaaaaaaaaaaaaaaaaatccaatcctggctgggcgcagtggttcatgcctgtcatcacaacactttggaaggccaaggttagaggattgcttgagcccagaagttcaagaccagcctacgcaacatggcaagaaactttctctacaaaaaaacaaaaaaaaattttttttttgagacagggtttcactctgtcaccaggctggagagcagtggcaggatctcagctcactgcaacctctgcctcctgggcttaagtgtttctgctgcctcagcctcccaggtagctgggattataggcacgtgccaccacgctcagctaatttttgtacttcttagtagagactgtgtttcaccatgttagccaggctggtctccaactcttgacctcagataatccacctgccttggcgtgagccacagctcctggccaaaaaaaaaatttttttttaattaggcaggtgtggtggcacatgcttcaagtccaagcgatttgagaggctgaggtgggaggattgcttatgcccaggagatcgatgatgcagtgagctattgtagtgccactgccctccagcatgggcaacagagtaagaccctgtctcaaaaaataaaaataaaaataaatccaagccttttgactccacagccactctttgtattgtacgtcagggacaggaggagcttgccgttaattgcttccgggaacctagatactaggttacactgtctttaaatttaattttctctgttccttgctcttacaggataactataatgggatgagctttgtctgtattggggctatcttggtctttgtagccttctttgaaattggaccaggccccattccctggtttattgtggccgaactcttcagccagggcccccgcccagctgcgatggcagtggccggctgctccaactggacctccaacttcctagtcggattgctcttcccctccgctgctgtaagtaaactcaccttatcttaaaaccagcctatgtaagctgacatgaagatactccttaataatacagtagtctgggcctggcatggtggctcatgcctgtaatcctagcactgtgggaggctgaggcaggtggatcacctgaggtcaggagttcaagaccagcctggccaacatggtgaaattcaaaaattagctgggcatggtggtgcatgcctgtaattccagctacttgggagatcgaggaaggagaatcgcttaaacctgggaggtggaggttgcagcgagctgagatcgcgctactgcactctagcctgctcgatggaagcaagactccatccctaaataaataaaaaaatacagcagtccctcctcttcttcagtttcagttacctgtagtctaaaaatattaaatggaaaattgcagaaataaataattcataaagtttaatttgcggccagacacagtggctcaagcctgtaattccagcactttgagaggcctaggcgggtggataacttgaggtcaggagttggggaccaacctgactatcatggtgaaaccctgtttctacaataaatacaaaaattaggccgggtgtcgtggctcatgactgtaatcccagtgagcgagatcacaccattgcggtagcacacacctgtagtcctagctactcagaagactgaggcaagagaatcacttaaacccaggaggtgttcatggtgagctgtgatcaaccttctgctctccagcctgggtgacagagcgagattccgtctcaaaaaaaaaaaaattcataaatagagatggagttgcccaggttagtctcaaactgctgggttccagtgatcctcccaccttgacctcccaaagtgctgggattatgggcgtgagccaccgcactcggcccagaaacacagattttaaaaataatactcaaaagtccaaaaatactcagtagacatttggaagcatctaactgtaatgaaatggaatgacagaaagaaaactagagagaactacagtaagttagcaatggaatcataagcgaatctgaagaaacctgttttcattaaatatggaagggttatagcttgaagcctattggaaatatgaatgtgaaggaaattgactttgtcaatgaccagatttttatatcaaccttccttttttctgtcctttctctagcactatttaggagcctacgtttttattatcttcaccggcttcctcattaccttcttggcttttaccttcttcaaagtccctgagacccgtggcaggacttttgaggatatcacacgggcctttgaagggcaggcacacggtgcagatagatctggaaaggacggcgtcatggagatgaacagcatcgagcctgctaaggagaccaccaccaatgtctaagtcgtgcctccttccacctccctcccggcatgggaaagccacctctccctcaacaagggagagacctcatcaggatgaacccaggacgcttctgaatgctgctacttaattcctttctcatcccacgcactccatgagcaccccaaggctgcggtttgttggatcttcaatggctttttaaattttatttcctggacatcctcttctgcttaggagagaccgagtgaacctaccttcatttcaggagggattggccgcttggcacatgacaactttgccagcttttcctcccttgggttctgatattgccgcactaggggatataggagaggaaaagtaaggtgcagttcccccaacctcagacttaccaggaagcagatacatatgagtgtggaagccggagggtgtttatgtaagagcaccttcctcacttccatacagctctacgtggcaaattaacttgagttttatttattttatcctctggtttaattacataattttttttttttaactttaagtttcaggatacatgtgccgaatgtgcaggtttgttacataggtatatatatgccatgatggaaatatttatttttttaagcgtaattttgccaaataataaaaacagaaggaaattgagattagagggaggtgtttaaagagaggttatagagtagaagatttgatgctggagaggttaaggtgcaataagaatttagggagaaatgttgttcattattggagggtaaatgatgtggtgcctgaggtctgtacgttacctcttaacaatttctgtccttcagatggaaactctttaacttctcgtaaaagtcatatacctatataataaagctactgatttcctttggagcttttttctttaagataatagtttacatgtagtagtacttgaaatctaggattattaactaatatgggcattgtagttaatgatggttgatgggttctaattttggatggagtccagggaagagaaagtgatttctagaaagcctgttcccctcactggatgaaataactccttcttgtagtagtctcattacttttgaagtaatcccgccacctatctcgtgggagagccatccaaataagaaacctaaaataattggttcttggtagagattcattatttttccactttgttctttaggagattttaggtgttgattttctgttgtattttaactcatacctttaaaggaattccccaaagaatgtttatagcaaacttggaatttgtaacctcagctctgggagaggatttttttctgagcgattattatctaaagtgtgttgttgctttaggctcacggcacgcttgcgtatgtctgttaccatgtcactgtggtcctatgccgaatgccctcaggggacttgaatctttccaataaaccaggtttagacagtatgagtcaatgtgcagtgtagcccacacttgagaggatgaatgtatgtgcactgtcactttgctctgggtggaagtacgttattgttgacttattttctctgtgtttgttcctacagcccctttttcatatgttgctcagtctccctttcccttcttggtgcttacacatctcagaccctttagccaaacccttgtcagtgacagtattttggttcttagttctcactgttccctctgctcctggagcctttgaataaaaatgcacgtagctgaggccggatgcggtggctcacgcctgtaatcccagcactttgggaggcctaggcgggcggtcaggggttcgagaccagtctggccaacatcgtgaaaccctgtctctactaaaaatgcaaaaattagccgggcgtggtggcgggcgcctgtaatcccagctacttgggaagctgaggcgggagaatcatgtgaacccgggacgcaggggttgcagtgagcggagatcgcatcattgcactctagcctgggccacagggcgagactccgtctcaaaaaaaaaaaaatgcacatagctatcgagtgtgctttagcttgaaaaggtgaccttgcaacttcatgtcaacttctggctcctcaaacagtaggttggcagtaaggcagggtcccatttctcactgagaagattgtgaatatttccatatggattttctattgttactctggttctttgttttaaaataaaaattctgaatgtacacgacattatgggcttatttactttttgtccttcctgtaaccacaaaatgagctctaaatcctgacttggctactcagtgcctgttgactttgagacttgtatgagaccctcatactcatgagactgtgttcttagagtctcatacataagagaatagcaatatgtgtttattatgtagattaaatgaaaaagctttcgtggccaggcgcggtggctcacgcctgtaatcccagcactttgggaggccaaggcgggtggatcccctgaggtcggaagttcaagaccagcgtgaccaacatggagaaactccgtctctactaaaaatacaaaaattagctgggcatgatggcgcattcctgtaatcccagctacttgggaaggctgaggcaggcaaatcgcttaaacctgggaggcggaggttgcggtgagcagagatcgcgccattgtactccaccctgggcaacaagagcgaaactccgtctcaaaagaaaacagctttcatttgttgcttttcatacttgataaattattttgctttctttccccactgagaactagctattttgtttgtttgtttttctcttgtgttctttttacttcctcctccagtctttttttttttttttttttggagacagagttttgctcttgttgctcaggctggagtgcaatggtgtgatctcagctcactacaacctctgcctcctgggttcaagccattctcccgactcagcctcccaagtagctggtattataggcatgcgccaccacacccggctaatttttatatttttagtagagatggggttccaccacgttggccaggctggttttgaactcctgacctcaagtgatccgcccacctccgccttcccaaagtgttgggattacaggtgtgagccaccgcacctggcccagagtgatcttttaaaattgaatgttactctgctgcttaaagccttccagttacatcttaccacttaaaataatatccaaactccttcaccatgactgacaaatctagtgaccttaggtcccagtttaaattgccttgattcattttcacaactgccctatctgcctaaaagccttgcctctccaatttcacatcttgttatatgcattttttttttttttgagacagagcttcattcttgttatccaggatggagtgcaatggtgtggtctcggctcactgcatcctcagcctcccgggttcaagcgattttcttgacttagtctcccaagtagctgagactacaggcataggccaccacacccagctaatttttgtgtagagatcgggtttggccatgttgactaggctggtcttgaactggactcacgtgatctgccagcctcagcctcccaacgttctgggattacaggcgtgagccaccacacccggccctaagtgatgtttatttaaagtgtcagtctgggtcctatcagaagacaaaaatgacacttttttttttttggaaataatataaagaatatcaagctataggccgtgcgcggtggctcacacgtgtaatcccagcactttgggaggctgaggtgggtggatcacctgaggtcaggagttcgagaccagtctggccatcatgctgaaaccccgtctctcctaaaaatacaaagaaaaattagccgggcttggtggcaggcgcctgtaatcccagctgaggcaggagaatcgcttgacccagggaggcagaggttgccgtgagccaagatcgtaccattgcactccagcctgggcaataagaacaaaactcctttaaaaaaaaaaaggtataagacaaaatgcagtttcctagagctgagggagattatccaagaaatgacaaacttggaaggaaggccactgccatctcctcaaaactgacgtgcacaccttattggagaatgtagagtttcagtctactggagagcagagaagtctggtagtttgcctgggtcagtgctggtgtgcagtccctgggcaagcagggaacacaca

SEQ ID NO: 147 - DNA, 100696 bp, Human
  misc_feature (1)...(100696): n = A,T,C or G
ctacctcccagggcagttgttctcaactgagggcaattttgcctcccagaaacatttggcatatctggagacattttggtagtcataactggaggtgtgctactggcatctagtgagtagaggccagggatgctgttaagcattctaaaacacacaggacagcccccaaaacaaaggattatctggcttaatatgtcaacagtgctgcagcccagaaactcatatctagagattttgattcagtggtctgtgatgaggctttgaaatctgcatttctgtctatggatccaagtttttctgataaaagattggaaacttggtgctatcaatagagttggacttgttgaaaaacatcccatggaagggaatgcttaaggtaggctttgagtagggatagaatagaaacaaaagatgtaaagagggaagaacattcaaatagaagagcaaatcacacccagtaggataaaaaaaggctgtgaaccaacactgggccagccagcaataaatagtgagaatcatttgcaaagcaacctcctctttctgcatggaaggccaactgtgcctcatggcatgtaacttgcatctcccaccttagattttagctgacaataaatgcatgctatgtcattctaactcacttcttagtccccaatatgaagataaaatagcccacgcccactcatttttctaataatatcttccataaaatcccaaaatataaagaaagggagtgagaatgatatttcatcagatatatctggtttaatatccaactctgtctttcattagccatgtgagtttggacataataatagggttaaatgggtggtttccattaaataatgcatgtagagaaattaactcaacatcaggaatatagaaaatagtaaagatcagctgctatttactattattattatttattaaagtaatatttatctaagagaactatggcattatttaaatgaacagaaaaagtacaagttgggatttaagatgatggcaggttcttatcatcaatcacagcaactgattattttgtgctttgttttgtttgaaggggattgagaaaatcctgcttcatagaaatgagtattttaaaatggctccaggtttgaaactattcaccctcagttctcaaggtttttaaaaatctgaatacaatacaaaacgattcaatttggctgcttaatttggtcatggtttccactgtgtttctgtatttatgataagaaagttaacacacgtgagtgtgttttctaaaaaaaaaaatgacttcttttggctatgaattaaggtatataaatacataaaatatacactataatatttataataaatccttataccagctattctagtgtccagagttctatgaaacatagtttaaaaacttctggataagattaatatatattcccagcttgaagatgagtgtgttatatggtatggaatgaagaaggtcaccactctagttcagatagattacatcaatggttttctcttgactagagagtcaatactcctgcatggtcagagagtaggtttgtctggcatgattatctcttcacgaaagcatcttgactctttcaagatgtttgcaaattgattgcttgatgatgtgtcccagtatccttccagacaacagatttgggtaaatttctgcgttttcaagacccatttaaacttcctcttttacaaaagatgatcattacatttacttctatagattcactgcctaggagttcatttcagaattaggccctctatagctgtagctgttcatattctttcttccccactaagaatatatcacttgcttgcctggcctgtcagctggtatatgtgaaatgaatgtgagataattttgaatcatagcctaagctaaacattattaagaagacaaattgtccgaggataggaggaggtgaggattacaaagaaaataacaacaacaacaacaaaagaagaatgaaaatccatatattcttatattatcaggatggattagactctttagttaccattctaactcattttagttaagcctctcctatatactaagtatctcaataataatcaaataggtctcacagacctccccttttagatagttcatgaagaagataaatcactaaaacatatgttgagtcagggagatgaatgccaaagggaaaaataagatagggaaaatgtgtagaatgtgtccagagtagttgggaaatgttgcactgagaaggtgacacttgagtaaatgaggggacaaaggggcaatccatgtggccctctggcagaagaaccttctaggaagagaaaacagcaagtgcaaaggcctgaggacaggagaatgcttggcatttttgtggagtagtgaggagatcagactgattgggaaggattcagataggtgaatgaggggttgccagagtcagatgaagttggccaagtgtagggccaccatacattccagttagcctggtgtagtctgggttcatccctgagtagctgattatgtgcactatccgctctccctctcaaaaaaggttctgcttggatgataaattatatggcgatccttggttagtaaggcactcttaagatttagcttttagtcttagagacatgagaagccacggagggtttggtcagaagaggggtttcacatgacttaggttgcatcaggatcacttcgtcttctgtgttgagaataaaatattgagatgggttggcaaatgggaagccagttaggaaccgatatggtttggctctgtgtccccacccaaatctcatcttgtagcttccataattcccatgtgttgtgggagggacctcgggggagatgactgaattatgagagcgggtctttcctgtgctgttgtcgtgatagtgaatgggtcgcacgagatctaatggttttaaaaacgggactttccctgcacaaacttttctttttttttctgcctgacaccatccacgtaagatgtgacttgttcccctttccttccacggtgattgtaaggcctcccacccacgtggaactgtgagtctaactaaacatctttctcttgtaaattgcccagtctcaggtatgtctttatcagcagcgtgaaaacagactgatagcagaaacctatgggattttcattcgagactatgcaatgcagccagagagttgagttgtttcacttgaggacatgtagctagctggtggtggaaatggatctaggattaattctcctgacttccagtctggacttcttcccacagtgcccagtttctctttcagtttaaacttgagaacaaatagaatgccttgctcgctcttttcaggcctattaagtctccagtttgatggcacaactcagttccttcctcttcccattgtgagaaataggcatgacccccacaacctccccgaacctttttcccctttctcctgaaatagctcattttgcatatattaaccaggaatttttaggactttctgttgaacttctgtatttatacttctggctcttataacctctacagaatactgaatttcacgtgtacagtacatatttattaactcatgaatgtgtgatagaagcaaatcaataaggatggagtctaagtacagatgtgaatatatgttttatgcctgtttaaataggaatatgtgtattaattggaattaaatggattcccatgggtctaattatgtctgtgaattcttcaattttgtttatattttatttccacttgattcttattttatttttacaggaattagccctggtttttgatcgttgctttcctcagttagagtggctgagaggagcaatgtatgtacagattatacattttttttatagtcaactacaattgaatatcagagaatgcactcaaggcattgagatatatatgtgcattagattctgttttaaatatgtgtgcttgagatataaacttgtgggtgtgatatggacagacatatttacacacgtggtatttcaagtagcctgtatgcccatggggagttactcagacagtgaaattaaaatttatgttatttctaccggcccacaaattccagcaaatttggcatccaacagggcaaaatagattgtcatataatgtgcttatctctcatgggaataaaataagaataagctaactctcagggcatatgtaagaaatgagtggacaaaaagcattttataatgtgttacgaaatgtaaggtggtatttattgtcttgatttttttattgcacacatatgcttgagatttcttttctttttccccaccgtctagtgcccataccttattctcagccctgtatttcatatgacaaacaaaaagtaattgggttattttaaggactcctcctttgagtgaggtaggagctaggaacctctcagtcattacatgtgggagtccgcccacttttggttgggtgtgtgagaaaggggcacagatatactgtcagtgcccacacttgggtataaaagaagcaaaaacaaaacccacagtggattgcagagattttagaggagaaagataacgaagagggaaaaaaaatcaattgtttgaatgtgggtattcaaaatacttaacaacctataagcaaaggctcagagcactttaagtagacacatgcagtgaagtggtgtctgttctgattagaatgggttaaagaaaaaagctaaaaacctcaaatcctattccagtagtcaactctggattgttatttttaaattttattgcaggaaaaaaacttagttttctttaaattttgactttactttcttataaatattgaatcaaactttatgcatcagaaccaaaatctgtacatttctgcaaatattttttgctgatccatgcatgaaacaggtacaaggttttatctatggagattcaagaaagggacacacctctgacccactgtatttcttatttgaactcctgaatctattataaaagttgctttcccatgtagttatttgaagtcctggtggggcctagcggaaccaataatccaaagtagtggataatccaagaatgtcatttatatttggctttggaatacattaccagatgttactctagcagatttcctttcctaattaggcctcacttaaagtaggagttaattttgtcttcattagctgtttccaagtcagcaggatggggcaaggaggaagcctggggcatgctgggtatttggggggagttggcccagtgctaaacgtctgtggtagatcctgttcaaagaacaaaattcaaacacagataatcaagttgatgggaatatacactggaaatgtttatgaacaccttcttgaagaattctcaggcctttgtcaactctttttttttttttctattaatcatgagtgcaaaaaaattccgtaataggaattaggcaaataatcacattaaattttgtacagaaaaaaaattagaggctcagagaggttaagtcacctctcacacagattgatctctaagtacacagtacctaagatactgaaactgattaatgaatgataagaagaccccactgtttccttcttattgatgatttgaataatgaggaagcgagaattcttctggcctaattcacattaagagagccaagataatgaagctgtgattaaatggctattaaactatttttatcaaacagagatcaagcgagtgtgagaatctggggacacagagtgtaattgcaatcctacaggatccagaaaaaattactaacataagcagggcatggtcctttcataatagctcgcatttagaagtctttgggataccgcatgcagtattcactctgcatttctcccttcaggtggcagttagcatctcagagtccctcctctcctccttaatttagtggatttattgaccctctgtgtgcagttgggtgagttgaatgcactgtctgccacaccatgtataaccagttggaagatccttttgccaactgtgcacaaaggaagaagacccaaatattacaaactgggttcagaattttaatgtagaggtgcccctggctacctgaagggccagaacctatcttctttcaactatgccttttaaatgatgtcagactagtacaggtcatagagggactcagctgtcccaaagagcagagataaaccttctcattttgttgactgttctaaactatcatttattaacgacacggtaacacttaggaattgttgcagattctaaattttgggttgttagtataaatgcatgtgtatcatctgtcactggaaattctttacaccatgagtgagtttttgttgatgtgccttctttcttcctagagcgcccttagagaataaggtgttacagtcacacagacctttatttaggtcggaagaattgcattgtgtaaggagaacccaaggttgacacccaccatgggaaatgctgtttgatagccacagagctcaactgtggaaatgcccgttggcctgttttctacctttccttccgcctctgctgccagctccaaggctgagcttagtttgtgcagctgtagatcactgtctaattggtgacctgctctttcttcctccctactctgcattttcttttcttttttccccaactcggatggagctaagacatatattttttgtaaaatagtattttcaaacaattagaaagcagtatcagagccgagtctttgaaaggttatcttgcaatgtcagtgcagtgactaatgtgtttctataccctgtcacctgtgaacagacatgtgtgagtaggccagtgtgcttcatctgcggtgactttgatttatttgctctgtaaattgggaccaaagcaataatgggaagtgacattaattgtttaacagagtcctctttgtcacatccattgccttctccggggtgtttgattgttgaaactcatgctaaactaattgaaattgccacagtgaggggcaatatccactcaacattatataaacacaaagtgtcatcagcaaatagcaagttttcttcccagttttctatgattaaagaaaacacagacaatttgaaacaataactttttccttccttaattcactaaaaaatttactaaaataaatggtcttggagcacctctgtgagtcacccacatacagagataacaataatatcgaataatcatttgtaatggatacagaccgtaaataatcattacagccctatggtagatactggttgaatagtagcccttactacccacatactccaacacacacacacacacacacacacacacacacacacacacaagccgccatgctaatctcccatcttacaaatcctccctctcattgtgtttccagtagagaggggaattaaaatagttggtggtttaatcagatcttataaattaattatgacattatcaagctccaatatttttgccattgtatttgttatacattctcccagacttattaaagaaattggagaaaactggttgatttaagtgttctttgtcgttttaacttgattggaattatcatagtttgtttacactagggatagagctaaggcgccattgtattatgtgattgaaagcaaataacggcttgtagtattgctggaaagccaaacacaaaatttacatcatagtaaacaaaattatccatttattggtaaatattcttaactctttttcttgaactgtttttgaacatcaatgaaataagcctttttgaaaaatggaatacttggaaaaatgcccaatttactgaaagtgtgtatatgtgtctgtgtgtgcatgtgtatttgatgtattttctaaaattattagataatatggagatagttataatggtgtaaatctcatgactttgagatgattttttaaatacatgtatttcatttaaatataattgtattcagaacagttaaataacctcaatttaatttttgtatgtgggggaatcaaagaagggagttattgaaatctttggataccagattatgatcctgggcagaaaataaggaatatcatttcagcctatttaatattagaattacatatacagggtcctttcaaaggcatattgaaagaaggtagattgaagaatctacctgagggcctgagggtattcaataagcttcagttattgacttgtgcaatttggatttttacaattggtcagtttatggaagtaggtggcaccattttgaagttaacagttaccccttctgattaggatttgcctcctaaactagaggtttggttgttttttttttttgagacagagtctccctctgtcacccatactggagtgcagtggcgtgatcttggctcactgcaacctcagcctcctgggttcaagcaattttcttgcctcagcctcctgagtagctgagattacaggtatgtgctaccacacccagctaatttatatatatgtgtgtgtgtatatatatatgttttttttgagacagagtctcgctgtgtcgcccaggctggagtgcagtggcaagatcttgactcactgcaagctccaccccccgggttcacaccattctcctgcctcagcctcccgtgtagctgggactacaggcgtccgccaccacgcctggctaatttttttgtatttttagtagagacagggtttcaccatgttagccaggatggtcttgatctcctgaccaagtgatccgcctgcctcaacctaccaaagtgctgggattataggcgtgaaccaccgtgcccagccaatttttatatttttaatagagacgaggtttcaccacattggccaggctggccttgaactcttggcctcaagtgatcttcctgccttggcctcccaaagtgctaggattacaggcatgagccaccgtgccctgcaagtgcattaaagttttaaacttcagacacaccatgttgcacccaaactcaaatccagggacgtgagagggatgcattatgcaaattaaaaaacgtcaattaaagtccctggggagtacaaatggctctttttggcctcttgaatccaaaagaagtccttagttttactgctggatggagggtgatcaggaattaaggaaaacaatttttatgtgaaaatagaatgtatacgtgataaaggcctgcctaatttctctagtaatacaatttgattttctgattagctatcttattctgtgattcttgtaattttgtcaggtcaattaactggagttcagtgctagagagaaaggaagtgtgggtactgctagcttcattagatgtcagcagctaggtgcattttataataaaatctgtgtgggataatttagcccatattgttaatgtcatagcatacagaactttcaaaagaagattttggaagcaggtcagattgaacaaacaatgtgaagtgctaaaagaaggaaaagaaaatggtccagaagatattgttggcaataaatgcagatcaatgaattatttagcaagtaatcattgattagctatgccatgtgcccagtgttggtactgtttgtccacgtgcatagaatatcacacactgccttgttaacaaggtacatgtttggaagtccttgaacattttttacagagtactgaaataaatattatattttataatgaattgtttacaggttcttcccttccacagtagtgttattagagggacagattttgtcttgtttctttttgtatctcccacacttcagatgtccctggcacagagtagatgttcaaaaatgtttgttaagtgaatgattgaagattagctttctatgagtgtgttggtgggaatgaatcaaaaacaaggtagaatatatttgcaggagccactattagaaataatagtgcactggggccgggcgcagtagctcacgccggtaatcccagcactttgggaggccgaggtgggtggatcacgaggtcaggagatcgagaccatcctggctaacatggtgaaaccccatcttcactaaaaatacaaaaaaattagccgggcgtggtggcggacacctgtagtcccagctactcgggaggctgaggcaggagaatggcttgaacccaggaggcggagcttgcagtgagccgagatcgcgccactgcactccagtctgggcgatagagcaagaccctgtctcaaaaaaaaaaaaaaagaaaaagaaaaagaaaaagaaataatagtgcactggaatagtaccccagccacaagaaataagtgcatttaacaaacattacaaagtaagactttattcagtgactgatcacagaaagaagagtaaaaatacgtccagagtttgggtatgaagaattgttacccaaactaaagaagtcaaaagaaatagcagttttgttgtgaaaggtatagagtttgggttttggggatgagggagctattatgaagtagaagtgtccagtaggcagttcgagatttatgactaaagttgggagagatgtcagggagcaaaataaataaatgattttggagtgttcagtgatgagattataattgaaaccatgaaagtgtatagttgctttcagtatagttccactttctggtgttgttcaaataaagagctgtctagacagtttggggggtatgctgtataggagattcaaacactatatctgaaaatgaaattgatggttaaaattctctcaaggtccaagattctctaaatcttttcttttactcagggaaagaaagaaaacatgagcaagtggaaaacacttctgtaaccaagaagaattgcatacagcagttttagcactgacataacaaatcgataaattaggcagctcaaccatcagagattagtagagtagaggtattcattaattgtgtcatttggaccaaaacatgaatttggagtttgagaaagacatgatctttgtgttctggaatgggcattctagatttcacgtatggttcactcatttggtcaaacatgttgatgcatagtgttacctgcctcccagggtcaactcacatcttctgtttttttctctttctgcagaagatagatgaagagaatgaggcaaacttgctagcagtcctcacagagacactagacagtctccctgtggatgaagacggattgccctcatttgatgcgctgacagatggagacgtgaccactgacaatgaggctagtccttcctccatgcctgacggcacccctccaccccaggaggcagaagagccgtctctagtaagaacccttcctactgtttagcaggaattggagttgcctctggctacccgctgcatgggtatgatgtagtcacaataaggtttggattttttcatttagaatgatgccaaagcaatccccaagcacactcagagttgcaaattgtgtgattctctgtttaaaagtgttgataatacacgtcttcgtgtagtcttattgcagttttttttactatcttttgctgttatgtgtgtgtatttttctatcttagtgttatttatgttcatgatgaaaacttagaaaatgttggcaactaaaaggaaaagactaaaaatttcacctgtgatttcaaataacctctcatataaaaatgattgcaatatcctttcaagatatatcatgagcatatgggttcaaatttaaatacatgcataatttttaatggttgcatagtattttattgtatggaaatattctaatttattttgcaatcttttatgggtggatatttagttttttcttctatttttcactatttcaaattgtataataattaacatattagcatttttattcttatacatacaatcctagaaagaattggtagatcaacgaatgtgcaatgttttaagactttggatccatatttcttatgaagattgaaaaactatagcacgtttgccacccaagttacttaaatttatggtagacaatgaagactgaatttgttggaaatgaagagagaattttctgttcaatgcagtgcttgaccagagttttattagttctaagacacagtttaccttctcatctatgatagccatttgtcatttgctaaaaatcagacataaggacatgctgtgtaaattatgggatgccatgatcctccagactctaatatcgtgtttggcatgccatttagaggttgttactctcctatcactaagtttttgaatgttaaaaatactctatgcaaatatatggaggccctactttgagtccattggattttgaggtttctcatatggagaatatctcataagtaattgttatttattctccaatttctccatttgttagtgtcattggctttgctccctagtaccctgatttctttccattgatatcagattgttttcatctattcaatttgttcatttgggaagagcagttgactcagagacatactgtatgtcagaacagggaagtccttgagggtcatccagtgaaatgaagaaacagaggtcaggagacagcaaatactttgcctgtgtcagaacccacatctcctgatccacaggccaggactctacttacaaatcctttttttcttttctaaaatcagtgatagtcattcttttatccaaacattctttgaatcagtaatttcatacaccaggttatgaaacacggttcaaagcatcacaaaatctttcatttgttgccacttgacttatttggatttttagaaagaaaatgtgtatctattctcccccaccccccacactccactcccatgtcttcatttagcaaggcagcttttctcacctagtagtgatttggaaattattttagaaagatgttttttgctttatttgttcaaaaaaaatatgtagacaacaccaagtccaatttatgcagtaatcccttatggctggaaattttgagattttccttctacttttcactattatttcttgtataataattggcacatttgcatttttgttcttatgcatacgattctagaaattgaattggaaggaaaggaaatattttcatagttggtagtgtaatgccaaacttttttctactctttaaatatcatatttcctgtagcactattgcgctaaggtgtgacataaataaaatgatagaattaacttttataattataataaattacatttaaaatttcaataacttattccaatgcttaaaagatgcataactttacttgcttttccctttccctgataatgtttctagcttaagaagctcttactggcaccagccaacactcagctaagttataatgaatgcagtggtctcagtacccagaaccatgcaaatcacaatcacaggatcagaacaaaccctgcaattgttaaggtacaaatgtaaattttttaatacaggggggatgtaccaaaggattttggcttgaagcagtaaaacaaataagtttgtaggtattaattcagctgggaccccgaagctgcctcataatgatgaaatagattatgaatgggattccgtaaacagcgcttgagctactttaaactaggcagagttcatttacgcatcgtctttgggtgtttggaatggaagtgccactgtctgttagttcttgcccactttattgttacctgcagcattgtgggccacggtaaaatttgctgataagctggtattatctatgagtggctttaagatgcagaattgctgttttgctagctgtctaacctgagaaagattgcttttggaatcaccacaaaacatctatctctgccattaattggatggaatgctggcaatgccataattcagctagtgggctgtattaaacaatgtttgtcttgctattcactgtgagtgaaaacggagcattaaggggtacttaagagagttgtgagtactgggcgtcagcaatcagtggcaaattaaggtttaagccagccgattttttttattcacaataaaggcgctgtagggtcttgttagttacatgttgctgagtaggaacattgaaatgtaggagaaataaaataaaaagctgcataaatgtcatttaggaattttaaatgtaattttctttccttgttctgcaaacagttattcacagctcatagatctagtacacttagactgaacacttcattgaaaaatcccatctctccagaaaacctatatccattctgataaggttcagttcactaattttagctttctttatgccttgtttttaagactgagaattcatggagcaataaagcgaagagtatttgtcaacagcaaaagccacaaagacgtccctgctcggagcttctcaaatatctgaccacaaacgatgaccctcctcacaccaaacccacagagaacagaaacagcagcagagacaaatgcacctccaaaaagaagtcccacacacagtcgcagtcacaacacttacaaggtaggctggggaccaaaacgagctgttggtgagggcactggaagcaaagaaagcacatgcaaagtctgagaacacaccaacttcttgcttccgtcccatcagcgtcactctgtggaaagagaattcagcacttattacagagcgggggaagaaacctttctttggacacaggttaaacatattctattcagctgataggcagtctaattcacaagcaccaaaagactcctgaaatgttagccaggtggtgaggaattgcaacatcacatgatgtttatatgaatctcagaatagctgagataattgaggttatgaacaagctgggctaaccaattcattatagagcttttattttttcccttccagtaatggaaaaaatgaggcaccagtgatttgttatatacaccttaagaagtagtaaatagtgtttatgcagcctctcttgattactaagtacattccttttctaattcttcttgttctttcttcttctttctccctctccttctttctccttctcctccttcacctcctgctttctccccttcctcttcttcttcctcttccactccttcttccccttctcctccttttctacaaccacatgctatgctcacagattttattctgtaaataaagatttgaaaaatcctgattgttttctttctatttaagaaagtgcctagattaaactaaacatctgggttgatttttattatcaccatatattgctggagaaggctgatggttctgaggcagatcctggtgatttggggaaaacctctcttggcagagatacaattttctatcttttaggctcctccttctcaaaatgtcgtggtcttagaagcccaaagaccccttgaaatgggcagttgatttaaaacatgccagcttctactttaaccttgtggtggaagtaggcatattataacacaccaattataaacatatacctctttttttttttcactttcattttcccaacttttccttttaactgcagagtgggagccagtgatttctgctttgaaccatgattaattcgtgtaggtatgctgttattgctgctgattcaatacgctttttttccccagtgttctgaattttcttccctcttcactacctcagtattagcccaggattttcagaagccttcctgtaatattttaaaatggctttccattaggttttccctggtagatatctcaaatccactgcccatcactttctgtcagtttgggaaaatataattagtgaaatggaccgcattctcattgctccagctggatcttcctcataagcactagaacagtttttcctggagtagaaccactctgccataggccttgttggtcatgaaggcctcaggtgaggggaagcagatgagctcgctctagtgagtgaacaaatgaattcaccgggctactcctcaccctgtgctggtcatgcatgcattttctggggccaaatttaaagtccttgtaatatgtgacccagcccggcagcacaggttttaaagttgttttttttttcttttagtaaacttttacaaatcatgacaatgaagaattaaataggcctttggaggaaattttctttagatgagactggctgtatttggtatatatctgtggcaaggtacaaaacgctcaccccagaacaaaacctgttgacaaacagacaaaattctttagttatgaaaggcttaaaagaaatgaaacatggctgacaagtaagaactaataaatgctcaacttcagtgattatttgaattattattcaaaatcaaaatgcggaaaatacatgaacaattagagataactaggaggatcgattgaaattacctttcttaaggtgttgtaatttttttctcactgaacatcacgtatgatctccataaaacgttttggagtcaggttcttttccttaggatgattgtctagccatggttgtgtgttgatgtctcatttatttgttcatttattcatgcattcacccaaataccacaatctacatgaaaaagacacattcctgactttaaggatcctactagtctctggtctaccagtcactggaacagggtggattaaactctcaataaaccaaatcaatactcctctaatggtggaattagagagtctgggtttattcagggatcggattctgtatgtggtttggggactgtccccttcttatggctctcatttcctgtttgcctttggtctcattaactatgactgttgccatctcctctcctttcattgactttgaccttacctgtacccaacaatcagaattcgagagtcttcctttgagcatttcaaatagcctaccctacctcttgaaaaccagaatttcagtgactgattttcaatgtacatttattgtgtcacatagcatatagttaatatctggttatattttctatggaagttgtatgaattatcctaattattagttgagtatcataaaacttggtaaagtttcttcataaatggattctttttgaaaaacttgttatattagacatactcaaaaattaatgtaaaatcagctcatttatctgtgtaaatgaaaaactgaatcaatgtatctaatttgttgaagatatgagcttcatatttctggatgtatgatataccattcaactgtgtagatctaaatctataaatatgcaaatactatttatccaagtaaagtgtctaatttcaggttaatttggacatgaataatattttcacatttcaaaaaaattgattgctggggttgattaaattactttaaagtcgttgaatgcaatttcttttgacaataggataaaggaaacagaatcttggccaactctgtgagtaactattttatggccctgaaaatatcacttagtatcattgggtctcagtttcttcaaccataagataagaaactttattctaaagacctttttggttttgacactatgattttcattacataaataactaccacttgaccttttgaaagtaattattttaatgagaaaaaattgacataaacctacatacacataaacatatgcttatagataagcatagatatacataatacatgaatgtatagcccaagtatgcctctcatcatattttcccctccttctgttcaaaatacaagattgccacagagaagcaattgaaattttgggtgagaagattcttaatccacccttcattattgggaaatgcctcctgtaggaggtaagattcagaaaagcacaaaaggcagtagttagcctctttgcaagtctacacacctttcaactgattaacatggtgttttactttagttgtctatcagatttggggatctgaaccccttctaaaccatctggatcaatgcccacaatttgccatcatctctcaattaattttcagtgagtggaatagttactgcatgagctttggcctcatagaaataactattatcagggctagatataaaattatacgttttaggagtaaaatcaactgaatattcataatgttctgtcgccttatagttgctctgctgttttcttgtctaaacaaaccgtgtactgtattccaaattaaaacagaaaacattatttctctctgatggtatgatgcaaattttgtatctgtaacagggagggttcatttttggaaaaattctattttcatatgtgttttcgaatggtagtttactgatgcaaacgctgtttggaatttgttttagcataatggacttttgtctgactttgattcaatattcagagaattccttagtttagtctttgagttttctggttgtttttccaacttgactgttgtggagagaaaagaaatctaaaagacactcaatattacataattagtttcttttttttttctttagccaaaccaacaactttatctcttcctctgaccccagagtcaccaaagtaagtattaagaaatgtaaccattttctgaaagggaagggggttctaatacatttggctacagcaactccatttcagtttgtttttataaatgtgccatatcttccagtgaccccaagggttccccatttgagaacaagactattgaacgcaccttaagtgtggaactctctggaactgcaggtaagccttatatttcacttagaacttgtgtgtgtctgtctgtatatgtgtgtgtgtgtaataagataacagagtgtactgtctatgtggttaatgaaattaacaaagaatacaaaattggataagaagttatctgcaaatatttccagttgtttatttaaaaaaaaaaacctaataaaaaatattgaagcgcttaaaaaacttagactaactgaagagctcttaggcaaacttctgagttggttgcaaatggtgcccttgcactaagtgctttaagtttaggtacttgaaccccaccaaaaagtgagtcgtgggatgtctaaacaagaaattccttggctctggccattgctgataaggttaaaggaacagtacattaaacaagatgctttgaaccagaactatggtgcctacctgcaccgtggtcattgttgctagtttaatttcacactttgtgtttgctaaattaccttcttatgaaaggtctaatgcatgattgcatgacttggtcaagcagtagagtagttaatttcatggtgtagatatatagtgtatgtgtgtgcagactcacacatatgtacatatatacatatttttataggcatgcacacatagacacaaatctttacttataagcatatacttaacatcatttcttaaatacataacactatttcttaaatacattataacttacatatatgtttaggagtagcttttgtgtgtatatatgatatgcagtagaggccttcttatctgaccagtgaggaccagcaattggtgggtttattaaaaaagttgattcaagcttatactgttttattttacctttgcttaaaacacaaaaatatacattcaaatattacagttttggtagaagatggagatctttaccttaagcttattttttactatttgggggtctattgattcatctttcttgtataaaccacactaatatattattatataatacatattatagatggtagccactttttattgcttgctccttgaaggaaaagattagagacattggtatggtagtctgaattcttctagatttttataatttttcaaatattttccaattccacccatccacaactaatttgataacacttcttttagcaatgaccttttttgagttttttttttacaggaatatttttccacactcacatttcattcatttacaggagattttaccatcttacataatttcaatcaccagtacaatgcacatgaactgtttagtctattggggtactgagacacattgataagtagcatgaaagcaaatattatttactggatatgttccaccaccttctaacaaaggtaggcccagaaagcagtttttagtttgttgagtgtgattgtaatagctgtacagatataaattggggaagctgaagtaaagcccaattgcatttatgtaacagaagtgatttagagctttggaaagcaaggagatgaggacttgaaagatgctgaatgaggctagaaggtaaagtttggaaccttcctggagaataacataaagaggagattgagggagatttgttttttctctagagatattctgggcttgaaatgcagtgcaacatataatgtctacaattgtcatctcctctaaaaatcttcagcaaaattggtcgcttagtagtgtttgaagattgtgacaaacactaattgtacctagaaagaatcacaaagggagaaaaagagttatcaaagggaaaacactgcagcatagttcaagtttaaagacattgattggccaaaagagttttttaaaatgataaaggcagttaaaggactgacagaaatatttaggcaatactatcatcctagtgaatgacagaggtgattcatggaaaggaatgtggaggaaattaagctctccataggctaacctgacttggagagccttcagggaaaacaaacaaacaaaaaaaatgcacagattttgaagcgtaggggtggaatggagagaagatgttgatggagcagaagcaagaaagcaggaaaccaaagggatgctcagatgacaatgaatttggcaaggactgtgaaatcaataaggagcaacaagatggcacacacactttccctcctggatcttttgattgctaagactcttttctacatccttgatctcttgtacacctcagtttcctccatttcaaagtcatattcataactactgataaaattgtctactcaaaagactaaaatataggttgaaaaataaaattgccagtatgcaatcatttttgacacacaaaaatggaattttatgtggttcgatctgaagtaaaacagtttataagcagcaaagcttcaattaaaagtagtatatcgtgattttaaagagcagacggcatagcttggtgaagtttacaaaaccttggcttggatgttgggcaaacccaagtttaaattctgaatgacctcccatctagtgtgtggccttggtccatttacttaacctctgaaagactaggattcttatgcatgatatgaagatggttacaatacctacatctcactgggtcagtgtgaggattaaatgagataaaatatgagtgcccccttattatataagtactcaataaatattagatatttaattactaattctgagttaacttcatttgcagtggtcgttgtaccttacttcttatctttccaacttttgactggtttcacctcttcccttttattgcccttgctgtgtatcctctttggcaatctcatatatgaagttatttattctttttctgtgcctcccccaccccctactattttcacatcaaattgaacaaatactgcttttggtgtaggtatggaatttaccaaatcaaggcagaacactcactgatttgagattctctcagcaacagctacttctatgactacaatttctggcaatcaggcactccctaaataggtacttcacatacagtatcttccttactttctgcccatttcattgttgaggaaagatttatacgttgacacaagctatctaatggaccctgggttcaaagcaggtctgcctgaagagaacttatatctctttcctgaagtctgaattttaaagatagtaattgacatatgttatgttaaataggcttcattgcacttgccaagtgtcattgattggtactgtctgccaggagcatcgtgttgagaaagattctaaggccaagtctgtgctcatggggaatgtcatgatcaattagtgatgtctaccataggtgcagcaggtgggtggcaagggtagaaatagcatttatattggtggtttgttgatccttggtctacaggcttaatcagtttgactgcagcagcagaagtgacccaagctttggctcaggccttctggtgtcttctttttctttactctcacaaattttggtgaaattttccaaatgtttaagtggaaatgtaaggagtcaacaaaattctaagacctccagaataatgcctctgccccatctgcagtgtctttgagaaacaggagggatgagataggaagtttgctttattaggtattgccagctggtctgacttctttgtgattgtcctaaactagctcattttggctgataaaaaaactcttctcttttacaggtgtaaaaactaatttgatttcaaaatagctgttagtaaagcaagatgagagaaaagagaatgctcttttggcagaaggcatttaaatctattgcatatggagattttcagagtgctacacttttttgtttctgaaatgggaatggcaaagcaatgtcagctcaacaaggtgacggtttaaaccacagacacgaaggaatttgggtagggaccaaagtgaccccaaaattttatgtatatgtatatatagtttttatttgttattactgtaaacattgtaacagcagtagaactattttataactgataaaatgagaagagcaaaaaatataatcagatgtcatcaccctaaaacaagtaggccttcataatttttttctccattgatatatgtttttccacattattttcatcagaggggacatgtgatttgatgttatttattttttacttaattttttctctacgctttaatcagcagtcattcaaagtgtactttagtagactcacaaataaacaacaacaaaatactcattaaccaatttgtaactaccacttttatgttgaattttacattgcctttgtggactctcaatttaaaagttcactttgctggaaaaatgtactgacaaacagcataaatattgacaaatggctgtagccttttggcatacatactccttgtgtatgtgacatatctttgggaaagtggaccaaagtaaaatatgggtagttgtcagtagttttaaaaggaaaagcatagcatcagagaactggaaggtgattttgacaggccacataatctattcctgtgcttcaagaatctaagaaaggaagacccaacaaattctttttacagcccattccaatgcttggcgactcttactgtcagagatttcttccatatttcaaccatattcttcattttctattttcaatttcattcattttgacccagtgtctataatgacaattcctttattcctaatttttcttttctggaaatggtaccatcctatttcttgtaagccaaggatagcaaaggaattttctctcccacatcagctttggggtttggcaatagccacctgaaatgccaggttccccttacccatcctctatcccagctctgtggggaatttacacaagggtcaattaatgatatcttcatcttccatgagcaagagttggggaattaggcttatgtcataggaatgttctgaagcttttctccaaggccagtttgttacccagtaaccaggggtgataggagaaatacttaaaatgtactggaggcaggccactcccaaatggactgtggccagccagaggaccagcagggtctgttggatagtcttctgtgccaagtgtgaacacttcagttgctgggtcttgtggagctccagtgagtcctggggaagtaggtgcagaaggagagaacactagggcagcttttatctactgaatattttaacaactgctgtagaggtaacggttggtactcagtgaatatcagctttccctctgcactcttgacacccactccaaattcatgaggcctgaaatatgtgagtaggacaagtcacacacctctctttgctcagtcttcctattttggtgtgtttttaagcaacttagaaactcatctcctaattttttttttcttaaatacctgaattggcatgcaacatatgcaaaatcccactgttaaacaaacttgaaagtaagttgcagattttgcagtagattctgcaaaatgttataaactccaaaaaaaaaaaaaaaaaaaaaaaaaaagatgccattggtgaatagcacatcacaagaaacagagccagggactcaccatttatcagagtcattcaattaaacaaacaaacccaaaagaaaactcctccaagaaaatcgtttcatagcgataatgaaaaacaaaacaaaacttgtctttgccttttttttttaaataaaagggctgtttaaaaagatgactgtagagtatgtaccacttctcccagatttgctgtgcagaagtgcgtaagtgtgagtgatgtagaggtgcttgtttattatggagcacatttcaatgcagtaatcataaatattgctaaggttgtgctctgttgaaatatgacctacatactcttgattgtttgtgttatgtgatttgtctgacacccattacattctgggtaatagcagccatttgttgctctgcacagcaggctcttttgacaaaagaaaataggcggcaataaaaaagctatagtctgaattacattctgcaccgagctgcactgctgagagtttgtgcaagtgtgttaacaatgctcggaactgcctcttgtcagccttcagcctgtaatggccatctgtcctcacataaatctgtcaaaacctgctaagttcaagagagagcatggaatataccttgtactgtcaacaccaaaatgtacacattccccagaaaatcaacacgcaggaaataatccagaggttatgggaggcattagcactgttgatttgggcttgtggcatgaaatcgagagtccagagattagtgggaagatgagcaaaggtagtggcatcaagggattgagcactgacctccctcttacttcaggggggaaagttgtgggtagcggaggtgaggctagagaaataacaactagttcagaggcagcaaggggttgcctgtctcatcagcagctctgaaaagtttaacactatgttcaaagaaagaaacatacttcttgcacctttgttttgttttgtttggctttgggtctcaactgtatctggagataggctttccattagggaggcacttggtgataggaaatcttgtcatccgtgagatttctcaatcttgctttgagatattctccggttagagatgtttcagtaaacaatgaagggtttagggaattagccaaattatttttctctctccatctactcactaatcttgaaatatcttccattcaataagcaaatattacctatttgtttcaacaaatggtgcccgcagaaatttccagcccttatatttttactcacagggcatatttgatggtctctgggtgtttccatcaattttaagtgtatatgcagaaaaatatacttatgtcaaattttaaagaagcgcttttctattaaaatcgattgtgaagtccctggaggctgagtccctgaaatagcagtatctggtgtcatatccagcacatagtaggtgttcaacgaatgtctgttcaatggccacaggctgtctaatgtgtgacagaggtaaaaggctttgtttttaacccaaagaaagtacaatcaaggtgtcgccactccccagagcaacttgagaaccagttatttaagcgataatgagcttgggtactaggacaagggtttcaaattttcaagactcagaaggatttctatatttgaaatccctagatacctgagctatttttagaaccagtcgctctttaatagtggcctaatttggcgttcctgaagtttaaggtttctttttataaatctaaaatatctgtcaagatatgtatacctgagagtacaaagtggcgtgcggcagacactctagggctggggttctcagatgtggcctgtgaagcatctcattaaaaatgtttacccggtttcccaagtgattcttgggctgctgaaatgtgagacccacgactaaaggagaatctagaaaaaataaaattagtacaaaataataatgcaacaaatgtgcccaagcaacatcctgcaaagcgcttataactgatttggaaagacaagacataattcacattcgaaaagagataagcaaaaatgtatagtaatatgtgattggtatcaatagagggatcctgacagtaaattactaaagaagtaaaaattaccctagcttggggtgatcatgcaaagatttacggagttggatatgaggatgttgaatgccatttcctccaattcaagggctatgtcattggacatatttgattggtatttactcagcaaagagagattattcctcattatttctttaagtatcttaggctcctaggaggaatatttgagaatgtgctttttttttatctcgctgggaattgcaagtggtaattgaaggtagcatgtagaagaaatcagtatgcatgaataaggcagtgcaattcgtaaataaagcaagtgaaaatggagagaaaagataagattgaccaaataggaatttattaggttgagtaaaagacatacttatctatgagagaggaaacaagagttgagtgtgcctcagtggcacagatgtttcattcagtcatgtaagtcacttcctttgctacagcaaagagaagggcaaagagccatccaagagcagctgttaacaaagggaagcctttttgagactcaggtgtgaccatgagtggagtacagtgtcccattcactttgtgtttgcgtttctctgtctttctgagattttctgagttggaactccgaagtcaaaccaccttgcatttgtataccttttcttctctcagggagaattagctttgaataataaaaattgccaaatattggtgtaaaatatttcactttagagaaaacattcattctttccatttcttaattataaagtaggagagtgaggcagcatcttcctgttcatatcaaaatctcatgtggctttctgtgacctacttggctctcgatatatgtgtgttgtgtatgtctgtgtttattttttttccagcaaggtagcatttttttccttgcaacttgccttaagtctaaccccaggcttgttagcagacttgaagttctttttgctgaatggtattcaccccgcctcctaaatagaaaatgtattgtaaactaaaatgctccattgtaagcgtaaactcatttgaactccagcctgcccttcttcaaagttccttggactctggagccacttgacaatggttcttcctcggcacaaacggatgagtagggcttacttgggggaaaactcaacagaggaaactactacgcttcacggactctcccacagtggtttctgatgaaatgttctgccctcctatagaaaagcagaaagagcaacagctgatggctgttcctctttcttcctttttatttatttaattagttagctgctgaagcttggctgagtttcaatccctcagtctcataaccctcccttatgttgtgctctatataaaatggtcggctggcactgtgatatttagtgttactgttcacttaggtttctgttgcagaaccatattttagacagaatgtattagttatgcttacaagaatgtattatacctacattagccatggtttactaggttaatgaactgtggcgacaaagaatcactgccgttaagttgtagagttgctctaggtccctgcattcggctgtcgtatttcactgaacttactttgaagttgcttatgtcactctcaccattgccccatatttcctgtcatcccatctttttttttttttttcttctaagttgcttaattccttggctccaagggtagattctcttgattggacaaagacccctgagctgcttgcatcctctgcaatgttctttgcagacaaatgctaccaaggctattccgtgattcctcagtctcactttgttaattttccataaagcagcccatacaatccccttgaaaatgcaagctttggtaataatgcctagttccgtgcaggccaggggtgatgcattcatgttttctgggaagcaggatttgttagcattggtgtttgaaatacaaaagatcacagcctcctgctcagcactgtagatccatcttttcttggtgacagaggcttaggggatgagtcagtttttcaggccttgtcatgaaattagtttccttcttcttcactcagtttgaacccttgtctgaaatcttggaaaaattagaaacatgtgtcttcgcatttaagaacattatctctgtctcttttctttctctctcttttttttttttttttaatttttgccttaggcctaactccacccaccactcctcctcataaagccaaccaagataacccttttagggcttctccaaagctgaagtcctcttgcaagactgtggtgccaccaccatcaaagaagcccaggtacagtgagtcttctggtacacaaggcaataactccaccaagaaagggccggagcaatccgagttgtatgcacaactcagcaagtcctcagtcctcactggtggacacgaggaaaggaagaccaagcggcccagtctgcggctgtttggtgaccatgactattgccagtcaattaattccaaaacggaaatactcattaatatatcacaggagctccaagactctagacaactagaaaataaagatgtctcctctgattggcaggggcagatttgttcttccacagattcagaccagtgctacctgagagagactttggaggcaagcaagcaggtctctccttgcagcacaagaaaacagctccaagaccaggaaatccgagccgagctgaacaagcacttcggtcatcccagtcaagctgtttttgacgacgaagcagacaagaccggtgaactgagggacagtgatttcagtaatgaacaattctccaaactacctatgtttataaattcaggactagccatggatggcctgtttgatgacagcgaagatgaaagtgataaactgagctacccttgggatggcacacaatcctattcattgttcaatgtgtctccttcttgttcttcttttaactctccatgtagagattctgtgtcaccacccaaatccttattttctcaaagaccccaaaggatgcgctctcgttcaaggtccttttctcgacacaggtcgtgttcccgatcaccatattccaggtcaagatcaaggtctccaggcagtagatcctcttcaaggtaaaccttggcaaaaccctaataacacaaaaggtgttcctaagaagtaaaaaataaaataaaatacaaataaaaatttgaaatctgcagccattctggcccctgaccactgcaattctggcactgctggaactaacgagaacattgttacactcacatctctctccatgttctcttaaatctgtcagctctgagcacagtgccttgagccagtcctatcagagagagcaatttgttaagaaacttgctcatccaactttttccattacctggagagctgccctgtgccaggatagtggagatccatgcaagataaagctgacagtgtaccagacctggtgctcagtgttaacatcaataagagacgctgagagagagcacatcactcccagccctctaagttgactagatgatcacaaactgtcactgggaaatctccctagtagctgggaagaaaaagccagtctctgtaatacagtgtcccagaggatgctccacagtgccgataaacttgggttaagtggcagttgcaaatgccctttttgcttttctcctctggcgcagatcctgctattactatgagtcaagccactacagacaccgcacgcaccgaaattctcccttgtatgtgagatcacgttcaagatcgccctacagccgtcggcccaggtaatgaggcatgtcattttcctttagctccctttatcccctccttgagatgacaagatgttctccaaaaccctatacccctccccatattattattcattttgctcatgaaaattgaggtggttgacttagtgataaagttatgtttcccaggtatgacagctacgaggaatatcagcacgagaggctgaagagggaagaatatcgcagagagtatgagaagcgagagtctgagagggccaagcaaagggagaggcagaggcagaaggcaattgtaagtggcctggagctcacttttattttaaagtagggtttcttctttttctgtgtgctttttttggtgatagattagaaaataaacaaaagctaagtctttgttagaacaggccattttcagccttttggctttaaaatatccataagtcttcggtccccattgacctaacttattggaaaacaaaatgtttaagtcagtatatttctcactcacagtttcattttgaagttcattactgttttcaccttctgttttgaaaaatggagggagtagagatttttttttcagtcagatatttgttctttctgatcacaggataagtttttctttctgtttcctgttacttctctctttgagcggaaaatgaggagggattgctatctcgtttcagtttttgtctttttggccggcaggagacttaaattgtccatgaagagactgagttcaagttggatttaaaggagcagtggaggaagagttgctaagaaagtcatcatttctggccaggcacgatggctcatgcctgtaatcccagcactttgggaggccaaggcatgtggatcacttaaggccagaagtttgagaccagcctggccaacataggaaacaggaaatgacataggagacaggaaaccctgtctctactaaaaatacaaaaattagccaggcgtggtggtgcatgcctgtaataccagctactagggaggctgaggcaggagaattgcttgaaccagggaggtggaggttgcaatgagctgagatcgcaccacggaactccagcctgggtgacagagtgagactctgtctcaaaaaaaaaaaaaaaaaaaaagtcatttcttctgcgtgatggtcgtcatctaactgggtaattgacacacccacatttcttatgaactacttttcaatgacattttatggatttcagcaccacttaccagggggtattatattaacttgacatatagacagtgctgacccttctgtgtaaagatccacgttatgttatatttgtttgctgtctgaagatcagtcctcattttcagcagctgctgactagtgggtaggctttaccccaactccctaccgctgtttatcaacctagactttggatggcaaaaataagtcagtccagttgtcaaaatccagcccatgcccatggcagacattcctaatcgataatggaactctttcccattgagccccctcagagccttacggtcttttctgacatgatgctctagggagccatgactaatcaatgagatatagcactgcttttattcagtgcagctgctccctgtgtgctagccactcagagttagctcagtgaagatcagcttttgacatatcttgcatctaagctagccaaggcttagggaaatgatttttgactgtaaaggttagatttatgtgttatctttaaaaaaactcactaacatcaacacaattttgcaaaagctatataaaagagctgactaatggaatcaaaatcaagcattggccaacagttaccagctggaggaaaaaggttaaatgagagatttgttcaacacaggcacttaaggagaaataagtgagaagtaactgaacacttaggtcaaagttttggagggtttgctgccatttaactttgaatctacctaagactgactcaaaggcattttgcaaattacaacaatttgcctcatttttctcaacttccaaatgagcagtgatattaagatttgccaaagtgtcattagttaacacttacgaagactaatgaaaattaaaattcaatttttctaatatcactgtatttaattaatggcctattcaataattataataactcacatttatatagtgccatataatttacaaagccttttaatatggcacattataatcattacaaaagaaaatcatgctgagcgaacatgtaggaaaatgattattttggtgtttgcaaatttatattttataaaatccttcatttttcccccaaaaataggacattaaagagaaagattaatagtttcatcataaatttgcttatatggccatgacacaacacagttgtaactaaagccagattaatattttaatcaaaagcatgtaaataaatgatgtgtttattttatgccttctaaagatgattaagtgccagatattaataaagaaaggaagggaggtgtcttttttgttgctagttcggccctttacagatagagcaagtagtgtcattggtctagatgacacaaaatcaccctgagggtcaccagcctcagcttggaagcagatgctaccctgttgtccctttgtgttacaaatgttgactagttcctctgttaattcttagatgaaagtaatctgtatcagttctcttccaaagagcacttgtaatacaagtgtcaacttgatttttattaaatcattttacattaactagacatttgtgagaattttggctttaaaattcgcttttgtttttgaaaagtagattgaaggaaacctagaacatagagattgtttaccaacagagtggactataagtgataagtgcttaataaagatttgggacttactgtttaaccaatttccacttggacaattacatgctgtttctattgaacatgagtgaaagctcatagctctttctgtaataaatatttgccatttggttgggatataaaattaggaaagacatcgtccctgtatccaaggagcttcaaccatactggcagataaaaatacacaaacaggcaatacagtgtgataagtgctattataaggggtgcatctgtggcactgttggggtggtatattgggggcatccagatctatatatgaaggagaacatcctcagagagggtataagactgatccaaatcctaaagggagaaaggacaaagattttctccacctgcagcatccaatatggtagcctttagccacacggttaatttgattgggccatattaagatgcactgtgtgattggatttagaagacttagtataaaaaaatagtgtaaaatacttcatttatctttttatatcaatcacaaattgatataatagtttggacatgttgagaccaatacaatatattattaacattgaatttttcatatttttactttttaaaatgtggctcttagaaaattttacatgacatactgcattgtatgattactggacattgcttttttagacagcggctatagcttatactaagtctctaaaaaagaataaggtatattgagaaactactagtcgtttaattggaacactgagacacaagaggggcaagaaataagtctagagggaatggtggaagatagcctaaagggtcctataattcatgctaaagattttgaaagctatcttgaaggcatcatggaactatttaatgagtttacctacatgaattttttttattgattcccttcctccaaatagttagctttctagtaccataatgcatccccaaagtatatttttatggacttgagtgcagggatacatgcaatgatttttaactgatttgaaaaaattagcttgaaaattcatacatagaagagctaagggaacaaggacagtccagacttaagttggtcaggtacatgatgttctttcaatgtttgaaacaaccttaaagtaatgagtaagaagcaaattacatttaagatatcttggggtcagtgttgggttgttcattaatcaaagcaatcatatatttagggaaccagaaaaacagagactccaaaaggcaatgaaaaaaaaaaccttcagaaatttaataattgttattttacaaaattaaagtcatctttttaacctttgtctgcattacttctattttgagttccataagtaggaggtgttttaggagatctataaacttttcattgcttatgtttctaaaatcctaattcagcccaagttgagtgagccaaatccaaaaacaaagagaacactaataattagtaattaccaatgcaaaatcttatattgtggttgaatgttaccattgtttcagttggcactttcctgtaatttccatcctgactctttctcaaaaagcaattcactttctgcctttctcagactcgtaagcttgaaataattcaggttatattgggactctgcaaaccagagtttagtacttagtgtctaaactgtcactgctctaatttcttgtggagttctaagtccaactccatttgcaatctgtacagttttctgccagaaaacatgataatgggatgttaatttaaagggcaaatctagacattgtgatatggctcagcactcaaaaccaaaactagatgtgctcaggcggcaatgactgctgcttcacttctctgttggtcagtgtccagctcagaagccagggacagtgtagtactgctgataattataaacttcttccaaatgaaatgaaaaaaattgtgcaattactcagggttttttttttttttttttgagatggagtcttgctctgtctcccaggctggaatgcagtggcgcaatcttggctcactgcaagctccgcctcctgggttcacgccattcttctgcctcagcctcccgagtagctgggactacaggtatccaccaccacgcccggctaattttttgtatttttagtagagacggggtttcaccgtgttggccaggctggtctcaatctcctgacctcgtgatctgcccacctcggcctcccaaagtgctcagagttattcttttttggagaaaatgaaatagctttctatgcaagcctctttaaagagatattttgtgtgggtgagtatatgttatattgtgactctaagttcaatatttagaaatattcagttttatggaaagatgaataattatagagatctgctatacaacatagtacctatagttaattatgctattgtacactttaaaatgttgagaggatagatttcatgttattcacacacacacacatacacacacacacacacacaaaagaaaaaaacacaacacaaggaaattttggaggtgatggatacatatagtaccatgattgtgatgatggtatcaaggatataggcatatgtccaaacccatcaaaatgtatatgtttaatatgtacagttttttgatatatcaattatgcttcagtgaagcttttttaaaaagtagttatgcatactcttattctataattttcatgttttctgacttaccagtatgtttacttgcatgttagcttttatttgcatcttaccttttaaatagactaacctggacttattcacattaaccagacttagacactaagcagggatagtagcacacggtacgtgaatgggggacactttggacaaatttaatgctacaattttgttttttctctaagaacaccccctagtagtaggcatttattgactacctaatgaattaggttagataatcaatattaacggcaagaaagaaaaacacttctcagcattttttagaatcttggtatatctttctatctgtacctttccatgaccctccactccactcacctcttcttttagttggaatacaccatacactcaatttataatatctttgcaatttttgaggcagtcaggttacagctaatctaggaatgaacactagtatttcactgccaaagttgatatgtagtttccttagcatagaaaaaaagatttttacattattctgacttgcaaacgtagagagctgaaatctacattatatcaagctcttccttgttacctaccttaaaggacattttagagagatcacccattaaaagcattaaatgcagtacttggcatagctaagagttcaacaaatgttcatctctctactaccttctgtcttttctttgtcaaaccccttttatcaggagtagtttatttgatgagaaacaaccactgtatgttttcctccagtaactgggaagctctagactctttttgataaagattttagtaatgtgaagtcagttaattcagtcagtttcttgtttctttatttatcccccacgttttggtgtagtgaggatttactatagatgttaatgcaatgtaagtcttcaattttattatccaccccatcagcgtactagcttttatgaaaactgaagctaaaagttatttgataaatgtaccatcctcctcaatagtgaaaactggtccgaaaatcatttttcgaggagctgtttccaaaggtttagagttcctccaagcctttaagaagttgaaaatgtcattaagcattttgatttcttttcctttcatctcctgtttagaaattaatgtcttgaaaaattggctgcaaatgttaagcttttttaaagatatgaaatctattcatctgtctaatacaactgcaacatgtttaaaagaatcagttctttgctagacattttggccaatcttagaaagatttttgtctttgctttctaggcatttggatgccttttattttcatttttagcagtaggaaaatcaagcacttcaataattttctcaaataagcctttcaacatgtattcaatctctgatctttgtaaggtagtgaggcatggccccattcctgtgtttcataaaaagagatggtagaaaaataggtaattcaagtaattgtggaacaccccttcggtttcctgtttctcccctctaggttatatcttctttttactgtagaatgtatcagtatccattataaaaggtcctctggtttatattttgtatgggatcgttgttgcatacaacttcgtataaagctgcaattcagagactgtcccagtatgtctgcatatgggcatacatatggtcgattttcgctttaacttcaaatttccttgaatacataggctgtgtttattcccataatggtagttgagcaatttctttgcaatgtctcaatttctttctctcacttctgcacttccccctcctctctatacagtagtaacttttctaaaaggctcattaaaaaaaaattccttaacacccgtgaaagcaggcgccaggaaatttaagtttagatagcagtcccatcacatttggctgtttgactagagctggctgcataaacagaatggaatgtggtgttatgattcccttgctcaagtgtgtatcgatggtctgggatgtgcctcttcatccatttctactttctgactgccaggatgtgctcggtgctctgaagtggcacaatcacagccttcaattgagacatacaatctacatggaagggcgtcaggcagcctgcactggttactctgcttcatctggtcatttatttagtctcaatgctattgttcgtagagttctgttttaccaactgtttgttatctcctacctttgattttcagaggtgatgtttatgagtgagattcctgcaaacatgtagctacttcttacacttaaatctgtaaaaacaaattatggaaatctttgtttcttcactcagctgagctacttgagcaaggtttttttttttttctgtgataaaacaccaaatctaactttccttctcctttgtattggagagtctcagagaagaaggaccactcttagtcatctttgatgtaatgaagggaatgggataagtgttcaagatgattaattgattagtaactgattgattttatagcagatattcattgatagtctgttatgttttgatgctttgtttaaaatacagtagtgaatagaacagatatggtctctactgtcatgaagcttttattatcctggggaagtggacattaaacagtagataaactattaattacaattggaaaggagagttttccataagagcaactaataggaattctgacctcactgcaagtctcagaaaaaatgtgattgttgagcttaaggttgttgtagacagtgtgtgtatgtgagaggcttgggagtggtgcagtgtgaatagggtgtcccagtagcagggaaagagcatgtgcaaaggctttgggaaggaaggtgcacagtatatactagactaatagaagctcagtgtggctggaaaagagagtcacagaaagaatgcgatataagagataaagcccatgatgacaacaggcccagaccatacagggccttgtaggtcttgttaatgatttaggtctttcattaaaagttatgagaagccattggaatattttagaagttaatggacgtcattggattcctgtttccttagcaaagactatcctaacaacaatggaagaatagattggagaagaataaacatggacacagatccaagttaggagattgtttgttatactagtccagaaagagaagctggaggcttggcttaggacaatggaataaagaaaatagattacagagagatttaggggataaaaattaataggacttgagtggttagacatgtggagaggaacaagagaaaggagtaaagggaggtagttaaatttctgtcctaaataactggctagatggtgttcatttcactaatacaagaacattgggaaagaaccaaatggggagagggcaaggctggagggtcgggcttcggtaatgttggtgtagtgtgaggttcctcaggcacaaccaacctgagatgtcaagtagacagttgattatttgcacctgaggctcagatgaacttactttcctaataaaaaatagaggcgagcatgttacatgtggtagaataagaccagacattggtaagcttatcatccaggaagataaagggtctgcaaattgttcagttacatttcacaaatgcttgtcgggtgcctactccttaccagattcttggccaaatactgggcataagaaaaggaaaaccattcagtaaataagaaagggcatctttttgctttcagcccaaattactcttttcatcacccaagaccagggactctcagtacatccaaagaaaactcttgggcaagctaagtctgtacctcagttctctgcttctagtctttgcttcaacctagcttaaatctctgcaaccttaaattcattttatcattgtttgtccttagtatacatacaaactagttggtgagcacattctttatattaactccttatgttcttaaaactttgagagacatcataacttttggccttatcttcttggaacaagaggtataggattgcttcttacactaagaatgcatttctgtgctgtaaaaaaagaatttatcctcaggctataaaatattattcctgtattttgtaggttataaattactgatgactttcagactatgatgatattgactccacttgtgaaaattaggccacacccctctagtctgttcctaaaataagactagatttattggcaaagtgaaatttatagcctcttttatttagctcttattcttcggagactcatggcttaaaatggcctacattttaagactgtatttcttaaattattgtctttggaccacctgcatcaaaatagctgaggtgtgcttgttaaaaatgaaggttgtagaaccttatcttacatttttttttagtacaactagataaagcccaatcatttgcatttttaatcagcaccccaagtaatttttatgtatagtagagtttaagaaccactcttttgaggacgtcagagtttgttcatctcagtattagaattctgagttaatgagaaatgtaatagttttgtaagccaggtcagtttcataacaattttgattcataatcaagtcacaaatgttcaaatatttaataggtattgttccatgatttgaaaaaagaatgcactatacagatttcttttctaacacatcaagttcatctgagagtagaacagagacagataggaaaggtagaaaagagtagaggtgaagagaagaatctatgtgagcaagaagagattgatactgaagaaatgggaattaatacttggttcaaatgtagtctttccttccattgtagtgtatgttttgctctaattgccatgctcagtggggtttcttatgcatgattgtacatttatgaatgtttctagagggttagctttttttttttttttttttttttttgagatggagtctcgctctctcgcccatgctgaagtgcagtggcacaatctcagctcactgcaacctctgcctcccgggttcaagcaattctctgcgtcagcctcctgagtagctgggattgcaggtgcccaccaccacacctggccaatttttgtatttttagtagagatggggtttcaccatcttgcccaggctggtattgaactcctgacctcatgatccacctgcctcggcctcccaaagtgctgggattacaggtgtgagccactgtgcccggccgagggctagcttttttcccactccagaactctctccttccttccccccataggaagagcgccgtgtgatttatgtcggtaaaatcagacctgacacaacacggacagaactgagggaccgttttgaagtttttggtgaaattgaggagtgcacagtaaatctgcgggatgatgggtgagaatcttcaagattatttcttgtttagaagctgacgtatgtaaaaaattatggccataagattactgggatgggagttgccaatgtaagtgctttgacagatgacatgttgagttcagaaccttatttattttctttcatccctgtttattaatctttctagttgagatttcctgtcccagaaataagtatttagctgcttgacaggacaatcacactgataaatggattcagtggctcagacgttggcactggagaagtctcacaaagtagaaagggttacagtcccatatactaatacttcttaaccagctttgaacttttctttgtccgttgcagagacagctatggtttcattacctaccgttatacctgtgatgcttttgctgctcttgaaaatggatacactttgcgcaggtcaaacgaaactgactttgagctgtacttttgtggacgcaagcaatttttcaagtctaactatgcagacctaggtatggattttattgtacgtggaatgaggaatccataatgtagagctcaagatgggaacaaacataatccgtaggcaccttgggttgaaccatcactttattttactaaagggaatgtttgaatacagatttttaagaaaaacgtataagacagtttcagaagaaaggggcctaggttttggcaagaaaggacagaagtaaattctttgtactatctactcaggtgctgaaaattgtggtaggtatgtatgtggatattgtgtgtttccacatgtgttcatgatttctgtatgtgtgttgtgtgtgcatgcagctttatattttgtgagtgcatgtattgtgtgtatctctgtggatattgtgtgtgtctgtgtgtgttgtgtgaatattaaacatgtatgtgtgtagtattgtgctttgtgtgtgcgtgtgttatgcagatgtgtgtggctatcatgtgtctttgtgtgtgtatgtatgcaggtattgtatgtgtctacatgtgtttatgattcatgtgtgtgtgtgtgtgtgtgtgtttgtaacctgattttgccttccaggcctaccctgaatcctttcacgaaccatagcattgccatcattgttttatggaacagaatatgcaagtctcattttctcttattatttcacagacacttagaaatatcatcattttctatgaactacaactaagagagaagaaaattaaatttcatatactaaatcacactctgctttctttaaaaaaaaaaaaaaaaagaaagaaacacctgttatttgttgagtgcttccatatgccagacactgtgccaggagctttgaaagcattttccatttaattactagaactatcctaggaggtgtatattattactatcatccccattttacagataaggaaactgaagcatacataatattaatttttcctgttataaaagctgtacagactcaaggggtaaaatatggtaaatataaaaaggtattaagaaaaaaattaaaatcatgtatcagcctgtcatccaggaataaccactattaccaacgaagtgatttgccttccagtattttgtctcagcatgtctaatttcttacagttgaatttatatatatatttatttatatatatataaacttccaaattctacttttctcaattaatatataaattcgtgttctgctgtgactcacaagattaaaaataatttattaacatactttaatggttgtacagtattttgctgagtgaatagtaccattatatttagtcattacattatagccaaacatttaatttttaatttttcaatattataaataatgctaaaatggacatcttaatttcctttccaattttaattttgttcctttgcatgtcattccccatctaatgtgtgcatagtaagcctttaaattctttgaggaaggaaagtgacaagtgtcttgtgcatatgacataattatattaaatttatttgtaatatttatcatgaaattaacatataaatctagtcctcatcattattagatatctatatgcactttctctgggttggtaaaaagaaggaaacaaatacaaatacagggattttttttcttctgtccaacgaagggatgtcttcctagagtaattgatacaggtgatgtgcattgttcacagggaatatgctataattcactccacaagctaaatagatagtaggaagcagtggagaggcagctgactgttagagagatagcaggctagggatgaaaatatagaatgtggcaagtcatttgttcaaatgttggctgataaaaacagtcaagacggattgaagtcttgagttgatttgacttattttcttcagtgatgaaggccagggtgtttctagtctctcaaaacatctagagtttaaaataagctacctagaggggcctttagatcacgattcatcactggtagagagggaggattggatggtatttccaaattgaactggagcctccttgaaatatttctaagaaggatgcttcctctctcgttatctccctgcctagccggcagcaatagaaactttgccattgctaagctcgctctgtattttctgaaaagtatgtttgatgtgcattgtagtaggatggatttttccaattccctcaagctgtacgatggcacaaaggtagtttttttctgagctccatcattgtatagtctgaagaggccaggctttggaatcccgcagacctgggattgaaatctgacttaccactgccgttgggcaaagaattcaaccccttcagttctgcttcttcatttgtaaaataccatatagtgttattgtgaagattaaataaatgtttgtgatgctattagcacgtgtctggcataacataggtgctcaataaatagtggctatggttataatttaaaatgatgggaatgagaagttagaagtgtaaagtcgttttaaaatggaagaatcgactctaggaatcagctttggaactcaaaacatttttcctgtgtcttgtctttgttccctgaagaattcaaatattcttgtgctcaccatattcagtgttcatgcacatttcagggcataagaatatactggactcaggggttaggagcatacacatatgtcacaatagtaaagcaaaaatgatgtgacacagattagttttaccaagacaggaaagttacttatcattctagatagatttaaccaattttctttctgtttacttgctcccccaaattaagttagcttatacatcctatttctctactactgaaactagataatggtgactacaatattgttagagcaaaacataacgatttcagctactatttatgacccagtattataaatgagagtgagagattaaaatgacttgatcaaggttaaaacagtgaagcccagatttaagttctagttgccatgaatcagtagtctgtgtgtctttctatttactgtcttataagcaaatggatctttctaaagacctcaacgaaaaaaaatcagaggggaaagaccaagagaaattaaagtaggactacaggatccaaacagaaagatgggtcagtattatgaatgtaatagttttgattaggaattagttatgttacataacttaaacatttaaaaaaataaatgacacatacattataaattattcattaactgaaatgaatgtattgtattatcagtattcttgattatacacgtaactttatgtatttctttgccattcattgataaatcgttcccacatcccaatataaatattttcaaccatggttttaataatattttggtgtttgagattagtatattccttcaacaaatattaatttgagtgcctcctttgtgccaacagttttccaggtgctgggaatataagtgtgatgtgatttgtttcaaataatacagtatcattatttctaacaatttattttgaaaaattagagtggcttgagttattactattttcatgcgtgtccatgtgaagagaccaccaaacaggctttgtgtgagcagtaaagctgtttatttcacctgggtgcaggcgggctgagtctgaaaagagagtcagagaagggagatggggtggggccgttgtataagatttgggtaggtaaaggaaaaaggggggttgttctctggtgggcaggagtgggggtcacaaggtacccagttggggagcttttgagccaggatgagccaggagaaggaatttcacaagacaatgtcatcagttaaggcaggaacaggccattttcacttctttcgttgtggaatgtcatcagttaaggcaggaaccggccatctggatgtgtacgtgcaggtcacagaggatatgatggcttagcttgggctcagaggcctgacacctataacatttttattatatcttactgtgctccaatatcctttcattagcgggagagaaattggtggagtagatgttattgcctcagaaattaaatgtaaccacattctatctcatgcaacaaaaaatatttttggttgttttctgagtaacagtgtgcctgtataagtgggtatatatgtgaacactatatttcacagtgaagaaactcttgagaactactatttcacaatttttttaaatatttgctaataaaatacagaaacactgaaattctagagtttgcttagaatattgcaaagtaaggaaatttaaaatattctcaaagagttcctcaaggaaaggtatgtgtgtatgtccctgatggttccaggctgacttttatcacacagactccatcactgggggaatcttccctcttgatctacaatgcaagtggaattctgatttcagactaatctctagcaatgagctagacatttttttttttgtctctacaaaaaagattttgatttgaacagcagttgtttgtgaggccttagcaatacaagaaaaccattcattagcctatgaagagaagcgttgaagccagtgtaatttaagaattgactatttaagatgctattgaggaaagattggccagttttgtctccgttttttatgattgagactgtaattgttctcgttgctcttaccttaaaaaacttgctgaaaaaaactcagtaaagaccaaaggtgatcagaatgaaaggaaaacataaataaagacatttctttgtctttaaatctaggtatgtaaaggtagattgaaactttggaaatgggatggtcaggccggagctagagagcttggtttgcaatcttgtcagcaaaacaacattttaggtcaacgattatgcctctgtagtatctagtattatatccttctattactttgaccatttcgattttgtaatttactctgggaaaaagcatgggaattcttgtattttggtagaattgttagttttccagaatggttttgttttccttcaaataaatgttttcaaaagaattaacgtatttataagaggctttttattatatttccaagcccccctttgttacttgcaagaccagcagaaatatctagctttttcatagaagtcaatggagaaaaaccaggaatatttaacagaattttactttgctttctatattgctaaaacatatctattttgttaaggtctatttgaagtagcagtgaaactgctcaaaagcttacttggactagtttaagagtccaagaagggcatggctttatttatacctgcactttatttcttctttccgaatttactctcctgggatgtgaagcatttctctcaaccttccaatttggggagaatttgcaccaaaaattctgggaggccaagaggtacggaagtagaggaccacatcatatgtcccctcctgcctcaaagagaagcatcaggttgaagtttaggggaaattctcatgattctttctctcatactctactggattttatgctcaattaaattaatcccattgaataggaaaattagttccagcttgtactctcacgtctacatctaagttattgaggaaccatgggcaagtcatttgacgtgtcgggggaaggggagggtggttatctgccagagatatattaacgtgtgctctgcctaactcccagggtgtttaagcctaaacgagtcaacaggtgcgtgtttttgaaagctcactactccccatcctcttcctatatatccatatatatccaataaaatctgactattgttttctaaagtatattgattggaagagttgttatcgaatccagtaatcttgaattggaatgattgagttaatggccatcagcaaagtgtgtatctaaactggcttgtgttttttttcagattcaaactcagatgactttgaccctgcttccaccaagagcaagtatgactctctggattttgatagtttactgaaagaagctcagagaagcttgcgcaggtaacatgttccctagctgaggatgacagagggatggcgaatacctcatgggacagcgcgtccttccctaaagactattgcaagtcatacttaggaatttctcctactttacactctctgtacaaaaacaaaacaaaacaacaacaatacaacaagaacaacaacaacaataacaacaatggtttacatgaacacagctgctgaagaggcaagagacagaatgatatccagtaagcacatgtttattcatgggtgtcagctttgcttttcctggagtctcttggtgatggagtgtgcgtgtgtgcatgtatgtgtgtgtgtatgtatgtgtgtggtgtgtgtgcttggtttaggggaagtatgtgtgggtacatgtgaggactgggggcacctgaccagaatgcgcaagggcaaaccatttcaaatggcagcagttccatgaagacacgcttaaaacctagaacttcaaaatgttcgtattctattcaaaaggaaaaatatatatatatatatatatatatataaattaaaaaggaaagaaaactaacaaccaaccaaccaaccaaccaaccacaaaccaccctaaaatgacagccgctgatgtctgggcatcagcctttgtactctgtttttttaagaaagtgcagaatcaacttgaagcaagctttctctcataacgtaatgattatatgacaatcctgaagaaaccacaggttccatagaactaatatcctgtctctctctctctctctctctctctcttttttttttctttttccttttgccatggaatctgggtgggagaggatactgcgggcaccagaatgctaaagtttcctaacattttgaagtttctgtagttcatccttaatcctgacacccatgtaaatgtccaaaatgttgatcttccactgcaaatttcaaaagccttgtcaatggtcaagcgtgcagcttgttcagcggttctttctgaggagcggacaccgggttacattactaatgagagttgggtagaactctctgagatgtgttcagatagtgtaattgctacattctctgatgtagttaagtatttacagatgttaaatggagtatttttattttatgtatatactatacaacaatgttcttttttgttacagctatgcactgtaaatgcagccttcttttcaaaactgctaaatttttcttaatcaagaatattcaaatgtaattatgaggtgaaacaattattgtacactaacatatttagaagctgaacttactgcttatatatatttgattgtaaaaacaaaaagacagtgtgtgtgtctgttgagtgcaacaagagcaaaatgatgctttccgcacatccatcccttaggtgagcttcaatctaagcatcttgtcaagaaatatcctagtcccctaaaggtattaaccacttctgcgatatttttccacattttcttgtcgcttgtttttctttgaagttttatacactggatttgttaggggaatgaaattttctcatctaaaatttttctagaagatatcatgattttatgtaaagtctctcaatgggtaaccattaagaaatgtttttattttctctatcaacagtagttttgaaactagaagtcaaaaatctttttaaaatgctgttttgttttaatttttgtgattttaatttgatacaaaatgctgaggtaataattatagtatgatttttacaataattaatgtgtgtctgaagactatctttgaagccagtatttctttcccttggcagagtatgacgatggtatttatctgtattttttacagttatgcatcctgtataaatactgatatttcattcctttgtttactaaagagacatatttatcagttgcagatagcctatttattataaattatgagatgatgaaaataataaagccagtggaaattttctacctaggatgcatgacaattgtcaggttggagtgtaagtgcttcatttgggaaattcagcttttgcagaagcagtgtttctacttgcactagcatggcctctgacgtgaccatggtgttgttcttgatgacattgcttctgctaaatttaataaaaacttcagaaaaacctccattttgatcatcaggatttcatctgagtgtggagtccctggaatggaattcagtaacatttggagtgtgtattcaagtttctaaattgagattcgattactgtttggctgacatgacttttctggaagacatgatacacctactactcaattgttcttttcctttctctcgcccaacacgatcttgtaagatggatttcacccccaggccaatgcagctaattttgatagctgcattcatttatcaccagcatattgtgttctgagtgaatccactgtttgtcctgtcggatgcttgcttgattttttggcttcttatttctaagtagatagaaagcaataaaaatactatgaaatgaaagaacttgttcacaggttctgcgttacaacagtaacacatctttaatccgcctaattcttgttgttctgtaggttaaatgcaggtattttaactgtgtgaacgccaaactaaagtttacagtctttctttctgaattttgagtatcttctgttgtagaataataataaaaagactattaagagcaataaattatttttaagaaatcgagatttagtaaatcctattatgtgttcaaggaccacatgtgttctctattttgcctttaaatttttgtgaaccaattttaaatacattctcctttttgccctggattgttgacatgagtggaatacttggtttcttttcttacttatcaaaagacagcactacagatatcatattgaggattaatttatcccccctacccccagcctgacaaatattgttaccatgaagatagttttcctcaatggacttcaaattgcatctagaattagtggagcttttgtatcttctgcagacactgtgggtagcccatcaaaatgtaagctgtgctcctctcatttttatttttatttttttgggagagaatatttcaaatgaacacgtgcaccccatcatcactggaggcaaatttcagcatagatctgtaggatttttagaagaccgtgggccattgccttcatgccgtggtaagtaccacatctacaattttggtaaccgaactggtgctttagtgatgtggatttttttcttttttaaaagagatgtagcagaataattcttccagtgcaacaaaatcaattttttgctaaacgactccgagaacaacagttgggctgtcaacattcaaagcagcagagagggaactttgcactattggggtatgatgtttgggtcagttgataaaaggaaaccttttcatgcctttagatgtgagcttccagtaggtaatgattatgtgtcctttcttgatggctgtaatgagaacttcaatcactgtagtctaagacctgatctatagatgacctagaatagccatgtactataatgtgatgattctaaatttgtacctatgtgacagacattttcaataatgtgaactgctgatttgatggagctactttaagatttgtaggtgaaagtgtaatactgttggttgaactatgctgaagagggaaagtgagcgattagttgagcccttgccgggccttttttccacctgccaattctacatgtattgttgtggttttattcattgtatgaaaattcctgtgattttttttaaatgtgcagtacacatcagcctcactgagctaataaagggaaacgaatgtttcaaatctacttctgcttttcttatttatcgtaaccaaactcctggcatgtttctcagatcagtacccattactcgcttattattattctatttcctctctggctctctttccctttctccttgcttttccatattcatggatgcatttcagctctaaggtaacgtgcatcttctgtatcttgtctttttctaaacggcaaaggcagacgtggtggtttctataacgaacgttcagaggtgaaaaatgacaggggattgtatcaaatggattagctctatttttgtacttaaccctgggaagtgtgtatttttaagtagaagctctttcccctagggaaaaaactcactgaatattcagtatagaaagcgattttgttgtagatggactgaatatttctccaagacttgtaacaggatgcagttccccatcatatggaagtcatcgggttggttaaatatgggatgagctgatagctgaagacacatcgtgctgtcaggatgtccactgtggctggtagatgatgacggtcctaatgacagagaatgcccttgcccaatttcaaatggttgctcccattgccaatcatttgcattgcaagactcaacatatgcaacattggggaaagatggctaaattatattccatcatttccatctcctagagagaaaaagagtgtttgtaaatattggaaatgtgataagagctatcagaagtgcattgaaatctgctaaataacataagatacactccccatggattgttttataccaatataaaattcatcaattatttattttatggaaatggaaaataaaaatctaccattatcttatcttacccaaatactgaatttatctgccactgtggataccaagcactcctgagtttcaatagataagtaagtctcagttcctgacttgtcttctattgttgcttaaattgcataaggcatttttaatcttccggttggaaccagcaaggacattagaactcttccctaaatgcttaactttttaacctaacaagtcttttgagggcggagagaaaatgagggattttcagaagcagcattagtagctgctagtttggtactggaatatcctgattgagataaaggatttatttcatattgtcctcaaaacattgactcactttcattcttgttgatactaatggcaaaataattattaaaaccaaaattgggctgacaaaaaaataacatttgatatagctttttttaaaaaaagattgtctcaattcaaaagtcctccaaaccaaatctgtctaaactgtatacaatatgatattgaattgaaattcttttttagcattgtcggttttctcttctttgtaggtttatttagctaatcattggatataatttacagccctaataacgttactatactgactcgactgtagtgttactagctacacatttataactcagtattagttatagaatattttaactaaaacattccatttgcaatatttatattaatcttatattttgcaattttcgttgctactccgttttcaaacacactacaatccattataaatcaatctttgtactttatcaaacggcagagagtaataaagaaggtcacaactcatagaggagttccttggaggtttgtaacatcatgatttaaatctcagaaagatttaatcaaaagctgaattaatccctgggggaaaagatagtatatagattctattgatggacacaaagcagcctatttctgttcaccggtctctgttagcatgttggggaaaagaaatacagattttctgtgagagggaaaataagattttcttgtaggggaaggatggtaagacataaccttcacgttatgcttcctcccttccactcaaaatggcccatttttattttccacttactggggcgttatctgttctcctagtgcatggagaatgttaaatgtcctccacccccatgtttcccttgttatattccatgtgattccagtaactatgcagagtcccaaaagctccactctagtcaagcatgtggaatgcggggtcacatgggctggtttccaggtctcttctgtcgtaatcaggtgactgcccttgggcgaattctcagcactggggacactggaaacttgtagaagaaatgattatgaaatgtgaatattttgaggaccaggttcgactgaaaagccataacattgtttcatgactaggatgtaggctaaaggcaagaggccaccactttcccacatgtctcttttctgtccataattaattccagaggaatgtgaccatattctgttcagctcaaaacccattacttaccattaggtgacttataaaggggcagagtgaaattaattaattgaaaagagtaagagaacttttagaggagaaaaccaaatgatcctataatattttcatgattaaattaaatgaatgtaattatacatgcacatatgcacaccaaggcattattataatcaaggaccttaaaatattgtatcatttcaaatttatgcatatagcacttactgaaggcaagtagctagtgtgatacttgaatttgcatattgaccattttcatatattttcatatattaatttatagtaggaagaagctgaattattaggaaaaatcctgggatgatttaaaaaaaatattgtgcttctacttgtttttgaacatcaggggcacttagcaacattatctttttttttccacatagttttctgtgatggattttcaacaagatgacatccaagtgaaagccaaaattaaatgggaaggaaagaatgttaagtggtaaaatcctaaatagcttattagactacttaattggagggaatttattttttgctgctgttaggaactctatagtcaagcttctctttaacaatactaattgatgaaaaaaagtggctatagtattatagttaccacaaaatgccctccagcaagtcatttaaggaaattcacaggtactttcctttgatggacgttggtgttgctgaaaatcaagtcctgtcttcattcgtatcatcattgctttctcacttcatttccaagcaggtcccctgcttattcctctcatagcttcacagtgcgcttgaaagactgacttaattcttaaaagaaaattaggacgtgcttgttcttagtttaaccatctactaggttttcggcttgatcactataccctttaatcagatgtatgactaatgtttcatagtgcttagaagtattgccctctgtaagcacttccctatttgttggcaggaatgtgtatacactatcacagaatgatgattaattactctgcttcctagagaagggtaagttagtaaactggtcacacggcatgtgatggagccgtgttactttcatgtcaggcaatttaatgatcaagtgcaatgcatggcgtcattctcctccacttatctgtttacatgggaaaagcatcctggtactgattcaatgagctgccttttccagggtcaacagtctgaattgcagttccaactatccaacaggaaaacaattgaacagaaagcaaagattggagttcaccatccactgtttggcttcagtatttggagggtgggaagtacctatctgttgggctgactttttgccatttccagtggcaggggtggcggcattaaagggagtgccaatgtgtgcacctgatgaatgaaataattcatagacaactcataagagtttctttgtcacttggtgccagagtctcattgagccactgtgtgccatggcatgccatggcaaaaactaagaccaaaaaggtcacctgaaggaaagagaaggaatcaatagaaggttaaccaaacacatttgaacttcaggcacgaagcaaggtttggacagaggtttcccgtggtttcttatttgccttgtatgccaactcattccatgagattatatagacaaaagaggcaattgtgcagctagcctgtagaattgtgaagaaaggaatgaacctcacatattggttctatatgtgagggtagttctgtgtcacatagacagccgctggcctttgattaaaatcctgtgtacttcctggctaccacgttaatgggagacccttgaggatttctccacagctaggtttttggatagaacttttaagctttaattttgtggaatgataaaaagataatccctacattcatagaatacaaagagctctttagatttcaataatgcattgaggaggcccccctattttcttctcattgtttgtttcagttctaccatctcaaagtagccatttccagcaaggaaccttcaccaactttcagcattctgaaggttaaactcaagccccctcaaaagtcgtatctgctatatttcatggagacataacttcatggcattgcaataatttaaagacgttatttgcttgtttttgctgtcttaaaaacttagctttatcagctccttttagaaacttgatcaacttggagactccctttcctagaatcagcgcttagtgacacacctggtcatcctgtatcccagccattggacctcaggtaatgatgttgctcaataagacctcttaacatcctcattttaaaattagagaaatcttcctgtactggtaagaaagcaaatatgaaaagctgccctccatttgaaagtccagtgaattcaggatgtgattaaaacagtgaagataatgacaaagatgatgatggtattagctaacatttattgtggatttatcttttagtcattttacttagctgtttacatgaattttcttcattaatcctcctaaacaaactgtaaggtaggtatacaactcttcccattttattgaggaggaaatggagggttaaggtagctggaaaactgcccagatttgggcaaagtccagttggtcctaaaacttatttttgaaagtctcgtcctatatataatgcctccaggaataaaatattaatcttcaaaagaaatctgttagaggtatttaattgttaaaatttgtgtacttttgttgctaccgtctgactgaaaccaaaatctgcttgtattgcattcatcattctatattgatggaacttctccaacgtactagaaactccacatctagttggcagtatagtaagaaaaaattaaaaaatatattttgtaatagcttcggtaggacactctcaccagaatccttattgtgagtatctatatatctatgtatctgtgtatctatctatcttctatcatctatctatctatcatctatttatccatctgtttatctgtctatccacctacctacatatattgcgttttgtggaaagtatattgctgtaagaccaatgtctatgagggttgaggccagagatcctcatacttaatgggcaggaatgacctagtgctgtgattccaaggtgtacgatcttacttacaagggctgataaccaactttacaaagaggtagaaacctcttccataagttaaagtggatttggaggtataaaatggtatattcttaccactgagaagttaaatcacaaaaataatcaaattgaagagctttttatggtttttcaagcactattaaaaagtttctgggctgggcgcagcagctcacacttgtaatcccagcactttgggctgaggcgggcagatcacttgaggtcaggagttcgagaccggcctggccaacatggtgaaaccccaactctactaaaaacataagaaaattagctaggcgtggtggtgtgcacctgtaatcccagctacttgggaggttgaggcaggagaatcacttgaacctgggaggtggaggttgccgtgagcggagattgtgccactgcactccagcctgggtgacagcgcgagactccatctcaaataaataagtaaataaataagttttcaatttagggctaatataagaaaaaaacttaaaaaataatcagtcccgattttgcagccattggtaaaccagtcattttctcagaaaattcgtctgtcttggagaacacaaaccctaggttattttgactaaagttcatagaattctgaaaatgaaagttcatgaccaacttttcttctttcccacttcataatcttaactgacctcatgctcactgagcatggccactggattggagacgggcctctggtattgcagtgtgagaaactgagcccctctttccagagattcttacagtatcctcagacaagcgataggcacgtggagaatccacctttggacgaaatgcttccttgtttctgtgattacattcattgtcatgacacaatgctagctcggatatcagctgttcatgatagaagaccttcttaagatttcttaaatatgtttatttggatttctctctgcaatgctaacctgtctacaatcaaatcttaggattactgtagatactgatcggtagacactcagtgttctaatttatggatcgccctttgagggtagtgtctttgctgcacctggcatcagttgtagggaaaagcgggctcagtttctaacattgcaatacaagaggcccatctccaatccagtggtcatcctcagtcagcatgaggtcagttaagattatgaagtgggaaagaaggaaaggtggtcataaactttcattttcagaattccatgaaccttaatcaaaatagcctagagttcgtgatctttttttttttttaattatactttaagttttagggtacatgtgcacaatgtgcaggttagtgacatatgtatacatgtgacatgctggtgcgctgcacccactaactcgtcatctagcattaggtatatctctctatgctaaccctcccccctccccccaccccacaacagtccccagagtgtgatgttccccttcctgtgtccatgtgttcccattgttcaattcccacctatgagtgagaatatgcggtgtttggttttttgttcttgcgatagtttactgagaatgatgatttccaatttcatccatgtccctacaaaggacatgaactcatcattttttatggctgcatagtattccatggtgtatatgtgccacattttcttaatccagtctatcattgttggacatttgggttggttccaagtctttgctattgtgaatagtgctgcaataaacgtatgtgtgcatgtgtctttacagcagcatgatttatagtccttcgggtatatacccagtaatgggatggctgggtcaaatggtatttccagttctagatccctgaggaatcgccacactgacttccacaatggttgaactagtttacagtcccaccaacagtgtcaaagtgttcctatttctccacatcccctccagcacctgttgtttcctgactttttaatgatctccattctaactggtgtgagatgatatctcattgtggttttgatttgcatttctctgatggccagtgatggtgagcattttttcatgtgttttttggctgcataaatgtcttcttttgagaaatgtctgttcatgtccttcgcccactttttgatggggttgtttgtttttttcttgtaaatttgtttgagttcattgtagattctggatattagccctttgtcagatgagtaggttgcgaaaaattttctcccattttgtgggttgcctgttcactctgaatggtagtttcttttgctgtgcagaagctctttagtttacttagatcccatttgtcaattttgtcttttgttgccattgcttttggtgttttagacatgaagtccttgcccatgcctatgtcctgaatggtaatgcctaggttttcttctagggtttttatggttttaggtctaacgtttaagtctttaatccatcttgaattgatttttgtataaggtgtaaggaagggatccagtttcagctttctacgtatggctagccagttttcccagcaccatttattaaatagggaatcctttccccattgcttgtttttctcaggtttgtcaaagatcagatgatagttgtagatatgcatatgcagcattatttctgagggctctgttctgttccattgatctatatctctgttttggtaccagtaccatgctgttttggttactgtagccttgtagtatagtttgaagtcaggtagcgtgatgcctccagagtttgtgatcttaagacagaagaattttttgagaaatgactggtttgccaatggctgcgaaacagggactgattcttttttttaagtgtttctaacttttaattagaaatcatttcaaataaacatgaaagtgcataaaataatagaattgagccccatgtatctcatacccagctttatgagatgttaatattttattcaatatgcttaagattgcacttaaatcacatacctatccctttattctcctttcttcctcagtagcattctctccccaatagttagtatgtgttatgcctactcactttttctctttaactacatttccgtatatccacaaatgagatgcagtattattttgtatcttttgacaatttacatgtttttctactataagtgttcttgtacaatttggcagtagtgcctttcaatgcaaatgcaactagagcaattgagccttggtgtaagccagaaggaaatccttctttccaggggtttggagttgccttaacagctgctcaaagtgtcccagctactcattctttgctgcattcctgacatgcgtcttggtttcctatttatcactttggctcatgcttaagtgcatttatgcaatagctttaaaagtcttcgacccttgatccacacccttctcttgcttattgagtggttgtaaagttgatccaagggaactggaggtcataaaatcacagcagaaaatggaaactcatacctagttattaagagaatgggttcttggatttttcttttttaagtaagaaattttgctacactcctcaccttcccactcccacatacctctgcatggccgggccctgtctagaaaggacactgggaggccccaggactatagaatttatttcttgtaatagtaaccaattaaactagttaccagttggagagcatgttccagcacttaagttaattgaactgttgcaaacgaaatatgattctaaattgtttcagtattccaaatcacttcatgcgtgtagataaaaatgaaaaaaattaccaaattggtttggaatgtgcaaatcaagcatacagtgcgaacatttagatctatgaactgataactgcagtaggtaccttgaaaaactttgtgggcttttttttcttcttcttttgctgagctctcctttgaattcccagaaccactacttgatgtgatagtcaatgaatggaagtcaggtgcaatcagaaggggaactgtctgcatcaggatttttctaccaatttgcccagaaaataatctcttcattattcatttcatgggccaggtaagaagggaattgttgaaaggagatttagcttaatggatgaactgtagtattttattccgggagaatctggctagaatttggtttatgagtccggagggtatagttctccttggggtggtgacccttctgtacctagggccactgcacataaacaatgagtgtctaaattcaagaaggagatggtttcgaggaaaatctcatggcaaatgttgctactttcctgtctccacagtctctcactcttcatgtctcccccatcacccaacatatatatgtggatgacagtctgtttccatagctttgtattgctgtgaattttccaaccctctacatagatcaggtcaagggctggaattgaaggggttgtttgagaagtttggatgggctgtgaggctcttggcagcttaatgagtcatcttgagtaacaagtcacacaaaatccatgacaattctcacctctcttcaaggttattccttcccctcccaaaggaaacctaagaaaaagcagtgaaatacatcagttgatttcatgagctctttttgagcggataaaataatttgagttagaatacaggctgccattgttgttgcagttacagttcaagttgcctggcaccatacaacattggaacataaaccactgacaaaaacaaactcatgcagaataaaccgactcgacacaaagagcagagatattaatggaccagtcaggtgcgtgaccaaaaggaaggcttggtcctattacagtttaggcagctgtatccatagtatgagttgaaagattcagagttgatatttttctccaaaatatattctccatggcttacaaataataccggaaacccaacattttttaattcatgtatttttaaattaagaaagacaataaactgtagccatcatcagttctagcaaatcctcacctagatcattttaagaggagagctaaggctgggcttggtggcccacgcctgtaatcccaacactttgggaggctgaggcggatggatcacgaggtcaggagatcgagaccaccctggctaacatggtgaaaccctgtctttactaaaagtacaaaaaataaataaaaaattagccgagcgtggtgacacgtgcctgtagtcccagctactcgggaggctgaggcaggagaatcgcttgaacctcctagggaggcggaggttgcagtgagctgagatcgcaccactgcactcctgcctggacagagacagactccgtctcaaaaaaaaaaaaaaaaaaaaaaaaaaaagctagttgcattaggacagaagtgagagaaataaggttatccaagacctcactgcctggagaaaggcaggaagaagtgacactaggtgctcagagaaaggacaaatagtgagtgtgccatcaatttcactatcatgtggaaatttcagtgggctccttgttcattaaacgtttattgaacattcactttgagccctgtgccaggcatagaaaggataaataatgttcttcctgccttcaagaaacttctaatcaattgtggagacatagatagtattcaacaaactttaaaaagctcacctactgtatcccagacattgttttagtcaccaatgtggtagaaatgaattaataagagaccctgtcctcaagcaatttgcagtctggtggatgtacataaggtaattagtgtataactaataaatgtctcaagatctgtgggaaaaaaaaatttactaaggagggaggaagttcagtgaaggctctaagggatctatatggcctgagctggcccctgacatgtagaattaggcaatgggacgagcagaaatagtacaactctctcttttcctggatctctcctggagttgagagtatccaagtttttgctaatctacccgcttataaacacttacattgttcaattacttagtccaagtgtttgctcaataaaaactttcctgacccatctctcctcactccctgtccccagacttgtagaactcactcctttattgtctctcctgcacattaacctatcacagcactgataatagtatattctaaattatttctttacctttactttgccctttgagtttgtaaggatgctggctgactgctgggatggatgaataaagatggatagaattttcatgtttacctaaacaaatccccaaatgtcctggctctgaatcacttctagaatattcttctcaagctcctataaaatggcaatttatgctttttgagatgggaaaatgatccctgaagccttctctgaagaactgaatgtaaggaatacttgtgtggtggcgtttcccctctcatgtctcattcacagaacactccaaaacataaccattttgctatgacagaaacatgatttcttcatttgcaggcagccatgatgagcttgctcctcctggaccatacaaaacatacgctgtctttccctagcttttggaggtttccccacacaggatagctctggggaggttgttttctgcttgtcttgtttctaagcatcttttgctcatctttcctagccgcacggttctaatttctgattgcctggattacatatcaactaggccaagtttttgattccttagtcacatgggaagttgggtcaggaaggcgggggctgcaaaggactcgggcacagagccagctttcccaggagttggccatgatcgtactgattctgcgtattgttttaagggtacacccctggggggtctagagatttctgctgatcctagggacttagagaagctcaaaacctagcgcaaaagactcatctgagctcaaatggatgaagcctggggatatttgctcatgccttccaaatatctgtctaaaaacgtctcatttctgctatttctatggccaaatgaattgtcacatccatgtgcataccttacccaacaatctgtttatcaagaaagaggagcctgttgtctcccaatttctgctttccaggcgactgatattaattactttgcagcaggaacagtttatctctggctgaaaccaaagcagatgaaaatgctgccgtgctgtaagatttatttatttatttttcttgaaacgatgaatgggatgaagatacttatctgagagaacaggtttcaggtggagcctccgtcagcagtactttgaaatgtattgttagaatatggctgatctgggtaaggaataaaaatagcgtgtcatagtgtgactacattaactcatttccaacacaggaagctgaggcccctgcacaatgatagacttgtcctgaaagtagaaagcacgacccccattaatgacgatggacctagttctcaattactggcattacttaaaagataccgctaatctcagcattttgggaggctgaggtgggtggatcacctgaggtcaggagttcgagaccagcctggccactatagtgaaaccccatctctactaaaaatacaaaaattagccaggtgtggtgacttgcgcctgtagtcccagctactcgggaggcagaggcaggttaagatgagtacgttcgttaagaatcctttcggaaagcgagcgaagctctggaggcaaggcacgcaaggaacggaaggatgggaatggacgtactggtagtgtctcttcggatggagaccatagccagcaacaccccaaactagggtacgggccctaccgaagtcaacagtagctccggagatcaccttgcgactactagcgaggcctaggtcgccgttcatgcgtgacgagtttgcgagaacgtatatcgcactatgatctcggttctatactctggagaatacccccagactgccgccggaagctcctctcgttacgccaggaccgcaattatggccaaacggcacgatctccttaccaggcgtagccatcgctaagggtaggggacggttcccgctagcgtatctgcggcgcctagaaacagccgcctgtagcgcactagttactcgctgtgctaaagctaagggtatggctagggtaaaccgccggcatgcgtgaccgtcctcattctaaggtcacatcgtaacggataggataccgcacatgcnnnnnnnnnnnnnnnnnnnngtttaataaaaagttctgaccctcccctcccctaaagagttcaatcccatgtctttcaggttagtgtcctgtcttcccctcaggacatgttttctcccggttggggatctagacataaacaagtgaaaatcatgaatttggggaaattccaggatcctgagccagaagaatgctgctctatgcagcagttggaaaacagttttgtggacagattacaagtctggcctaagtgaaattataattgtggtgggggatggaatttaggactcagtaattttgtagagctaacagaaaaaaatggaatgattaagtaatttttactatccacatcgttggctaatgtgtatagacattacttccagatattcattgtggtttgccaaagtctttgaccttgacttatttttaaaatttgaagtcaagctaagtagaatagctgttttttttgtttgtttgtttgtttgttttgagacggagtctcgctctgtcgcccaggctggagtgcagtggcgcgatctcagctcactgcaaaatccgcctcccgggttcacgccattctcctgcctcagcctcccgagtagctgggactacaggcacccaccaccaagcctggctaatttttttgtatttttgttttttttttttttagtagagacggggtttcactgtgttagccaggatggtctcgatctcctgacttcgtgatccacccgcctcggcctcccaaaggagaatctcttgaacctgggaggcggaagttgcagtgagctgagatcaggcctctgcactccagcctgggtgacagagcaagactccgtctcaaaacaaacaaacaaacaaaaagatattgctaattgccccaaagctatggccctgctttagacctaatctaagtaccctagtacagagaacaaagttttaaaatcaacctatcccccttcaaattattaagattctacccccaaatgatttcttctgggtagtttgcatgtagattcagcactgaatccccaagaggttgactgagaaataattaggacaacctgacaatgaaataatggtctaccctagttatgggactctagggcatttatttctttacatgtcttagcctcggtttcctcaatagaaaataggaaaagaaagccaacttggtggggttcatctgacccatttttttaggttaatctatctaaaaggacctggcaaacaatggtcatgctccgttttcataattagtggccaagaagataaatgtctttgaaaaaatggaaactagtgataaaatttggggtcaaaggatacatttggttgggtgtggggctcatgcctgtaataccagcactgtgggaggctgaggtgggaatgatgacttgaagccaggagtttaagactagcctgggcaacatagcaagactctaaccctacaaaaaatacaaacatttgctgagtatgatggtacatgcctgcattcctggctagttgggatgctgaagcaggaggatcccttgagctgtggagatcgagttcacagtgaaccatgattatgagacttcactccagccttggcaacatagcaagactctgtctctaaaataataaaacaattaaaaataatgcatttttaaaaaatcaattttattttacttcccatacactgttctagacagtgaggctaagggaaataaaaacaacacaaagactctggccaaggttggaaccagaagctctgggttctagttctggctttaatgttaaccagctgcaattactttgccaatgtgctttatctctccaggatccatcggctacatctgtaaagtaaagagccagacaatttccaattctgacattctatgcaaatgaaaaaatgtactttgtgcatcaacctctcgtcttttcctggccactctagccactcctttatgttctccttcattaactactattcttctacttgaatctttcatgcaaatattcccttagttgttttctttaatcatatttcttttctttgtccatgttttccttgagatgtatcattgactgcagtaacattgacttccctaagaccatgggaaatgactctaaatctatttccccaactgaaatcactctcccaagcttttgactcactaactactggacacctccttttgagttttctcccaaagtttaaacatagtatgtctcaaactgaacccattatcttattcacaaccaaaatctacttatattcttccattttcagagattgtcatcaactcaaatttccctggcccaaagcttaggagtcacacaagccctccctgccattcacaatcacatctaattgattaccaagtcttgtttattttacttctttcaaagccctcaaatcaatcatctttcatctgcatttttccatttacaaccaatttcactatatcttccactttgcagtcaaaacattgcttctaaaatgctaacattctatcctatctctcttatctagagcctaccaacagtttcacctggtttcctggaatcaaacataaagtctctagcatcaagtataagtttatccctgaatgatccccaccctctcattcaaaagttattttcaccacgctctcagccccacagctccactcctactgcaatttttgcgttttgtggaatagactctattatatttctaaaattttgtaaaagctgttctctctgcttggaatgccctacctttctttctctatctgagaggctatgggagttttttccagggtggctaagagtctatgctttggggtaagacatacccgtgatcaaagtccagatctagtatttataagctatgtgatagtaggcaggttgtttatcatctaaattttagtagtattacttttaaaatgcaaataacaatacctgctacataatgtcattgtaaagattaaatatgaggtgtttaatgtgatgccagggacataggaacatcaataattggcaactcatgtttgtcctctacagctagactctatgatcctcctctcttctcctaaccacacctctcatgttctgctctggaatttacattacaggatgccagagacagagtctattttgttcacatttatttagcacttgtcattgtctgacccaagcaggcctaccatagaatttctgtttccatcaagattcaactaagtcactatttcttctaggaagtttttattgaacccctaatcttgcttcagcattggttaattacttaagtaataggctctgtttatacacagttggaattctttctctttcttcagtagagtcttgagtttctggagggcaaagaccgcaccatttacacctttgaatccccaacacttttctcagctccatagagtaacactaaaaaaagcctgtatgaatgcatgagtgaaggaaggaatggctggatgagtgatgaatgagtggattctctctttacctctgtttctttcttttcctcttttccccctcttactatgctccatttaaattctgtttctaagaatcaggtagagaatgtggaaactaatggatatcaggcaggtgaggacacaccttcacccagaggagacatgtagactgccccctggtgctctgctgaaattgtattgatagtggcacctgggaaggaaaggtcctttgatcacaggagctttagacaagctttcccctgagcaagggcatgagaacagcacaggcaagctgctggagaattttgcaggccttcctgaaaggagtctgaaaagctggtatgtaggtcagtgtccaccctgggactcagcccacggaggtaaaaataagagcctggaaggactgagtttccagatgcccaggtgagagtggctggggggagatgttctgaaaaggaggaggaaaatctctttaatttgttctctgggacatggcctccaaaccaccttgtaggcaaggcacaaagccgagatgaccctgatatgcatcgaaatgaaaaggtttgtgtgcaaatcagggaagaatcctttctgcacctacaggatggatgccagggagttaacatttggaaatctcagctcagtgccaggacgttgtttgaaaaggagatcttggagcaaatgccagtgaggtacagaggagaagaagtgaggacaaggactccaggaattagctattcaagaatgttccagaaacctgatagctgttttccctgtcaaaaagagagagagagagacaggaaaaaaaaaaaaaaaaaggacattcaaacgagcattcatcgaagcaggctgctcagggttttcaagggaattgggagggcagatgctacaaggttattggagtcagtgtcaaatgcgagaacaaagtggcagtgacatgagctaagaaatgactaagcacccgagccctggagtagtaatagatggatccaaatgccaagtgaagcagttgtcttaactcatttgaatacttctgaagaggtgatgaaaaaatagcaggagggatggaacctcttctgttccggaatatcccaagatgataagagaatgttgcataatgttactctgtgatttgcttgatccacccttccctatggctgctttctctttagttttaaaatgaaagttttaggtccagcgcacatagggtttccatttgatataggggctgctgttcctaggatttgattcctacttgcagtgtgggactctccctctccccatgaaggggtgctcagagttttaagaaaagagcatggtttggcattcaagcaggtaagtttttggcttacatagaacttcctctttcttcctctcttgtttttccttttctcatcgctatttatttccatatattgaaaaacctgaataatttggacctaagggatatagtgaagtgagcagagaaaagttaaggaggcaaaattcatatatacaaattgtattgtctcacatggagtgtttgtatatgaagagtaattgagtagatatttagcatatattagatgctttataaatactcctatccctgctgctcccgctccttttcagttccctctttcatttctgctttagtaagataaagattactttgaaaagaattattgtcaatgatagccaccatttactgaatgcctcttctgcagcagactctacattagaatatttgtgacatcagttatgccttatcacaattcagaatgggagcagcaactgtccccactttacagatgaggaaatggagctaacacacagtaagtcacttgctactgctgctaaaaagtgagagagctggaatgcaaatttaggtgttctgcactctaaacccacgttttgctttgtttttgtttttttaatgctgctgcatttctctcatggatcatgcaaatgtagcttcttggagcaaatacatagcattccttcagaactggggccagggctgtttaagttggtgaattacatcttggggtggccatcccttacctttggcattctccttcccactccctctgttcaaacagcaacaaatcatgctgcccttttagtcaagcacccttttattctttcctgaaactgtgtctcaccagccctatccctgtcctttaggggtccagggtcttaattagctaattaaataaacttatcttgcctaatagctcttaattccaaagtcagtgcctttccttaggtactaaatacagagtcaaatagagaaatttcagttggtaaaggttgctgagaaagataaatttttgaagtagacaaaactttattgcctcccaaacctcagagaagcagtcacttattctatccacatgtttttggcatttccttgcttacaaaaccccacagaaaaactgggtattgagatctaagcctctaattgtcttaataagtttcagttagaaatgactttccataatttgttaaatatttcctgagcacctcctatgtgctaagctctgttctaggtaagacattcagagggaagcaactcaagcacctggagatggcctatgctacaggttgagtatcccttctccaaaatgcttgggaccagaagtgctttgaattgtccatttggggggctttaggatatttgtattacacttgctgcttaagtgtccctaatctgaaaacctgaaatccaaaatgctccaatgagcatttcctttgggcatcatgtcagccctcaaaaagttttggattttagagcatttgggatttcagatattcaaattcgggatgctaaacctgtaccaaaaattttccctctatctatcgtcctctgtcattagagaattttatagcttgttgaccacttaggaagatacccttgaaaagaccaagtatgtgactagggagaaaaaaatattaaggaaaaaaaaaagagaaatattagtttgaaactgctcatttaaaattactagtttcaatcaatgacaattttaagatattaaatacattctggagtaacttgtcaaaaaataaaaaggtgccattactgatattctccaaggtttttctaataagatcagggtcagtgatgggaaataagctggaagatgaatagagtgtcagaatgcaattgagttctaagcagttacagcaagttccccagtaaacacagcttgagcaagtttgttcctgatgatggttagggaggcctttggtgaaaatgacccagagaacagctgctttctcaccgcacaaaatactgctggaccttccttacttaacctattggaaagcttccattggcattctcttgtgagttaaggcagaggaggaggtagcctcatgaacctctctgctcctctgattctgcgctcattttgattttgttaagagacttcattatattctttccatggcccaagtggaaccaaatccaagctccatctactagctgtgtttctttgggcaaatttgtaactcctctaagcctcagtttcttcatctgtaaaatggagataatagtaatatggctaacaataacagcaagcattgataaaatgattatttctctgttgaggcactctatgttggagatacctcatctcattggatgctcacagtccccacaaggtaagtgtgattacacctacaaatagctatttttatcaagaatcatggttgcagttcagaaattactagaggtgacgtttaaaaaacatcatggttatcttttttaaagtacaaatgactgtgtgacttctatgataataatcattgccagagaggagttttcattatttaataagtggaatgctttggaagggcttcttcatgtaaatagatattgctaccttcaactcctactgagtcctctcatggtagtaggttataagacatttagtgggctgaaaatatatattacctggtaaacaagtgtgtagagcacttatgtgtgatactgattccttgtcaaactcagagagacagagaaagaaagaaagagagaacagagggaaagagacaaagatggaaacaaagagaaagagacagagatagaaacaaagagagagagaataatttcatatgcctcatttggcacttgaaaatgaagcaggaaaccatggtgtccccacctgggaccccgattctgtgacctgctttctgatatggtctggaaattcttaacccagtggaacccagggacacaggtgtttcatcttcagcagggtcctgtcggggcctctctacccgaggcctcagtcctacacagagtacattctccttgaaggaggaaaggaagactccctccagctgggctgtcacagaactgctatctcttctctccatccctgctggcctccagtcttttctctgtttcactcttgttatgggagctgtgagaaaagaaaaatcaattctctagctaaggtcagccagtaaaatttgctcctaggtcccctaaccacggcctgatgaatccagccacatttctcccaggttacaattcaataaagcctcctaatggcctttatcatgatttccctccacacaggctcacagcagcgcctttcatgctcccttataaacctccttgtagggcaataattttgtcttttagtttttctggatcattttggaggtgaattgggccagggtgccggggtgagggtgagggctgaaaaaacaaaacttttagccgcatctggttattccatttagttttcgcggcaaattattatagcataaaagtagcttcagatggtgctgactgaggatggcttggcagggttactccctgggctttacctggtccctgagtagttatgcagcatcttttaaatcattcgttcatttatgctaggccaagtgtgagaaatattttatgagcacctaccatgtgctagagaatgaagctgtggagaagaaagagtcccggattgttgctcccaatccaagttggagagacagaccagtaagtaagtcagtgaggacattagaataaaagcatcacagagcccttaactgcttttcaagtggcaagagaagcccccgttttcctccataggggcagagagcatcagagaaaatctttctcggcatagctgccatgaactgaatcttgaatgtcaaggaagaagcagaagtagtgggcttgcacatatgctaaaattccatatctgccatgtgttagccatgttaccctggacctattactgatcctcttaaaatgcaggttcctgagccccaaaataggtcagccttgcttgcagagtttttgtgaaagttaacaaaatataggtaagtgctagacttatatccttatatccaacacaaagtagatactcaagagatgaaattctatttttgttattattatgtataataatttttatttattaagagtttatcaagtataaactcaataataattagaacttgagcacgatccattgaagaaatgaaaagctttcagtttcacggatatttgcaatgggtgtagaggggaagggtaggaaatctggagcggagacatgtggatggttatgcaggagccagttcattgagagccttcagtacaaggcttaatgcagtacaaggctgtcataaactggctcctgcattaagaagtagggattcattgaaggttaaccactttttaggaaagggggtgtgtaagtaattagatatccagatgatgatgcccttattgccagctatctgatcccagctcataaagccttggttcactgaccacctagacatggaaaataaaaacccaggcaccactttgcctctgaagaattctcagcaatttttcagaaagtaaaacatcctctgtgaaattcttgaagatttctccccctcactctgaaatgccctgaatttcaagcagctataatgttgctgactcatttctagtttcataaggatctgggttgacttgtcatgttataaatctccagtttatggaatcgctcctactgctgtaaggtagacttggaagtgtgtcaaagggattcaaggtgggcaaaacagaagttgagcttcagtctcattattttgcttattttttcagtgaagggagacctttgatgattttttacaggggccattatttaattttcatcttaaggaaaaaatgtcaagcagtcgactttaaagatatatgtctatgtaagactgattgtatttaaaacaaatttcccagagcttcctttaatctattatagaatctttctatatcattcatggcaaaagtatgtcaggcctttgatgggaagcaaattttctctttttaggattttggtgtgactttgtctattgtggacagggacatctagccactttaagaaactgaacactcaagcctatgggttacaaagaaaatgcaaaggtttggaaatgtgcagtaacagaaaaaaaggctggactgaagacaaatatggcttatgttacaattttgttttggtttgtcttttcctaagattcagctatattggcaaagcctacagaataaacaccacaggacttgaatataagtttgcaagcaatcatgtatcagggcaactctttgctatggagagtaaacttgtttatgtctttgcatgagttcctcactccttccagaatacacagatggatggatggatggatggatgatggattgtcaagaacagtagcccttacctgaaaacataactccttcactcagtgttatatatatatatttagctttcaaaaagatgtaatctcagctgggcacggtggctaacgtctgtaatcccagcactttgggaggctgaggcgggcggatcaactgaggtcaggagtttgagcctagcctaaccaacatggagaaaccctgtctctactaaaaatacaaaattagcctggcgtggtggcacacacctgtaatcccagctactcgggaggctgaggcaggagagtcacttgaaccggggaggcggaggttgcggtgagctgagatcgcgccgttgcactccagcctgggcaacaagagcaaaactccgtctcgaaagaaaaaaaaaaaggaaaaaaagaaagaaagatataatctctgaatgcactaattattgttactaatttctttgaggttattttgtattgttttgttttgcttttctgctacaccttgctttactcccttctctttctgggtttaatcctccttggactaaagccaaggtcagagagagtaatatgcagtgcaacagcctgcctagtaaaacatatctctttattaggaaattgagcttctaccttttaccaagctgtggtttcttataagaagaaacgctgactcataatacaggcaaggtgatgtgtacatgcaaatacacaattttatcttttaggctgatttcattaaacaacagatctgtggtatctgagaagctgtcaaatactcaggcttgattttacataattacacaatatagaatgacattagctctgtattttcttattgttgtatcatctctctccctccctggaaatgtaagctccatgggggggcgagagttttgaggtttttgttaactaattataccatcatctagaacggtgcctaacactaatagaaactcattaattatgtgaataaatgagtaacttagtgcaaagtcaccatactctcctttatttgtttccagtttttgcttcatgcaggcttttggtacctcccttggggagggttcacagcatcacctacaatgagagaatttagggttatttttcaagttcatgtcattataacatggggagctgggatttctgtgctcattctttctccgtgacatcagctgattttaagtcaacctttctatattttttacactctctctttttacttctggcttggctttaattagaagcccattttttcttagttttttttttatgtacatacgtttatttccaaaatgttattaaacttaattttatgctttattttgttccccacaaactatattacattttctttgtaccttctcatttgctcttctcctatgtaattctttcctttcaagtcaccaaacagcaatttgtctgagtttcctgataacatctctctttattttggtatcttctgaggtatattttagccctttttaaatatagcctagataaaataagtacatttaatgtacttggcaagaaagtgttaagcattaactcctaataattcactccttattagtctcctttcaggtaagttgccagacagatttcaagtgataagtggaaggtcactcaaacaaagatccattttcctggataggggaggggcagtgtttcaaaagtcacatgtagaagcaaattccttctaatgacagctgtagtttctccaaaatgatagataaataaccttttgtgtagggtgagtagagtcatctttttatacataacagtaagaatagttttgaccaagtttcagtgttcagctataaagacaaagggacagagataaaagcaattaattatcaatataaaggacattgatggtttgctggctatggtaatgagtacaagtatcataactatgaggctttgaataaattcaatgagattctgtgtgtcttcttgagtaggtagtcttgaaatggcaaagtcaattaggactgaagggaaataagagggtagaaaacaagactaaaacactcagtaccttgtaccctaacacccgctgcaacaacaaaaagaaagatattatcaattcccggatcagcatggatttgtgtttgaatcatgaaccatacctgtacaatgtgtgtaagtaattgttaaaaaatacagttatgtggccagaggcggtagctcacgcctgtaatcccagcactttgggaagccgagggggttggatcacgaggtcaggagatcaagaccatcctggctaaaatggtgaaacccccctctccactaaaaaaacaaaaaaaaaacccaaaaaattagccgagcgtggtggcaggcacctgtagtcccagctactcaggaggctgaggcaggagaatggcgtgaacccgggaggtggaagttgcagtgagctgagatcgcaccactgcactccagcctgggcgacagagcaagactctgtctcaaaaaaaaaaaaaaaaaaaatacagttatgttttacatcatataccaactccaactgattggtagtggctgcctagaactttttgcattaggaaggattctcgagtattcagtggtatctgtgagaaataatgctataattatcagcaatgtcttgtgggcatcgtacttgcaagtgctagcattaagtgctatgatttttttgtttattcatgtctaattattacttcatagttaatttcattttcttctgttttttgctgttgttgttgtttctaaatctggtattataaaatttacttctgggaagattgatgtatcatgatagccatctggcccttgtattgtttgcccagttgggactattgcaaaactgcaccctgacagatttcacggcagatagcgtatatcccacatggactgtgaagaaacaagagactttgacctaagaaaagaataagatattcagtgcaaaattcactgttgattttaccagagcagtgatactaaagacttcaactacattacaaagactctgttaaggatgctttcaacagcaaacaacagcaaacccagttcacagtggtttaaagcaatatgaataactgtttatcatatcacagaaatcaggagatagattgattattgctgatgtgttcagtagtgtaatagtgtcaggatttgcaactcttcaactctcttggggtttttctcatggttatcagagggatgccacatcaccaagtttcatgtccacttttatgtaatgaaaaatggggtaaggtaaagaaccagtggcatccccttttgtcagtaaagtaaaactttcacatatgacctctgacctttatatgttcttatttagaagcatgtcatatggctaacaccggttgcagaagcagctgggaaaatatatatttacctttactgccctctgtggtggatgagacaaggaggaagggtattaccaatagtctctgttacggtgtacctcttagcctagtggctatccatacatatccttcttcctatagatatgttttaacagaggctattcatctttattccatggaaaataaccacacataatagtatttattttaggatctagctttaagtgcagtattgctcactatcagatccagatgtggatgttctggtctagtgactaatagctaaaaaacaagttatctgttccctttatcctgcataaagtgttggtgagccggccaggtgcagtggctcacgcctgtaatcccagcactttgggaggctgagacaggtggatcacctgaggtgaggagtttgagaccagcctggccaacatggagaaaacccgtctctactaaaaatacaaaaattagctgggcatggtggcacacacctataatcccagctactgtggaggctgaagcagcagaatcgcttgaacctgggaggcagaagttgcagtgagctgagatcgcaccactgcactccagcctgggcgacagaatgagacgagatcccatctcaaaaaaaaaaaaaaaaaaaaaaatttgtgagggaacaggatacctacaatgaaatctccatcttgggaaaaggaacaacgggaattacttacaaattactggcctataacacacacattaaacagcaaagacttagccctggcagtggagtaaattcctttattagacaatctgcccatccctgtcttttctaggaggatccctagaatctgggaggattagggagataaatatgctaattatgcagatggccacacctgaagtaagcttggagaagatgctcttctgaggaacgtacaactttcctagtttatttcttattcacataggttcaagggcttagggggttaacagtcaaagtctgggtttcttgagcaacatcatcccctcaaaaatatagtaattctgggagtcattttgcttctgataatttccacatgggataattaagagccagtacatgtgtaggcatagtctctaattgtgagacgtgctgtatcctagtgcctaagtttagggattagtctaatggacaacaccttgtggagatatgaaaaatataggcttgtattggaagacattattggagaaattctttgttaaggagcagatgttaaatattggaatgtttttacacttcatggtaggtagctgcttacccaaactagcaatctgtaccctaagatctcactactaaaggtttaatgcttgtcaaagtttaggggccttcaaggatccatctccagccttgttgccaacattcatttgattcttcattgcctccaccttaccaggtattaataaatatgaaatatttcatatatcaactctggcttatactcagggcagcagagaagtatgttccttagtatgggggatcctgggacaaaggcaaacattttccgagaaaatgtcacattaggaaaatgctaatcaaagccttaaaaaggacaacatcaagttgtaaatgccacttacttataagaaagttataaaaaataaagagaaggttaaaaaatagattggttaggccgggcgcggtggctcactcctgtaatcttagcactttaggaggccgaggcaggtggatcatgaggtcaggagatcgagaccaccctggctaacacggcgaaaccctgtctctactaaaaaatacaaaaaaagtagctgggcgtggtggcgggtgcctgtaatcccagctactgaggaggctgaggcaggagaatggcatgaaccagggaggcggagcttgcagtgagccgacatagcgccaccgcactccagcctgggcgatagagcaagactccatctcaaaaaaaaaaaaaaaaaaaaaaaaaaaatagattggttagagacaaagtatgaattggtagaaagtggattcaggagataattatgctaatgtggactaatcactgtggcattcctctcctgtgtgtcttggcacagtgctctgaccaggggcaggcccttaagccattgacccatcttctatacaagccagacaaggaaaggtgagaagcagaagcccatttaatcaagtaccaccagtgtaggcgggcaagggaccaacgactagaaggtcagcaaaagcaaggggggagcaaaaaggtgccacgggcctcagaacacaggcagggtccagagttgaagaggttagaaagttggcagaaacaactctagtaataaggcttgaactttgatcctagggcagaaagtgctccattgtactctattactacctgctgaatgccaatgagttagttaggaccacagatgctgggcactgtcagaaagtctcaaagcctttttatcattaaggccaagacagagatatcagcaagaacttttccggattttactagcacactgttttttaatttttaatttttatccatttattgtcatatttttgagaatatgacattatgattattaacaatagctgagattgttggagggagtgcttacaatatgccagacacagtttttagtgcactacatataataagtatctcatttaactttcataataatatgagggttttttttttgttttaatcatcctcacttcatagagaggatacaagtttccatcctcttcctttacattctttgtacaaactgtacagtttattaaccccatattagtcagggttctctagagggacagaactaacaggatagatgcatatagaaaggggagtgtattaaggagtactgactcacatgatcacaaggtgaagtcccacaataggctgtctgcaagcggaggagcaaggaaccagtctgagtcccaaaacctcaaaagtagacaagctgacagtgcagccttcaatctgtggctgaaggcctgataaccccttgttaaccaccagtaagtccaagactccaaaagctgaagaacttggagtctgatgttcgagggcaggaagcatccagcaaaggagaaaagatgaagcctggaaaactccgcaagtcaagtccttccactttcttctgcctgctttattctagccacactggcagctgattagatggtgcccacccagattaagggtgggtctgcctctccaagtccactgaatcaaatgttaatctcctttggcaacaccatctcagacacacccaagtacaatactttgtgtccttcagtctaatcaagttgacgctcaatattagccatcacaaatccaccccttgtcaacttcaacccatacacacttcctgaaataatacataatcttcaaataaaaacaataataaggtcataattatgcctaacattatacagctttcctttgtacaactggaagtgcactaatccttaacctaagtgctattacataaagttaacaacacttaaacgttgatatgaagtcaataaatcttatgtcacatgataaaggcaaaagaaaggaaataaaatgaagacttttcttaatataattgtatacgtgcacgaataagttcttaacaaaataaagaggaaatactcatgacaattacattcctcgtttctgcaactggtcatgtggtcatagctggtattgatgactaccttctactacccattctgtagtcatagctggtattgatgattaccttcttctactacccttcttctacccatttcctttgccttcagcaaacacctcagcaggtcgtggttttttacctggtggagtgacccaaacctttattcccaaagagtctgggccatttgtaatcctgcctggattgggttgttgtaggttttcattgatcttaattacagggcatggtaatactaagagacaccctaggggatctcctgtattctacacatactcttccttacctccattgtggagtagtagactgcttttatcttgataatctgggtcaatcaccccaaccagcactgtaactcccttcttggccattgacttagaggtaggaggagcccaaagtggccagtggcaatcttaacttccagtttaatggaatcattgttgtgtctcctggtggcagcattcctctttctagaactaagacctctaggcctgcagaacctaatgtcgcaggaagaggaagcaaaatttttgctaatgggtcataggggtgatggtgagtggtgccacttccacttccaccccatgattctggacccatgaatccaggttatgggacaaacggtaccatatattggatgctgattcagagaatacacagccttctggagaactttgccccagccctgcaaagtattgtcacctagttgatgttgtaattgtgacttcaatgggccattccacagttccatcaatccagctgcttcaggatgatggggaacatggtaaaactagtgaatttcatgagaatgagcctactgccacactactttagctataacctgagtgccttggtcagaggcaatgctgtgtggaattccatgatggtagataaggcattctttgagtccatggatggtagtcttggcagaagcattgcatgtaggataggcaaacccatattcacagtaagtgtctattccagtgaggataaaccactgtcctttccatgatggaagaggtccaatataatcaacctgcccccaagtagctgtctgatcaccgcaaggaatggtgccatatcgagggctcagtgttggtctctgctgctggcaaattgggcactcagcagtggctgtagccaggtcagccttggtgagtaaaagtccatgttgctgaccacatgcataacctccattcctgctaccatggtcactttgttcatgggcctatttggaatgataggggtggctggggaaagaggctgagtggtgtccacagaacaagtcatcctatccacttgattattaaaatcctcctctactaaggtcacccattggtgaatattcacatgggatacaaatgtcttcccagtttttgaccactcagagaggtcaattcacatacctcttccccaaatttctttgtcaccagttatccaactatgcttcttccaagtccctgaccacccagccaaaccattggctacagctcatgaattagtatataattgcacatctggccatttctccttccatgaaaagtgcacaaccagttacactgctcaaagttctgcccagtgggaagatttccctttgacacagtcctccagaccccagaatggtagatccactgatagcttgcaccgtgtacctggaaaagtcacagacactcaacaccagcccttgaaggcaaccaggatgggggctgtgccacaggggaggagctgcccaaggctgtgggaacccacctcttgcatcagcatgacctggatgtgagacatggagtcaaaggagataattttggtgctttaagatttgattgccctgctggatttgggactttcatggagtgtgtagccccttcattttggtcaaattctcctgtttggaagagttgtatttaccaaatgactgtacccccattgtatctaagaagtaactaacttacttttgattttataggctcataggcagaagtgacttgccttatctcagatgagactttgaactgtggacttttgagttaatgctgaaatgagttaagactttgggggaccattggaaaggcatgattatgttttgaaatgtgaggacatgagatttgggaggggccaggggcagaataatatggtatggctgtgtcctcatccaaatctcatctcaaattttagctcccataatccccaagtgtcatgggagggaccctgtgggaggtcattgaatcatgggaatgcgtttccccgtgctgttctcatggtagtgaataagtctcatgacatctgatggtttttaaagggcagttcccctgaacatgctctcttgcctgctgccatgtaaaacgtgcgtttgctcctccttcatcctccaccatgattgtaaaacatcctcagcaatgtggaactgtgagtccattaaacctcttttctatataaattacccagtctcagccatttctttatagcagtatgaaaatagactaatacactctttttctgactcactgtcatccatccatccatgcatccatccatccattcactgatttaattaactaatttaacacattgatatgcacatttttatgctaggtgctgggaatacaatggtgaacaacactgacaaactttcttctttggaagttcacagttcagcagaaaaaaatcagttaataaatcatcatttgtgatcaagtgtgaggtacaacaataatatgcaagatacaatgtgacttcattgaaagggcacttaatgttgtttatcaagaggcagaacagactttaagaaaaatatctaaagtgaaaaacaaatggtcactaagagctcgctgagcaggggtaaaactatgttcaagaactagaaaggtacacatttcctaactggaacatcaagtgggaaagacaaaaggatgagagattaagggaaaaaaaaaggcagaatgcccagctgcaaagggcattctgaagggcttgggctttaacttaatggcaccgagaagcctttgataagtgttaaatagatgagtgacatgatttattcattttgcattccagaagtatcactctggccacagtgtggaggacagaccggatggggcaaaactgtaggcaaagtcatctgggatcagtcagttacagtcaccagggaagaaatagtaatgacttgaactttggcactggccattaggatagataacggtggatgggatggagagatgtctaggaagtcaagtcaagcagaacttgtcatgggccttccttatggattgtgtactataatgcctatattgctattcatctggagtaaatatcactgaattaagatttcatgccatgtttgtaacatctaaatgagtgactgggggcttacgggaagcctgtgcctgcaaatatacattttcatatttcataatacaggacaagagaacctctcattttaatgaaataagcacaatatttacagcaaaggatgggttgtattagagcaccagggggcttggtttacacttgaattattttcctccagttatggaaccaaacggaagctccactgggaggcactgaaataaggaacgcagcggggagctttaggggagctcttccctacagtagttgtttttattttgaaagaaatgtatggtagaaaatatttccagccactcaaattctactttctggttcacgtgacttttttttttttttttttaaagggaaggaagccttggagccagattctaagaaagcaaaatgacagcaacaactggggacaatctggactcggcctgggtgcccatgctaggcagtgatgtagaaccagagaagcctcattttaaaatctgtttcacagccagaaagtacatgaatagaagctcctttttcaaattatatttcctacctattgaatttaactttcatccacttgaaaagtctcctattttactgccagtcatctcagtcactattcagcagactatcaagagcaggtttttcttgcctgtggaagatacagaatagatcatgaaacaacaacaataaaagtaacatactcttatttctatctggctcaggcctaattcccaatctctcatcatttctgagcctaagcacctcatgccttgtcttataaagagttacatcacatttaaactggcatacagataaagccagatatagaagctctttcttgccattaagttatggctctcatgccattgctttctcatcatttcccagggaagaatgcagggtgttagaggcccttcagtgcataatggctttttttcttgctccatcatcacaaagcactttcttaaaggatggtggagaagatagagttcctgtgataccaccattagcttctgcccggatgattggaataaacttccactatcacttctgccatcctgcaacacactctctaacctgcagctagtggaattttaaaaatataatctccccttttctgtcccctgtttttaagccttgggaactatttgagcccttcataatcttacctctgattaactctccatagattactgtggtttatccagactgattttctataagttccctggataggctgtgccattcctttcatccaggactttcacatataattctggctgtctagaatagtcatccctttctgttcttcaggtctcagcttaaccctcatttactctggtttttttttttccctaattattcagaagctcatagttctctttattttccttatcacatctcttaacaattctgttttgtagttgcctgttcagtctgtcttccctgatagaacataagcctcttgaaagcaaggactgcatttctcacttttaaatcatcggcatctagcaccatgactgcagtatagtaagagcttggtaaataattgttaactctttagggtaatagaaaagaaaagttctcagcttcacagcaaaaatccctctcattaatcaatggaactacctaatattaattcattaattcatgttcactcaataaatattttgaacagcttataaatatatcatggactatgttgagtattgaggatatggagatgaataaagatatattttttttcctcaagaaactctggggaaatagagacataaatggttataatatgatgtaatatatggcataataaatgtatgcataaattgctatggaacataaaggaagtaatgtttgtttacctgagcatctaaagggatagactaatatattttgttagactgataaccacttacacttcatcaagactcataactgagaagaactcagtttatgagtttttataagaagggggacttataagaagagctcataactgagcctgatgaagtgttaagtggctatcagtctaacaaaaggaaaaaatcaattcctaaaaggaagaaccaacacatgcaaaggatcaaaagctgatgagaacattagcatatccagtaagctgaatgatcaataatgtgccggatgatggtcattcattgaacctgccaggctagcaaggggctaaatcattatgtcttttgatgcaaataaaaaaaaaattgggggctactgattcattttaggtaggagagagatatgctcaggctggtactccagaaagatcactctagcaccagtgtagaagatggattggaggatggtaatattagaggccaacgagacctgttaggaagactttttaattgcattaaaaggatgagaaatatggtagacctgctgtatgtaagtttctgaccatatatctggagagaaagtgaaatgattatgagtggtttaggaggtagaactgcattgcaaaggtttgaaatatgctcttccttcttggattattatttcctcctttctttagccaagccattcatcctttatcatgcaattcaagggttgcccctggtaagttctctctgactcttccaccgcagtctgactaagataccacctccttaagctcttatcgaatatagcatgttgcctctgcaacattaaattttaagcagtttgaaagctaagagaagattccacttagcaaaatgttatcagagtgactggcatagggtatccattcaataactattttttgcattgatgaatgtatgaatgattaaatgactcctcagaaatgggaagtgagattctcaggcttcttactggatgataaggaaaatgataggaataatcacagagatagaaataacggggagaaacaagtttggagaatagtttgggaaaggtgacaatgatgacatctatttggaacaggatggacttgaggggcttatgagaagaactcctaaaagtgaactggtatgaagtccagagttgtgacttataatttatagagagatggtagtttagttatctatctatagatgattaaatcatagttcagtcacccaggagcattaggtaaactgataataaaatggtctcaacaaagaggcctgagtatcaccaacatagtggttggtgaagaggtcaaggagaaccacaacaaatgtgtggacactaatagagtagtttggagagagtgttgctataggagacaagaacagaatacatttcaggaaatagtcaacaatatcaaatatttccaagaggtcaggtattataagggtaaaaaataatcagttcatttgttttgtaattagactatttgttaagttatttattacttataatgattttaatggagccttggggttaccacagagttggtactggattgaaaattagagtcattagagccagtaagagtaacatgttctaaaaaccttggttgtaatagacgagaaataggtggggtaaagaaggaggagaaatgagaagtgagctacacagtggagggagtttttttttaatatggtaaaagataaacatgatcacatcttgagaataaacagtgatttaagagggaaacattaataatacagggggaggagatgtttcctgaaacaaggcttaggataaaatggtatcgagagcccagatgaaagaattagcattgcctgaaagagagtcacatctctgtctgagattagaaggaagaaaggatcggtacaggcctaagtttgaattaaatggggaattcattcacacttgatttattctatttctccaggaagaaggtatcaagattatcttctgaaagtgaaggggacagaggtgataaagagaacttgtaaatggtgactgttgactggcttctctgggaattaaacatggaagtaagcggagtgataaacaaaattattgtgtagctgtgcagaccttactaaaatgaatgaaaatgtatctactgtgtattagtttgcacagttgtgtgatttttttcagcatcaggaaatagtgtgtgtcaaactaagataaagaaggcagataattatagtgatgcaagatggcatttatggggtcacacttgagtttctaacctgaggttcatgattcatagtttatataacacctgaggagtagttatcttgtggactcctagaaaggaatgcgacaatttgtctctctctggtgcactcttactctcactctgtgtgtgtatgtatacacatatataaatatatatgtgtatatatgtgtgtctatatatatacacacacataaatatatatgtttatatatttatgtgtatatatacatatatgcatatatttatgtgtgtatatgtatacccatatatatatgcatttatacagagtccttagttttcacacaactttcaaagcagttgttttttaatctaaaattttaagattacaacgatcgaaggaggagtataatagctgctgttgaataatactcaaaatctggtaagacaattatgatatgattctttcttttggtttgcatatttgtaagggagctacttgaattcacatacacatacacacacatgaaaaagggttaatagccagaatatatagataactcttgaaactcaataataatgaaacaaacaactccaaatagtttccatatttgaactgacagttcactacagaagatatatggatgacaaacggtcacatgaaaagatatacaacagtgttaaccattaaagaaatgcagattacaaccacaaagaaataccactacccaattattagaatggcttaaattgaaaaaaaaaaaagtgacagtaccaaatgttagagatgatgttggggaactggaatgctaatatattgctggtacaaattcaaaatgacacagctctttataaaacagtttggtagtttcttatgaagttaaacataatttaccacacatctcatcaatgcattccttggtgtttaccaaagagaagtgaagatacatgtctacacagaaaactgtatgtggattttaatagtgactttatttataattgtcacaaacttgaaacaatgccaataattgccagcttgtgaatgattaaacaaagtgtaaaacaccactcagcaataaaaagagaaatgaagttctaaagcatgaaacagaatagcatattacgctaagtgaaaaaagtaagactcaaaaggctacaagactgtatgattcctcttacatagcattcaaagaaggcaaactaaagggaaagacttcagatcagaggttgctagggtctgggagtgaggaaagtgtatcgcctacaaaggaacacagagaaatttggcagtgtgtggggcgaagggtagtgatagaaatatcgtacatcttgacttttggtggttacttgactacaaaagtttatcaaaatgcatagaaatgttcatctaaaagagtatattttattatatgcaaattatatgcctcaatacatgtaggagaaaatagagcccaaagcactacaaaaaagtgctccagaaggagaatgataggacagttgcataaatggttttggattcttttttttctcagcatcacctttcacatcgagtttattctctttgatatagccaatcccacaattacagatgcaaagcacagaaccatctaaggttttcactgagaagaactctggaaagagaatctccatgtggtaacagtgggagaaagaaccctactggcaagatgaaaatcaatggaaaacatctgggcgcttcctatctagggtctttttcccaacttattttccattgaaactttgagttttattagtaacagactccattgccccatagaattataccgaaacacaaacttggctccagggagagataatcaagttagttcttaccagttcctattttgccttagagaaaaatagtggaaatgagtttattagatcttgtacactgattaaggcatgtcttccttggaatgcatggagagtaggactattttcttaaaaataatgaaaaaagagctttagcttcgtgaggtccaaccaaggataggacacagaactatcaggctttggccaaccagggaacaacttgaaggacctgagcacatgggggagaaacaaacatgaatgataaacaagaagtgaaattgagactggagcaagaataagtgaaattgagactggaaatgtactaagaataacatgatagcaacttagtcattatttaatctcttacagtaccaagcaccatagtgtttcagatatattttggggttgtaattaagggaaatcacaatgaatttcatagagttgagttgaatggcctccactcaagaaaagaaagaaggctctgagtcatagtctctaaaagagtattttttgtttgtttgtttgttttgagacagagtcccactctgtcgcccaggctggagtgaagtagcacaatcacagctcactgcaaactctgccttgtaggctcaagcaatcctcctgactcagcttccctagtagctgagattacaggtgtgagccaaaatgcccggctaatttttgtattttcaccagagatggggttttgccatgttggccaggctggtctcgaactcctgacctcaagtgatctgcctgtgtcagcctcccaaagtgctgggattacaggtgtgagccaccatgcctggccaaaagtaggttttgcttatcataaaaatggaaaaatccaccccaagagtgcctgtggtaccaagacgtgattcaaaaccttgtctccccaaaataaggtgtcttcaaaatgttgttgattatggtgatgatagggtgcctcatggaccatactgtttcttcttagcctcagatatctattatgttaaaatgcttcaagggcagtatgttgttaacagctgacatactctgtaaagaattcctacataaaatcagtagcaggaagattgtagtgaaaccatctgaaatcacgcatatgacagtttaataataacacctctaagaagctacagccactgttaaacagggggcatgattcctttgaccttagttcccaataagaaagttaccccttccacgagagaggcagaatgaaatgctctcccatcactcctctgtgcaattacagagtaatgagaggaaaggggaggaaggaaagggagaggaagaatatagggagagaggtggggataaaggcattgccagggtaaaataacacccgggtagaactttgcaaaaatatattgaagggataacaaattttagaaatagcatagctaaataagcagatagcccaacatttgagaaaaatgaacttggatataaaaatgtcctggatataagaacagaacaacataatgcagactgctatgggacaagagcagctcaattctcatgaattgagggttagccaaatacagccactgccaatagaacgaaatctatactagattgaacccactcactgtcagctaggggttttcatcaatttcttagggaggaataattggaaattaaaatgggaatttcatttacatacaatttgaatttgctaaatataattttgtttacattatacatatggttaaacaagagtttctttctgtcagagtcctagcaaataaatgatgacatacacaaatcaagtaattttaagagtgtttaatagagaaagtgccttcaaagatataggaaaccacaaagaatagagagaaataaccagggactatgaatgtgggggtgggcagcacacattaacatttctaggaataaaggagcagagagagagaacagttactggaagcaaagggaaaaatataaggtgaagataggccctttcatcttctaatgagaatatagccagtcaagcacaatgacttaatgaggagagtgaggaaaactacacgatttcttctttttccctttccttggtttctagccagtgctccccattggttgactctaacaggaagccaaagattctgggagtccattgatgagacttttatagattagcctcccaaaacaaagaacaagatgtgggagagagaagtgagcagatctagagagaaaaagagataacctacaacacaatcaagccctctcgtccctgggcaaccattcttgttctgtaatatgtacagcccaaacaaagagacacacaaaaacattactattaaatatatcatagtgagggtgatgtcaatttcttcattcttctacatgaaacttaaaacgttagccaacagtcatgatataaattagtggaagatgagaaagcataaagaatcataatgtttagttgcttttgttcggctttagtggctgatcataaggcctaagttgtccatcataattcccatcttctaccatctatttcaggttcctcacaccttggctggatgagtggtgacccaaacctttatttcaataggtctgtgtccttagtgatcttgtctttggtgggagttgaggaggacactgggtagattcggttttctattcattattactattagataagaagtattaagagatgtccctagggacatttgatgtttgaaatctggccctccttgtattcattgatgccagcaatccaatgacccaggattagccacctgtgcaagcatagacactcttgtcttaccactgatgtgcagctgcataaggaacatgaaatagctgaggggaagaatcagcttctatttcaagaaaatcaggctcagtatcttgttgcaggtgtctctcactggcattaggatctccaaatccattaagcttttgtatgattaaatcagtgagtgtcacgggtattagcccattgttgcattgcccttgccttaaaatgtattacctggttggaggtcatgttctgaagggtactctgttagtttcctaggtagatgtaacaaagtaccacaaactgagtggcttagaaaccagaaatatattttctcactgatctggaggccaaaagtcctagaccaaagggttggaaggtcatgtttctctgaaggctctaggaaacaacctgtcctgggcctctctcatagctcttggtagttcaggccttatggaagtagaactccagtcttgacatggcattcttcctgtgtgtgtgtctgcttttgggtccaaatttccccttttactaaggacaccaatcattgcattaaaggctcaccctgcactagcatggcctcattttactaaactaattatatctacaatgaccttatttctggataaggtcatatttgaggaccagagaatcaggacttaaatatatgaatttggggacaaaggggaagcacaattcaacccatagcaggtaccatgaaggtcagtaaggctatttatccttctacacaaagtgttcaacagggtgtgctacctaaagctctaccaacgggaagaattatagtcttcctgaaaattggaaggacttcattatagttcctactccatgagttagggcattttaaatgaccacttttgttatctttataaagttttgaatcaaaaaaaaattctaccaggtacttattatatataaacaccaaggccgagttgaccaccagaccgtgtaagtatctccctagtaaatatcgatttaaggatccttctttctgtctgtgtgttctttgttccacatattttcaatgaaagttgaatatcttgctgaagcagttctgcacagatgaagacagactcaaataaaggaaaaactttgcttttgattagatccagtctttctgcattagcactggtattttttttttttcctcatcggaaacaagtctagaaaaaactctacagatggtttattcttgtattattggttctataatcatatttaactttaattatttttaagaccaacatgtggctgtgtatgcacacacacatgcacacacccaaataggaagtaaacagccatttgcaagatatatgatttgagtttcaataaaatgccatttcttgcctcaatctctcttaagtacactttgagttctagaattatcactatgtaccagccaaaaatctttcctgctacagtgttctaatcagaagttaaagttctaatacaatttttccttagaaaaaatagctctaatgcagtgaaaagatgacaggcttggggatagaaaaatgtagacattaccttaagtcctgcccctaatagttcatgtaaatgagacaaattatatatatttgctcttgtattacttcattttaaagattaaaaaatttgataaaatcaggttttctgaaatttgactcatccaaagaatctcatggaatccttattaaatgacggctttctagaccccatgcagtactaatcacattgaaatctctgcggagaagtcagcagacttttaaatattcaacctagctcctgcaccccaacctaagttcttatgaacccacaacttggggaaatgccgcgtcaggttatttctaaagccatccctattccagttatctgtggaaactaaataaagaccactgtaccaattaacccattagctcactttattcctaacagctttccagttatcaccaagcagatactgtcttaaggagtagggcctgggatgggtaacttgtgatgatcagacagttcggggcagcagaaggcacagatgtcaggtgcgactgaggaaatatggaaaacttgaggacagaatgagggcctcatggataaatttggagatacgaaaaaaactgcaaatgtgtacattatctacgagtgtgtgtgtgtgtgtgtgtatatatatatatatatatatatttatagaagaaacagactgtccaaattatggatacatttatggattgctaaaaatggtagagtagatctatatttattgaaatggaaagatgcgcatgatggatttcgaagtgaaaactatatatgtctcttagctttcattttggaaaaagaaatagtccctttgaatatgaagactatgcatttgaagtatgagtgaatttctttgcatggtgagagtacagttaatatttatgcctttttttcttctctttctttgtaaactgatctttcttcttttacaatgagaattcaatactttacaatcataaacagcaataaagtgatttccattctgacaataaaagagagtgcaggctgcatagggaaggtgaggatgggggttgttgttggacacataaagaaaccaagtagagcaggtgtcagataaagaaaagggaaagcagagaagagagggaagaacagctaagcctggtaaactctgccttctcctaagttcttatcaccttggcacattggcccccaggttgcagtcctgcccttctgaggctagtaagaaacttgtgagtcagcccagcagggataattgccgtgctcaagctatattggattgtttaagattgaacacctttccttctgcttagcagcctgcaaactggcctggggccacctgctccaaggcccaatgtattcatttcagatgtgcaacccacgatggcagggttgactagcagcttggcgggaaagcaagggaatggaggctatttatagcagatggcaacaaaggtttcctttctttcctttaccactggttgtatttctctgaaactctgcccatactgtgcagaaatcaaaagggcaagagaccaagttcttcagagctggttggaaagttccagggctctgtttttagagcaaatctgccagcttcagaggaggttgcaaccacccctggattctaaatcagcttgatggtggtgcaaatagatgcaaataagggtcaaatcaatttccataatgaacagcacgagaaaagcagactcccctccacctgactcaaaattattagaaaatccaatgagggggaaaagaaagaaagaaaaaataaaacacaaacacgtgagtaacttgatttttggatcttgggaatagaaactctaaggtccaagaattattctggactttacgttgcaggcttgtgtaggaagggataattccagtgcagcccttctgaggattttgattgtgaccgggccttagctttctttatcatgcttcatccttccctgttcctgagctccacttgttaccacaccctggttggttgagatgtaattcatctaccataaaatttacacttttatagtgtacaattcagtggttcttagaagagtcacagagttatacaaccatcattactatctaaatttggaactttcatcacccctaaaagaaatattgtagttatcagcagtcacttcccattcttccctcccttagactctggcaaccacaaattgacttcctttctctatggatgtacctatcctggagattttgtatgaatgtaaccatacaccatgtggccttttgtgactggcttctcttgctatgcctagtattttcaaggtctgtccatgttgcagcatgcatcagtgcttcattgttttttatggtaggttgttctttttaagcaaaaccattgcagaggccatgtaccgctgtgtctcagaggattgcagtgagttccacatgtttcctggaaaaccacgtggattaggagatgatagtaacatggcttaatcttattacttttttactaagtctttggtgactccctttagctgctgatttccctgcattttaaaaattacgtttaagtcattcaactaatactgggctgagtcaacttacgtttataattaacaggtgattttatgagccacagtgcagaagcattcattttcaaaaactattttggtacttctggcacagcctatgtcactacatatggttgacttgcatctatgaaagagatgagagttactagagctataatacatatgggccactgactgaaccatctgagaaaattttaattggtgtgagtagggaatgcaataatttatatggatccattacttttaaatgcttaagtctatgaagggaactaattgcataggttttattttctgtaaggtcttgaatgcctttggatgacccgatatatcttcgtataaagtgatacttccatgcaaggcattatctttaagagacatttatcaaatgcttccctcgtgcatgcccatactttgaagaaatgcgattcacatcaggaattatgcacagcaaaccttctgctcctgactattcagccaatagaatctcacatttaacaggcaaatacacaggcaggtggtataataaaaactgaggttcttgataatggctctgaagtagtgtttaaatctgttagaggacaggagaatcaagcttagccttaaattgtgttcattgctgggattcagctatgtcagggcatacttgacaaatgggtggaaagtatatgccaaaaatctatttttccaccaagtactaacaaaggagggatctgctgggagagaactcatttattccaaggcttgtctgggatcccagccttgggatatgagttctcttaaagttgatgtgacattgcagagggtatccaagccatgaaacggactcaaagatccggaagaagaatactagtatttcatattcacataatatcatgaagacgatgctaaattcttgtgactattttttctaaggtaacagacaagatatcaaagagattttgatcttgtgttagcccatttcaggctctgttcccaggcacacaagggttcagattcactgtgcatagaactgggatgggagactttgaagagtgctaacaagagtgactttctcttctaatggaaatacaagacaaataaatttactgtatctagtaatctgactctattattggaacataaataatggtgattgtaataaaattctttagatcattcctattgtaccctaacctacaggctctctcaatctctcccacactaaaaactctatagaatattgagtcacaagacaaaataatttttgtacctatgtcacaagtgtaatacaacagatgcagcaaagtgttttctccacttttgacacagaacccagagttactctggcacatcagaagaatacctagggctcgggtggcagaagaataggaggaggcagtgcctagacgtggctgtgtgagggcagaaggatgatagagggttgaagggtagattactacattgatggcatgaatgagattgattaagaagaggtacacagcttcttgggtggagctgctgtggtcatacactttctttgccaatagccaccattccttcttcctacactctccgtttggggaaggctgagatgccatgtacacaggcacagtgaggacaccatgcaggaatgctcagaataggtgagtaagattatcagaggtctcaaagtctgcaagagcaggtttgggtgaaagccagagaaataataataatgattagaaccatacaaataacatctattgagtttaacgtgtgctaggttctgtgccaactgctttacatttagtgtttctttcagacttcatgataactctttgagttatatatgtttatcacatccatgatacagtcaaggaaactgatgcatcacaagttagtcttttaagagacactgtcagaattcagaatgtttcttactcctaggctaacctcttaacttccatattatatctctcaggttattacaataatataaccatatttttagccatttatatattgtgtctatatgggtatttatttagcaacaataatatattttgtgggaatactatttcaaaattttggtttatatacataaaggtatatctattcatatgtacttaaaagtgctatgttcacatagataaataattaccaaagtacatgtgaagccaggatggtggctcacacctgtaatcccagcattcggggaggttgaggtgggaagatcacttgagcccaggagttcaaaactagcttggacaacatagcaagacaccatttctataaaaaattaaaaattagccaggtatggtggtatgggcctgtggtcccagccacttgggaggttaagatgggaagatcagttaatcttaggagttcaagactgcagtgagctctgatcacaccactgcactcagcctgggtggcagagtcaaattctgtctctgaaaaataaaactaaagaagtaaatgtctgcactttacaaaagagaagatgtaaatgcaaatgaagatgagcattgcagaagaaatattttcattattgctcagagtggctttaatgaagaaaagcaggaatgaagaagagttcactgagcatcctggaatgtaccaagtcttagggtcacaatgaatcttcacagcaaccttgtaaagtgtgaattaatacattcattctacaagtgagaaaaagatggccccaagatattaagtaactcacttaaaatcttaagtcataaaagagattatgtattactttaagccagttcaccacaccattgaggccaacttctagtaggatgttggaggaaggtgaggtcattattttcttagtctttaaatatgatcaagcatagagaatatatttatttaattccaccaataaatgcctgtggaatatctattatataccactactatatgatgctagatgctgagtttctcagcattcaccttggtgggaaatttcattgtctgatggaagagacagacataagcagatcattaattagtacgtgggaagtacaaggttctatgtgaggaaaagggagggagaaactatacatgcttgatagatttgggaaaaatcttaaattggaggtgacatttgagttggtccttgagtaggagtttgccaggcaaagaacaaggtaaagtcaacagcaaagaccatcctgaaggcataaaagaactcagttttagaaagggaatgatcatccttctgtgtgacttgaaggccagttttgagataggtagtacagagagagaaatctcatggcttatttctaggcactggcttcggagaattt

SEQ ID NO: 148 - DNA, 207542 bp, Human
  misc_feature (1)...(207542): n = A,T,C or G
ccaaatactaaggtttatcatgtagatttttcttgtgttgtctccaggctgacaggggtctaaaattgtctctggtgattaatctttgtctttcctggtagagcaggaaggaggtacaccttcgtaaacttatatcctgctttttggcaaatagagggagggcagagtgcttttctagtaccgtgtacctatttgcttcttcctaattgccttcagctcaaaataatccttaaaccaaagtggcatacactgccaatgctcttgagtagattgaaggctccaaagtaaaaagtgctgtactgtagtattggatctccaagcatcagcagtgagtcaggtattacaatgctgttttcagtgagtgtgccatccgtctatgaggagaaatgagaggagctagaaaaataaactgacagctagaaaaatactccactgaatcaacaaatagacatttcttgaaacagtaacatgctcaatgtgcaattttgaaaaagtaaactgagcaaggatcatgaaacatgatggtggtgagaatttatacttctcaggtagccaggggaagctaggtttccacagattcctttgtctttcagtccttttgaaaacggagaaaaagcaagagaagagggacggcaccatcaggtagagtggatctcagctagaatgaggggaagtggcccagaatccaacctcctccaaagagctgtgtgacaggcaagtcctatcctttctgcacctctttccttaaatgtaagttgaagcatttggaccagactgtttcaatgatcttctagattgcttttgccaaaacagaactctccattcctgtaagataagtacacaatggctctcagagatctaaaaactggccttggttacctgcaaactttgaggccccaaggcacaaaaataatagctttttttttttatttttttttttaaggttcatgaaagcttcggacacaaaagcttatatggtcttcgtctctataaataaaccagggagtaaagaaaaaccccgctagtttcagtaaagcgttgctattaagcaaagcaaacctatgcaaatatcaagttcttaatgaggagtgtttcctaaggggcctgtcctctggtaccccgcctctcctctgccacagtcatgtgaaggcagacaggcacacactcgcacactagcacgcacttgggagctcagggaacataacactggttagtgagtcggtgtccctctcccatcgattgcaacttttcccctccttccctctcctgcctctccccactttctacatctccgttctcaggaaggctcagggaggatcccccgctgcgtgcactgcgttctgagaggccggggagagactctgggcccgcggtcggggcggagccaaggtcccaacccacattgaacgggcttgaggattacttggagggctcaggatctaggaggagggcccagggcactgggttggggttactctgggaaagctctgtgggaccaggtgggaccttagggctggagatggactctgcgagctgggggcggagttctagactggcaggagcggagttctgggtggcgggggcggggtcgggaccagcagggacggcctctgagagttgggggcggaattctgggccggtgagggctggggcgggaccagcaggggaggcctccgcgagctaggggaggagctctgcattgtctggggcggggcttcgagtagcggtagcgaggtctggagccgcaggcgctgcctccgcgaggtaggggaggagctctgtactgtcaggggcggggctctgagtagcgaggccgggtctgaactatcaggcgcggcctctgcgagctgggggcggggttctgcaccggcgggggcggggttgtgagtggtgggggcggggtctggagcagcaggcgccgcgtttgcgagctaaggtcggagttctgcaccggcgggggcggggctctgcgtggccggggcgggctcggggatccgcggggcgactcccggtctggcttgggcaggctgcccgggccgtggcaggaagccggaagcagccgcggccccagttcgggagacatggcgggcgttaaaggtacatcgcggtccccggctcgcttgtcgtgtggtggggttgccacctccgttccggtcaagcctggggctgcgccttccgcgcgccgttggggaacggcctcaccacccttcccgcctctccggttcgggaggcgatcgaccgctcccttcgtcccttggggtgtgggtggagcggcgtttcgggggagccttggccctttttgcaaggccgctggccttcctgctctccagtggcggcaccagacccctccccagcctgagccctcggcgagagcggcgccctccacctctcctgagtttttaaacaaggtttccacttcttgacgccaccctaacgcctttcttctggttttctgcccctccgcagtttcctatttgccacaaaggaccctttgtctccagcgttcttagcattgggaaacttaatcctctttttcctaatgatttttccaactgggcagagttgaccgcgggcgggtgtcaatggaaagcacccagaaagacggtgtttctcgcagtcgtggagagtagattacgtgtaattttaatactgctttcttcggtgttttctctgtttatggacagagcagaaaccagtgtgtgtgtagtatgtgttttttgcatggggcagttggtaaaaacaccgcgtcccttatctgtatggcttcagagcaatgcgagacggaaaaggttttttgcaaggcttcctgtattttggtaggaaaacattccatttctaatctgtcgaatagagtagcatgacttgtttttatattggcttttatatcatccttgaaatttgcacccaaagatatccccagttaacatctgctataaacatgtagatagtatatatacgagtacgcctctgttcannnnnnnnnnnnnnnnnnnntgccgaaaacagatgaaaagtagtgtctcagtactacacatgatcagaaactaccaaatcatgatcacgtttatgtgtgaatgtgttagaaaattgtgatgtagtgaaaaaaaaggaagtctgaaatggaaacggactaagggaaggaagcattttacagattgttcaacttttattgaggaactactgtatgccagagacttaggatacaaagataaatgagaagttattggtgggtgacagagctggaaataattatattactatgtcagtgtttatgttgggctcagatgcggtgggagaacagatggtgggttggattttgtcctccaaaaagatgtgttcaagctctaattccctggtacctgtgaatgtgatcttatttggaagtagtatctttgcagatataatcaaattaaaatgataactggtttaaggtgggccctaatccaatgactggtgtccttataagaagaggggaatttagacatagagacatacagggagaataccatgggaagacggagacagaaattggagtgatgcagctacaaagtcaggagcaccaaagattgttggcaaccatgctggcaaccactgagtgttaggaagaggcaaggaagggtgcttccctacagccttcagagggagtgtggtggcgctgctgacaccttgatttcagaagtccagcctccagaactgtcagaagataaatttctgttgttctcagccatccagtttgtggtactttgtaacggcagccctaggaagctgatgcaggtgggattgattcccctgctccagagaaaggactgttttcacagaagaggcgatgcttgaactgaatctgaagggatcaatgtggcttcccttggcaaggcatggagtgaaggtggagtatatcccaagtggggaggacagcacgtgacatggcgcagggcttatgaaacaacatgccttcttctcttcaggtacttaagctacattagtaagaccagaacttagtggtgagggttgaagctggctggacaggcagttaggagtgagtcaggcgatggtgagcctccgtgccagaacaacttgtaggctgtggaagcaaccgcaaagggatggcagcggtgatatatatagttgaaagatcactgtctgctgtgtagaggatggattggaagagtcacagaggcaggaataagaggttaagggcctgcaccagggctgtagcagagagtttaagaagtctgggagattgagtcaccttgacctactgattcattggaaggtggaatgcaatcatggtgtcagtcctctaagataggacctttaaagtgtagggatagtggtttggttttacacgtgttacacatgttgaatttgaggttcttgttggcggtcaaggcagagaagtccagactggaggtggaagtacaggcctagttctttaggacctactctgggctggagcatcagttgcggccgggcccttgtggtagtaggagctttgggttgaacataagttttcagcaggagtgcgtggagtgaaaagagagatggggttggatttttggtcaactccaactttaagagattcagaggatgtgattcctgaaaaaagaggaaaaaaaagaccaaaaagaatcaaacagaaagatggttgtgaacgttgagaaactggtatcagaacagaaggaagaggtctgcagtacctagctttgacaggcctcatggaggagggggtactgccgatggtcaggcacagaggagaggagcaaagcctgctgggaaaagatcatctgaatgaaatagtatgtggtatttgctttccatccacacatgggcattttccattaaagagtggaaatgtaaaaagatatgttaaaattgacagtgtttctttgtcccttaacatgtgtatactttcagatgttttttaaaaagcactttggcaccttcctattaaagagtctctctaaatcttctctcaagtaaaaggaagcaatcaaaaatgttcattggcttaattaattagtttaatactaattatgagtattatggacttttttcagaagaaaatttggataagatagtctcctatgcttttgatttctacctttatcaaagaacattgctaaaatgagtagatacctgagtcagtcagcatttatttggctacctccttttgccaagcactttacatagattatctcatttaattcccataagctcaataaggtggcaccattatttccattttacaggtgagaaatcaggttcagaggattagcttctacccaaagtcataagaccagatggtggcagagttaagatttgactcatgtttgtgactcagagctcaagattttgtaacaaccttgatactctgtttctcactcagcagcacaacaagggcaaatacgttcctactcccgcagagactagtgtccaatagatacagggaatacatattttattcagtgcacactagttgggaattgtttcctacaaagacatgaaaacaatcttcaaatacttgcagtactgtggtttggggaggcaaaatgatcaaaggtatatattacagggaggcagttctggatataatttaaagaaggagggctttcaacatttagaagctgttggaattaaatgacttgccttgggaggtagtgagttttccttcactggagttatgtggaccaactggctgccctctggtgacaaatacagagggaattcatccattggataggggttaggtactggaattacttgagacctttgtatactttatgatttttaaggtggcagacatgggtcattgtcttaatcagtttgggctactataagaaatatattttagactgggtggcttaaacaacaaacatttagtttccacagttctgaagactgggaagtccaaaattgtggtgcagtcagatctggtgtctggtgagagccagcttcctggtttgcaggcctgctttctgctctcacattggagaacagagggagagaaacacagagagagtgtgtgctctactttctctcttcttataagggcactcatcccatcgtggagaccccaccctcatgacctcatctgaacctaattatctcccaaaggtccacctcctgatagcatctcacggtgagagggatggagccgggaaggtttcaacatgtgaatttgaaagggacacacataatgcagtctgtaacgggtcaaatgtaacctcaataaaatgagtaaattgctacatttgcttgaatttgggacctttttttctttcttttttattttagtaaatgtttttattgataaatgattcacataccataaaattaacattcttaaagtgtaagatttcatggtttttagtatattcagaaggttatgcagccatcactactatctaattccagaaaatttactcatccgccaaagaaactctggacctattagaagtcactccccatttccccaaaccctctagtgcctgacaacctctactgtgggaactttaacttttggctttatttttcacagctctcgtggcattatccttcagtggggctattggactgacttttcttatgctgggatgtgccttagaggattatgggtaagttatcatttcaaaaagaactattcctctttctgtgtctttgtcactattagtatgggtgttagagagttcggtcaatttagcaccaagttctaaccagtgagttagtggagcccagtttatgaacacagtccctttgtgggtcaggtgtacttttgcagagggctctgttaaaaattgatgtattcattccataagcatttgtttaacacctactctggactagctggggacacacaaatgaagagagagtcctgtcctcaaagaggaggtaaagttctagttgtgagtgagagacaggcaaacggtctagtcagtaatctggcagctgcagtggagatgccagcacagtacgctggagctcggataaagtgcacctgagtttcagtgggacagtcagggaaggctgcatggcagaggttgtatctgagccaagactaggtggatgaataagagtttttcagggtgatgagtcaggggaggacattccaggcagagggaacattctacacattttttcattcaaccattgttggttgaatgcttcccatgtgccagctactgttatgggaactagggattaagacataagaaaacaaaggtcctgctctctcagagtttgtgtttcagtgggggagacggacagtaaacaacaaaagtatgcatactgtcagaggtagaaatggtacaaaagatgaagagcacagaagctgggaagacagtggtcagggagggcctctcagaggaggtaaaaagtgagaagaaatgtcaagaaaatcagcaagcaggccatacagatctctagggaaaaagcactttaggcaccaggaaagctgaatgctaaggcccggagacatgaaagtgtatatagccttttcaggaaaccacacatggtacattatggtacagcataaattgtagtggagtggcaaaagaagggttagtcaagagtgtaaaagtcagcacttagggctctatatgcctgccgtgtagaggaggttccattttatacatcagacaatagaacctgggaaaatatcttgagaatgggtttggaggagggggttatgttaaaatgtcattcttgccataacgtgagactagataggaaagagctgagactgcagtcagggagaatagtaggggactactatcataaatcaagcaaaattgagggctggggcagtaggaatggaaagaaaaggagagtgagttaggaaaccaaaccaaccaacaggttttgttcatcgatgtcaggattcaacaaggagggagagttcttagatgtctcccaggtgattggcttgaacaactagatagaagatgatgtgattaggccaggcaccatggctcacgcctgtaatcccagcactttgggaggctgaggcgggcagatcacgaggtcaagagatcgagaccatcctaggcaacatggtgaaaccccatctctactaaaaatacaaaaaattagctgggcgtggtggcacacgcctgtattcccagctacttaggaggctgaggcaggagaattgcttgaacacaggaggtggaggttgtagtgagccaagatcgtgccactgcactctagcctggcgacagagcaagactttgtctccaaaaaaaaaaaaagatgatgatgatgtggttaagacctattgaagtgagttattatgacagtgatgaattcaaatccatcaccgcagtcctggccaactattacagaaattgtttaaacccaagagggatccagatataagcggtcacttatatttgtttagagccttcacagcaattactttattctagcttttggaatgtaatacggtattattatcctcatttctcgctgggaaaccaaagcccagggtagttaaagacttacccagattgaacagcagtaagtgacagagcccggccgtggtggctcatgcctataatcccagcactttgggaggcaacggtaggaggattgcttgaagccaggagtttgagaccagtctgggcaacaaagtgagaccccattctacaaaaaactaaaataagccaggcatggtgcctgtagcagggttgggaggctgaggtgggaagattggttgagcccaggggttggaggctgcagtgagctgtgatcacaccactgcagtccagcctgggcgacagagtgagactttgtctcttaaataaaaaagtagaaaaaaaattaaaatggcagacatggaaatggagctcatgttctgacgcccttgaccaaacgtttttccactattccacaaccaactgtaaatctaggagttttaattctctgtgatacactgtctttgtaaggtaagaaaatgactcattactgctactacaaataagtttgttttctatctttattttaattttttgttttttagagatgccacaacacccagctgattttttttagaagtttttgtagagaccgagtctctctgtgttgctcaggctggtcttgaactcctggcctcaagtcatcctcctgccttggcctcccaaagctgtatcttgatagtgaaccaggattatcatctatattggaagtcagcaaactgccacatataacctgctacctgtttttgtaataaaggttttattgaaatacagccatgctcatttgtttatgaattatctttggctgcttttgcattgctctgccaattatctttggcagagttgagtagttgagatagtctttatggcttgcagatcctcgttatttactctttggccctttatagaaaaagttggcccacccctggcctatgtatttattgaattgtatatatttaatatttacattttatatataaacaaggtttcttgtacattaatatttctcttagttggatatcggtggcttactatgaatgaaaacatagagtcagattgtttttcacaaaactgtcactgtattccaggaaaaattaagagttcttggctgtggatatgtaaggtgacatatctattccaaaccccttcccctctctgtgtctcctttctcactgttgaaagaagggctttgaagtagagaatgtctaagggctacttcccacaatattgtttggtgattcttgaaacatactatcatccctctagtttaaaatcaggggtccaaatccactgtttccatcctgagtcctcttgaaggacacattcccttcttgccttttggttgcctagatctgtggctggaatgggaggctttcattagtgtggcttcatcccaactcctgcttgtaggtgctgtctgggcgtatctgtgtgattacagtattgtggtgatatgaattattgtagtgtatatataaaaatgagcagagactttttttttcttaagaaatgaagcataagaaatgtctgatggagaaaaaaagattatttttgaagtactgatagagaaaatactgttggaaaccagatggcaattttttttttataattgcaaaatgttgaaatttgggaggaaaacagttttgttttgtttttgcattacactattaattgtgagctcttataatgaagatcaaagtacatctaagcttttcactagtgagcatatttattttcatgccttccgtacttaaaatttatttattattttattcatttaacaagtataaatggagtacatcattctaggccctggagataaatggcgtttgatcaagactaatctatcagatgggaataagtgttgtgcagaaagttcaaagagggtggtatgttcgagggtgacctggggtacattagaatagatgaccagggaaagttctgcttttagaaaggaatctgtcagtttagatcacatggtatgaaggagtcagccaatgagaagatcatggggaaggacattgcaagcagggggcacagctagcgcaaaggccccaggataacagctatgagctcaagagtgttcaagggacagaaaaaaggctggtgtggctacagattaagcaaatgaagggaaaagagtacaaaatgaatggaagaagtagataataccagaccataaaggctttgtaggctagggcaaggaatttagggtttattctaagctcttaaaaggtttcaagcatgcgtgcactcaaaagatctttaccgaactagcttttgcaagacactctactatgttctatagggaaggcagaaatgaccaagttaaaattctgtctttaaagaaattgtggctcagtggtacagaaaacagtaaagtttctagggtatatattatatagtggcttcttaacacaatataagctacctacatagtaattttaaaattatcactacttatctatccctggtagaaatcatcttatgttctaatattcacaattaattaattttttgacctaaacatttaaaatagcaatgattttgaaatagtagtatgtctttcatttaaaatgtaactgttacttttctttttggattttgcctgggtccaactgacagcgtttactggcccttattcgtcctgattttccacgccatctcccccatcccccatttcattgccaaaagagtcacctatgactcagatgcaaccagtagtgcctgtcgggaactggcatatttcttcactactggaattgttgtttctgcctttggatttcctgttattcttgctcgtgtggctgtggtaagttttattttctattgttttgcccaaccgttgctgagtttacttcagaggcctgtgtctgggacctccatttcatgctcattacttaggctttatactcaaggccgtgtgtttttagtttctctgttcctctactttagacctgcctaacagtagttcggccatgccttcagagtgctttctttatttctcttacaacttttagccagacgatatgatttcttactttttctactttaagctattctctggaattgttcttaaattcctgcctcttaaatcttacagtaatccacagatactatgctagcagtacttttctagttgcaagatgaagatatttcaaattcttctcctgcaaatgggatcatggactcaactctcaactcagtataataggtatatgttgagggacaactgtgtagcttccagaaaatgcagtgaataagttgacatcttcacttccaagacaaaaactttctttttgtcttcagagtacacattgtaggtataatttattcaattatttgctattcactgtctttcctactatttgattttattccctccaattacgttctattttaattttatgaaactcttatttgaggcattgaatatcagataagcgcaagtcttgttcattcaataaatatctttgcaacaactgctacttgtaaaacaccagaaataagaaataggtactgtctctgctcctgaggaacacagaaactagcttgctgggtaagtatactataagtgtactaagtgagacggttgaagcatgatcagaatgccataggggcaccaagaagagagaaattccgactggcatttgatatgggcctctaaggataaatagcatttgtattgaggtaggatggctgttgtatggaatgacattcaagtgtaagaatgcagtatatagaataaagaagaatccagtgtggtagagctaaaagaaagttgttgaggttaaggctggaagggttgtgaaacctgattagcaatggtcttgaaccccatgccagtttgatctttgtctagataatggggaaagattgaaggtttttgaatacaacaagattgtcatgactttatttttcttgtgctttagaccagcccttcttaagcgctgcagtaaatatttatattttttcctttcaatactgccatcatattttgtgaagaaactttcattgatgtttctcttgcttaaagtaaaacaaaaaatgcccactagagggtactctcacccccaaatgtgcttctgtaaaaccatctacaaaccatctactaagctggaaagcagttttcagttgtatgaagactattatttaaagtcttttcttgcctagaaaagaaacacacaaatttataactctacaatttttattttccatgaaagaagttgatgtgtgcagaactttcagtacccaatattgtaattgcactatttataatcttaccacttgagttttacttaaggcaatcattgtcaattaaaaacaagtagagaaatatgtctaattgggaacatgttaaggatgataccagacttaattaacaagcatcacagaagtaattagactcattactgaacagttcattgtctcctgttacattattaagccttttagcagctttgtgtaacatttcattggatgtttctaatgcagaaaataatagggattgcaaagagtacaatatgaaggaagtaaggatttaatccttcttttcttgtctttcagatcaaatggggagcctgcggccttgtgttggcaggcaatgcagtcattttccttacaattcaagggtttttccttatatttggaagaggagatgattttagctgggagcagtggtagcactttattctgattacagtgcattgaatttcttagaactcatactatctgtatacatgtgcacatgcggcattttactatgaaatttaatatgctgggttttttaatacctttatatatcatgttcactttaagaaagacttcataagtaggagatgagttttattctcagcaaatagacctgtcaaatttagattatgttactcaaattatgttacttgtttggctgttcatgtagtcacggtgctctcagaaaatatattaacgcagtcttgtaggcagctgccaccttatgcagtgcatcgaaaccttttgcttggggatgtgcttggagaggcagataacgctgaagcaggcctctcatgacccaggaaggccggggtggatccctctttgtgttgtagtccatgctattaaaagtgtggcccacagaccaagagcctcaacatttcctagagccttattagaaatgcagaatctgaagccccactctggacccaggacattttgatgagatccaaaggagttgtatgcacatgaaagtttgagaagcatcatcatagagaagtaaacatcacacccaacttccttatctttccagtggctaaaccacttaacctctctgggtgttacctgctcatttgtttaaaaaaaaaaaaaaagtctcacctgctttcatgctgaggacaagttcagatgttcaagcctataatatttaggcagttcctcaaatttatgaaaagtgttctcagaattgggagacagtcaaagggtacaaagcctcagttaggaggaataagtgtgatttttttttaaagatcacttgcacagcatgctaaatataggaataattgaatgtatatttcaatattgctaagagagtaaatttctaatgttctcataaaaaagttaaatatttgagatcatatgttaattagtgtaatcattccaccttatattcaaaaatcataaaaccgtattgtaccctataaaaatatacaataatttgtcaatatataatcaaaataaaaaacaaaacatactctctcccccaaaaaaacatctcagtggggaacagatgtatcttttcatctgaaagacaatgctgggggaagagctccactgagatgcgggcagggaggctgggctcgagccagcccctgcgttagcaggagggggagaacagataggtaactcttttacatttcctttatgatctggcacttctccccagctccttccctctgccccccacccctactcctcaacagttctggtttgccctgacttctctacggctctggcttcttcccgaagagatataggagccatgtaagcacgcagtgggtgaactgcttaatttcactacatgttgatgtacttgtcttccgtcttgtaggtcttttctatataactttatgccacccttaaatgaatcattgggtatacctgtcatgttggatcctgtaatcacagttttccctgctcacctttttgtctaagatctattgagaaagggaaatatgggaaggagaaccatttgatcagaatacaaccaatagtctttaagcattgttaaagtatgaaactgaaatacattcaaaacacttaatccttgaggcttgtgatctgagtaattagcaggtatgatgctgggactggaaaatagaaagtaataactaaagggttaatgtgcaacgttattttttggccttgttcatgattttatgttttcagtgtcctgtgtacatatagaattgttaaagttgtcatttccaatatttatattagaaaaattatttagatactttataattttaaccggcatttttaataatgacacttgcatttattgtattgtaataaatttcacttttaactttaaaagtttaactttaaaatttttttgtgatgttgccttgcctgaaaagataacaaaaatgagagaatttcttgatgttttaaaatgggcagttttgagcaataatctgtcctaacagaacagtagcaataagttttaggataccatcttgaatgtctagttggtgtgcaatagcttttctttctaagatggcaataatgattcatttctactacattttgcaaaagtgtttttgttgcttatacacattttcaataaccaaggtagccttcatatgtagccttaaagcattacctcttgattgtatctttagattgatataaagtacttgcatatagagtatttgaagtgatagattattagatttgctctatgtctgaaaagagagctattctgcagtgcctaaatatcatttaaacagtaaatattaataggaaatattgctatatctgaatatataatacaaaagtttgatcatggtgacacaaatgttggacatttttttccttataaaaggctctttttttatatattgtacaatatatttggagattcagagcatagtgactatagtcgaaaactgagattgcacttccaaaattggccacaagtaaataatcttatgaagggattctttatcatgtttcaaacaagtgggttacaagcagactttgagacacttttccacagaaacaatactatgaattggtgattgagttcccaggccaagcctccctcaacaggttcaactctaatatacctaacctgtgatactgaaggtgcctgcctgagttttgggtctctgagacagggtagtgtgagtagtttggaggaaggacagtgcaactttccaccccttttcctaagaacaaggtctttctccttttaatttttccactcattttcacctcctaatgcccttgagatccaggtacactcctgggagttttgttcacctctcccaactgagaaccttcccactgggctccatcctccctcctgaggttcttcatattccagagtcacccacccttctcctcccattagtcagttctctaagtacagctgatgtcatgtggtgctgagaagaaagcagatcacacttcatcacagaaagaatgccttgtgattatcttctccacatctgaaattccttttgacacctgcattgggccgactgccattcccatgactgctgcacctgcgtttttagagaatgcctcataacccactgattctcattcacagagaatgggagaacggaatgaagaaagattccagcagcttatagaaggatagcaatattttgggacagggaaaatcctgtcatacctcatctcttcctcaggaggagttctgagctggtcctgcttttcatagttgtttcttttcttccacttaagaactcatagatttttcttactgtcctaaggaagtccttacctctgaggtatctcctcaatgaatactgttttcaaggctgaaatagttcattatgttaataaccttctttatgttctcagggaaatgcttaggtggtgtcacaaaatgtgccttttcttttctttttttttttttttttttgaggcagagtctcgctctgttgcccaggctggagtgcagtggtgcgatcttggctcactgcaagctccgcctcccgggttcacgccattctcctgcctcagcctcccaaggagctgggactacaggctcccgccaccacgcctggctaatttttttgtatttttagtaaagacgggtttcatcgtgttagccaggatggtctcgatctcctgacctcatgatccgcccgcctctgcctcccaaagtgctgggattacaggcctgagccactgtgcccagccaaaatgtgcctttgcaaagtttgcgaaatcagattttgtatcccaatagaaccaaaatatttatgaggatgctagcattttccaagcatagtaattagttcacaactgagaaatattatgtctgtagtagataaatattagttgtgcattttaatttaattctcctttttccattttgtctcatgaagtaccttattgcaaaaatcccactgagtaatagctcataaattataatctttcaaatagccatgctaccagcgtacaacagtgatacatgtaaccccaaatgtgatgtgagaggacgattactttgtaaataaaacttgttattgacattttaacaaaggcttttatgtacattattaaatgaaaaagtttatattttactttgcggtacgttacatttggaaaggagatcagcaagttaattttcccagtgtttttgtctgtataatcttaatgtgaatctgaccagtttgaagcctgtacttgctgtagttgaagagaaacagttcaggaatgttgtgctgactggaaggaatccaggccttaatttctgtggctgacactccccatggtggacatggaagattggaaaagctgtattggaaaagaaaaaaacctgacaccttaagaaaagtgctctacatattttgaagagtctttttgcacactacagaaaagaatgcactaatagaaagtagtctttaaggaataatatgtcctccttatgcacaaaacatttgggaaagatctgatgttttactagtggatttaggcagccagattgtaaagaaatcaagctagttatttctttgcattgccaagctaagtgtaaagttaaacttttaatagaaatagaaataaaaatttgataataccaacataactataaaatggccataagaaaagtcagttcccaaggaaaattaatagatgaccattttgaaacatttatttgtggtcaatacgaggcacataggcaaagtggtcttaatcctgagattgctcatttggagaagagcacacttggagactgcacaatctctcttcacttttgattatatctttatcaaaattgaataattctaagtgtttacacacttcggaatgaatgactagatattaacttaagtgtgtgcattcatttttcccctcagaataattaaataataaaaccatcagttcaactttagctggataatcattgcacttatcaatttaaagcataaatgcctctgcctcaacactttcatttcctctgtggttgagagacaaattatatcaccacactctgtaaagtttcatgatttcttacagccttctcctcaaaattgtatgcttgttcatctgacaaacccagaattctccagtacttccaaccatccctgctgcagccttgccatttgtggttccttgacagtgctgctgttaaaatccacttaaccactgatggaaatgagttacgtgagttctgaacacaggttttaatcggattcctgattaaattaatggcagtgagtcttaggcttgatttattcaagattccatggtgtggaactgacagttgctcagctctttaataaaatcatatatatatgtatatattttgagatggtatctcagtatgttgcccaggctccctgggctcaagctatcctcctgcctcaacctcgtaagtagctagtacttctgctggaaacatgcaaatgtccattaactgatgaatggataatgtgatatatccattcaatggaatgtttttcagacataaaaaggaatgaagtactgaaacattgctacagtgtggatgaatcttgaagacaatatgtgaagtgaaaagagccagtcacaaaaggccataaaaggtcacaaaaggctgaggcaggagaatcctgaacccgaaaggcggaggttgcagtgagccgagatcgcgnnnnnnnnnnnnnnnnnnnnnnnnnnnnnnnnnnnnnnnnnnnnnnnnnnnnnnnnnnnnnnnnnnnnncatgtggattttagggtctccttctgttgcccaggctagtagtgcagtggcaagatatggctcactgcaaccttaacctgagcgcaagggttcctcccacttctacctcctgagtagctgggattacaggcacgggccaccgcagctggctaagttatttattttttgtagagatgaagtttccctacattgaccaggctgctctccaaccctggcctcaagcaatcttcttgcctgtctcagcctcccaaaatgctgggattactggtatgggccatggctcctagccgcctttttttttttttttttttttcaaaaaatattccaactgaggtttggcatttattgcttgagaaataaataatataaataaaatagcttgatttaggaaatgaagttgtgctagctggaacactggccaggttatggccacgataaagaagagaccagccgggcacggtggctcacgcctgtaatcccagcactttgggaggccgaggtgggcagattacgaggtcaagagatcaagaccatcctgaccaacatggtgaaaccccgtctctactaaaaatacaacagttagcagggcgtggtggctcacgcgtgtagtcccagctactcaggaggatgaggcaggagaactgcttgaacctggtaggcggaggttgcagtgagccaagattgcaccactgcactccaacctggcgacagagcgagactctgtctcaaaaaaaaaaaaaaaaaaaaaaaagacagttgagctagagagtaaataaagtggcccctaatacagtgggtatagattcatgaagtggcagtagctgaactgtagctactgttaactttgaggactaattaagacaatgtcaggaaaattttctttttcttttttctttttttctactctgtgtttcttcattatctgaatttatcctcatgcaggttggaaactgctgaaagcagtccatttttatgagctcttttattctaagccaaatcagtcagattacaaaccccattgtattttagataacccaagtgattattcaggtgctcaaaagcttttagagaactgctaaacctcatgtacttctgggcagtatcagcaattaaaagagtttaattttctaggtgaaactgattctggtttggatttctttatttggactgagagatattttaaccaggttaaaatattggtgcaaagccatctctgatgagacttaaaatcataaagctacttccccatgcagttcttgtcaccatttcagggtactgctgggcaataggacatgagttcccattgcttgtgggatcttcagatgtatatccctccagtgaattggactcagtattgttgagacatcaattttccgcaacatgatttatagattgaaagcaatcacagtaaaaatcccggtaagatttttaggagaaattaatatattccctgatttctaacttattacaaagttatacattagacaatgcgatattggagaaaggacacccatataaatcaattgaatagaatcaataattcagaaatagacccaaaaatatatggtcaaatgatttttgatgttaaggaaaaaataaaaacattttaagctgaggagatacaggacaaattatttgccctcatggagcttaccttcaaatgggcaagacaaataatttttaaagtaaaaaataattcaatagtgaaatttgggctgggtgcaatggctcatgcctgtaatcccagcactttggaaggctgaggcaggtggatcatctgaggtcaggagttcaagaccagcctggccaacctggtgaaaccctgtctctactaaaaatacaaaaaattagctgggtgtggtggcagatgcctgtaatcccagctactcaggaggctgaggcaggagaatcacttgaacccaggaatcacttgaaggcagaggttgcagtgagccgagatcatgccattgcactccagcctgggcaacaagagtgaaactccatctcaaaaaaaaaaaaaaaaaaaagctgggcgcagtggcgtgtgcctgtaatcccagctcctagctactcaggaggctgaggcaggagactaacttgaacccggaggcggaggttgcagtgagccaagatcgcaccactgcactccagcctgggcgaggaagagagattctgtctcaaaaaaaaaaaaaaaaaaaaaaaagaaaaagaaaattgacagtagtgaatgctatgaagaaataaatcaggataaaggcatagagaatgacttacagtggtgctatttaaatagggtggatagagacgattggtggctgaatagagctattgaataatgagaaggaatcaacacgatgggacctatttttaggtctactctttcgattctttttaattttaggtctactctttcacttattctttcaagaaatatttgttgagcacctattatgtgctcaacataattatattattctaggtgctggagatagaacagtaaataaaacagacaaaacccccagcccccatggtgcttactttttttttttttggtagggaagcaaaaaataaacttcacaaataagtcaaatggatggtatgttagtggaaatgctaaggcaaaaaaaggaagaaagggatgtagaatatgtgtgagtgtgcgtgtgggcgtgaacgggtgacggtggcttctgtttaagatacagtgcccaagaaaggcttacctagaagatgacgtttgaaggaagtagaggcagttatggaggcggcaatgggcaagatggttcaaaaagagggataagcaagtgcagcggccctgagctggagcgtacctgtgagctggcatgaagccttcagggagagtggagggagataagataatgtgtgtgtaggggtggatggatcctatggggcccagcaggtcattgtaaggcgtcggcattcatttagagatgagacgccactagagatatgagcaggagtggcctgattatgttttattcggattgctctagctgtgttttaattaaaactattttataaagagaggaaaaaacaattttgcttttccaaatcaatcatgtttatgtctttgaaagaggagaacaacaaatcacagaaaacataaataaatgcattttgttcagggacagatggctgaagcaacgagagtgaatcacagagtcacagaatcacagttatgtgcaaagcactcaggaaatagcttggtccctaattaatcattccatgttgttaaactctgtggagataaatttagccagcagtaggtagaatgagatgaattctcatgaaaacatgttttcaatgaagttggcaaagaatgctgtgtaaaccccaaatagctgaaactatgtcctaatagcattgagcttggtgtgccacatccttagcaataaccacttgagtgtctgtccctggggcctgcagatgaggatgttaacatctgatttagcagaaggggtggggagagtgatgggggacaagggagagagtcctgaaacatacaggtggtgaccctaggagctgactttggtgccatttaggcatatttgctttcaggactcacacttccttaggtttaagctatcaataaaaggaaagtggtttctaagtcctagcctttggactgtattcctttaattcatatagtggagcagggggaaagttatcattttaatggctggtagcacaattccgagaagaaaacttttttgtttatttaatcttagataagccatttgagtgttaagagctatggcccacgacagggaagggatttgaaatgttttagataataaagtgaggagaatttgggatttgcatcagaatgacgaaggggaagtgggggaggggtgatacactaacaccagtggagaagaaatccagggaaaaggtgacagaaatcctggccactgaagggctggagcctgaggctaaaacagtgccagggagaccctctggggtgacagcctaagaatttttgataacaaggatattggcagagcagtggtgaaaccctctccccttttcccattgcttctccctcctttgccccagattcccactcaaagcctgtgatacatactgttgttcactgtggtgttcaggtatactgaggggtaggagagtgaagaaaaggagaatggtttgcaagtggggttaatgtgggctgagagagaagaggacagcaaagaggcgtgagacacagggtaaagaaagcattcagagtaaaatggaccaagaggtgagtaggagaataagttaccccaaatgcctcagaaatatttgttgggaggactctgctatatgagacttaagccctttttaaaaaaataaaataaaatgaaaaggtgattcccaaaaggttggtgccttatgaggcttcatctgcataggatccctggtttcacaactccttatcttgaccagactttctattgattccaggtctttagacaataacttaattctttcaaccaactgtcaatcagaaaatctttgaatccacctatgacctatgacccctcccctactccaccccactgatttgagtttgtcctgccttttccaactaaactagtatatatcccacatgtattgattaatatcttttgtctccctaaatgtataaaaaccaagctataacccaaccaccttgggcacatgttctcaggatctcttgagactgtaccttgggccttggtcatttatatttgactcagaataaacctctttaaatattttacagagtctgactcttttcatcaacagctggaatatttgtttcttgatctaatgatgattacacagcagttttaagtttgtgcaagtttatttggttttatacttacaatatatacactcaataaaatatgatatacctcaataaaaataaagcaatgccttccctgcctccaaaaacaaaaccaacctgggaatacaaagatcaaataacagtgcctgcagaagcttagaaaatcggcacagatgtgacatttgactcagttcagcacacattatggagggttactatacaagggagactgcacacagagaccatactcaggagcctgaggatcctgaatcactgacctagagggaagaagtaccagcccctatcttgaggacctcatattacaaggcagtaatagacatgcaaaaattaatagcaacagtctgattctggcaattggctgatatgccaactcttaccacttttcaacattgtgctagatatgtaagtggcagaaagactgaaaaggaataaacagattattatttgcattctatgctcttatttacttagaaaatccaggagaatctatacactattagaaaaaaattacacttataaaacttactagataaaagatcagtatcaaaaaaatcaattgctttcctaaacaccagtactaactaattagaaaatgcactgggcacagtggcttaagccaataatcccagcattttgggaggctgaggtgggaggatcacttgagcccaggagttcgagacctgcctgagcaacatagcaagaccctgtctctgaaaatgcaattttccaaattttcaataggaacaattacataaatgattataatatatatatataattttatatatacacatctatatctgatgttataaagatgtgcaatacttggagaaaaatttcaaaaattttttgctgggtatataagctctaaatatataaaaagatatactatatttaaatactaagggataaagtattaagcattcaatgaatactggaaaaatgattggatgagttcatattggacagagccacatctcggtcttcttttggaatcctttcttcatatagtacctagaatagtgcctgacactgtgggaaaccaaaatatgtcacctcaaaatatacttctttggcgtattttcagttggttattcagagaagtagcagacaggaatagttctgaaaagctgttcttttgggggtagatttgcatctgtagaggaaatctgcattggtgaggtaaagaacagacacagaggctttctctgaggtccacctatctggatcaggaaaaaggaactcaataagaaaaggagactaaagacctgatactttttttttttttttttttttatactctaagttttagggtacatgtgcacattgtgcaggttagttacatatgtatacatgtgccatgctggtgcgctgcacccactaatgtgtcatctagcattaggtatatctgccaaggctatccctcccccctcccccgaccccaccacagtccccagagtgtgatattccccttcctgtgtccatgtgatctcattgttcaattcccacctatgagtgagaatatgcggtgttaagacctgatacttttaaagtttggacagtgaaacttttgctgcatctcttccttctgagggctgctcccagagagacttcatctgcatcacaagacagcctttgctcaccatgcctttcctccccacaccctctcataatgtgttgctacctccctgcaggagcctttaggaccctatttctttctgtagcttaaaatgctattgaagcttcaactatctggcccttctttgattcttcgagtctcgtagtttgtgtggctcctgtgcacatgtgcatgtgataaatgtgtatactttgtctcccatgaatctggctattgtcagtttcttttatagactcagattaacaaactttcagaagggtggaggcgggcggggggtggggtggggagggaaatccctttgctcctacagcaaagtagtagggactcaaaaaatatcgaagagaagaaaacaaaggagaggaaaggaggaagggatgaataactttatttaaatgagaaaagtggcactgagttaaaaattattaaatattttgaattctttatgttattacaatttttacttttgctaacatcctcttgctttattgttgtaataatgtgtgctcatatagtcattaagagtttacaaaactgtgtcaattaggtccatataacaatgaaaaagcagcagcatcactggaaaatctcgaggctcttcaaggttaaggggcttgccttagatgacaaataacctgactgttactcagacccaagttttttgacttcaagggcagcgactttgtactctacagatgccaatctaaatgggctgcaagctagatgtgtaggctatggattgccatcctaattgggacacttttgagagcagaagtaggtgttatccattatgttgggacaataggtgtaaattggtaccatcttgggtacatccaaggtacagtttaccttatctatggctgaaaactgagtttaaattaattcttcttacgggcagcacaagtcaaaaagccctttgccaagctgcacagattgtaaatgctgctcctggctgtgttcaatgtatatttggacaaagtcaataataaataaataaaggtcaactatgaattaaggtaggtttgttagtttgttttttggtaaaaggaatgtcacttgcttagagaggttaatatactgcatgtggggcaaagttgctggtaagtatcattcttccttctgtccttcgaaccccaaatgacacatcttgttcacgtatccactatggtgtaagacatcactgggtgctggctgtaattttatcttccttcttaaagtctttataacgtgaagataatgagtggatctgtgcgaaactcactaccaggatcagccaatacttgtttttctgtggagcttttggtgattactttaactgaatagagttttttttttttaaacagcaaatctttcaatgtattagcaattttaagtaagaatctctaacttgtaacacacactgaacttagagttttgttttttttctacacatgccatttctgcaagtgaacttaagaaatttcaactaatatagaagacttaatcaattctcaattacatgttgtaaattaacctgctaacaggaacaggtgaaactctcttaacattttaaggacataaagtaatcaaatatgcagatttaacacaaaaccattaatattatggggttcttttcaatatttctatgcttaattttaaatcttttttaggataaaattgttttccaactaagaaaagtattgtcatcctattttgtgagataccactaagtcaaatgagattgcgtaatgaccagagatattattagttgaggtgctgactgtatttttatctgatataccaatgagtcttttcacttgggtaaatatgtaggagctggatttctgagttgaatggtaagtctgtttttaactttgtactaaactgggattttgttttccaaagtggctgtacaattttgcattccaaccaacaatgtatgagagtcctagttctgcatgctcatcagtaaatagaattgtcagttgttaaattttagccattctaatagttcctacccttttttagaccatatagggtaatgacattgccatggcatctgtaaactgtcatggcgctagtgggagtgtcttttggtatgctaatacattataattagtgtataatgagcaatgatatcgaacagaggtcactttcattgccatgtgggtttgggtgggttttggccagcttctttactgcaacctgttttatcagcgaggtcccttctgactaatgatgttaagaatcttttaatgtacttatttataatctttctatcttcagtaaaatgtctatagaaattattggtccatttctttattgagttgtgtgatttcttaatactgagttttgaaagatctttatatattctgaactcaaggctttattgtatatctcatttgcaaatatttatccagtgcatggctggtcttttaattttctttttcttttttctttttcctaactgctagatgatgtgggagtcttttcaaatccttagcatctttggaagagcagaagtttaaatttttgataaaatctaatttatcttttttgagacagggtctcactctgtcactcaggctggagtgcagtggcacaatcatggctcactgcagcctcaaccttcagggctcaggtgatcctctcacctcagcctcctgagtagctgggactacaggtgcccaccaccatgcctggctaatttttgtattgtgtgtagagacaggatttcgccatgttgcccaggctggtctcaaactcctgggctcatgtgatccacctgcctcagcctcccaaagtgctaggattaaatttatcatcttttttttttcttggatggatcatagttttggcatcttcttagaaatctttgcctaatgtcgtgatgattttctcctatgttttcttcaaagttttatagtttaaaattttagatttaggtctgtaatacatttgagttaattttttgtaaagggtatgagtgatcaatcaaggccctccctccttcctttccttccttccttgtatattgaaatccaattattccagcaccatctgttgagtcttcctattcatgaacagggactgtctctccatttatttagtttctatttgatttctttcattagagttctatagttttcctcatatagatcttgtacataatttgttggatttataccgaagtagtttggttttgggggtgctggtataaatggtattgtgatttttcttttctttttttttttttttgatacagggtctcaccctctcacccaggctggagtgcaatggtgcaatcttggctcacttgtaactttggcctcctgggctcaggtgatcttcccacctcagccccttgagtacctgggactacaggtgtgcaccaccatacctggctaatttttttgtatttttgttttgcagatatgggtttttgccatgttgcccagactggtctcaagctcctgggccccaagtgatttcattcacctcagcctcctaaagtgctgtattgtgtttttaatttcaaattccacttgttcattgctcatacataggaaagtgattgacttttgtatattaatcttgctctagttacttattagttccaggagtctgttgtttattcttttggattttctacatgaacaactatgtcttctgtgaacaaagacagtaatatatattccttccagatccatgtacctttcatttcatgttcttatcccagtattatctaggatttccaatatgatgttgaaaaggagtggtgagagggaacatccttatcttgctcttgatcttggtgagaaagcctcatgcttcttatcattaagtatgatgttagctgcaggttttttgtagacattctttatgaagttgaggaagatccactccattcctagtttactgacagcttttatcatgaatgtgtgttggagtttgtcaaaagctttttctgcatatattaatatgattatgtgatttttttcctttagcctgttgatgtagtgaattttacattaattgatttttgaatgttaaaccagctttgcatatctgggatgaattccacttgctcatggtgtataattctttttatacattgttagattcaatttgctaatatcttgttgaggattttgcatccgtgttcatgaaagatattggatctgtagtctttttatgtaatgtctttgtctggttttggtaataaggtaatgctggcctcatagaatgagtggggaagtattccctctgcttctgtcttctaaaagagattgtagagagttggtataatttcttccttaaatgtttggtagatattaccagtgaaactatctaggccttgtgctttctgttttggaaggttattatttattaattcaatttctttaataaatattggcctactcagattatttattgattcttgtgtgagttttggcagattatgtctttcaaaaaattggtccatttcatctaggttatcaaattaaatttgtggtcataaagttgttcatagttgtccattattatcccgttagtgtccgtgggatctgtaatgatgttccctctatcctttcttgctttgttgttgttgttgtttttgagatggagtcttggtctgtcgcccaggctggagtgcagtggtgctatcttggctcactgcaacctccacctcccaggttcaaacgactctcttgcctcaacctccccagtagctgggattacaggtgcccaccaccaagcccagctaatttttgtatttttagtagagctagggtttcactatattggtcaggctggtctcgaactcctaacctctagcgatccacctgccttggcctcccaaaggcgtaagccactgcacctggcctcatttctgatattaggaatttgtgtcatctttttgtttttcttggttatcctagctagaggcttagtggttttatttatcttttttttttttttttttgctgaggttttattttggaaaaaaagagcaattgaattgttttgtagctggagagtgcctcaggcagtgaactcctcctggggatgggctgagggcaagggctaagcctcaggtgggtctcctgttccctgtgctcccctgcacagctgcctccctctcggaccctggggcagccgcaggaagggtaggctgggaggggctgccatggctgttcacttgggcaggacatcagaggactcgaacaccagcctcccatcacaggtcttgattttcttcacaactacagccctggtggagctgctgcagctgaaggagctggagcctgtgccagagccaaagctggagcccagcttccctccggcaactacctgtaggtggcaatctccatgtccagggcctatttatcttttttttttttttaaatagcttttagtttcattgattttttttctattgattttctgttttcaatttcattgatttctgctttcatttttattatttcttattctttctttagaattaatttgttcctcttttttctagttttttaaggtgaaagcctagatgattgattttatatctttcttcctttctaatatatacatttaatggcataaatgttcatctaagcactgtttttactgtatcccacaaattttgaaaagtcatgcttttattttcatttagttaaaaataattttaaatttctctgagatttctcttgtgacccatgtgttattttgaagtgtgttgtttaatctccatgtattttggaattgtccggttgtgtttccgttattaaatttttagtttaattctattgtggtttgagagcagatgttgttttaaatttgctaaggtgtgttttatggcccagaatgtggtctatcttgctaaatgttccatgtgaactggagaagaaaatgttttctgcaaaagttggatgaagtagtccatagattttttttttgttccagattaaatgcttttttaaaaaatttattattattatactttaagttatagggtacatgtgcacattgtgcaggttagttacatatgtatacatgtgccatgctggtgcgctgcacccactaactcgtcatctagcattaggtatatctcccaatgctatccctcccccctcccaccaccccacaacagtccccagagtgtgatgttccccttcctgtgtccatgtgttctcattgttcaattcccacctatgagtgagaatatgcagtgtttggttttttgttcttgcgatagtttactgagaatgatgatttccaatttcatccatgtccctacaaaggacatgaactcatcattttttatggctgcatagtattccatggtgtatatgtgccacattttcttaatccagtctatcattgttggacatttgggttggttccaagtctttgctattgtgaataatgccgcaataaacatacgtgtgcatgtgtctttatagcagcatgatttatagtcctttgggtatacacccagtaatgggatggctgggtcaaatgatatttctagttctagatccctgaggaatcgccacactgacttccacaatggttgaactagtttacagtcccaccaacagtgtaaaagcattcctatttctccacatcctctccagcacctgttgtttcctgactttttaatgattgccattctaactggtgtgagatggtatctcattgtggttttgatttgcatttctctgatggccagtgatggtgagcattttttcatgtgttttttggctgcataaatgtcttcttttgagaagtgtctgttcatgtcctttgcccactttttgatggggttgtttgtttttttcttgtaaattactttgagttcattgtagattctggatattagccctttggcagatgagtaggttgcgaaaattttctctcattttgtaggttgcctgttcactctgatggtggtttcttttgctgtgcagaagctctttagtttaattagatcccatttgtcaattttggcttttgttgccattgctcttggtgttttagacatgaagtccttgcccatgcctatgtcctgaatggtaatgcctaggttttcttctagggtttttatggttttaggtctaatgtttaagtctttaatccatcttgaattgatttttgtataaggtgtaaggaagggatccagtttcagctttctacatatggctagccagttttcccagtaccatttattaaatagggaatcctttccccattgcttgtttttctcaggtttgtcaaagatcagatagttgtagatatgcagcattatttctgagggctctgttctgttccactgatctatatctctgttttggtaccagtaccgtgctgttttggttactgtagccttgtagtatagtttgaagtcaggtagagtgatgcctccagctttgttcttttggcttaggattgacttggtgatgcgggctcttttttggttccatatgaactttaaagtagttttttccaattctgtgaagaaagtcattggtagcttgatgggtatggcattgaatctgtaaattaccttgggcggtatggccattttcacaatattgattcttcctacccatgagcatggaatgttcttccatttgtttgtatcctcttttatttccttgagcagtggtttgtagttctccttgaagaggtccttcacatcccttgtaagttggattcctaggtattttattctctttgaagcaattgtgaatgggagttcactcatgatttggctgtgctgtttgtgctgttattggtgtataagaatgcttgtgatttttgtacattgattttgtatcctgagactttgctgaagtnnnnnnnnnnnnnnnnnnnnnnnnnnnnnnnnnnnnnnnnnnnnnnnnnnnnnnnnnnnnnnnnnnnnnnnnnnnnnnnnnnnnnnnnnnnnnnnnnnnnnnnnnnnnnnnnnnnnnnnnnnnnnnnnnnnnnnnnnnnnnnnnnnnnnnnnnnnnnnnnnnnnnnnnnnnnnnnnnnnnnnnnnnnnnnnnnnnnnnnnnnnnnnnnnnnnnnnnnnnnnnnnnnnnnnnnnnnnnnnnnnnnnnnnnnnnnnnnnnnnnnnnnnnnnnnnnnnnnnnnnnnnnnnnnnnnnnnnnnnnnnnnnnnnnnnnnnnnnnnnnnnnnnnnnnnnnnnnnnnnnnnnnnnnnnnnnnnnnnnnnnnnnnnnnnnnnnnnnnnnnnnnnnnnnnnnnnnnnnnnnnnnnnnnnnnnnnnnnnnnnnnnnnnnnnnnnnnnnnnnnnnnnnnnnnnnnnnnnnnnnnnnnnnnnnnnnnnnnnnnnnnnnnnnnnnnnnnnnnnnnnnnnnnnnnnnnnnnnnnnnnnnnnnnnnnnnnnnnnnnnnnnnnnnnnnnnnnnnnnnnnnnnnnnnnnnnnnnnnnnnnnnnnnnnnnnnnnnnnnnnnnnnnnnnnnnnnnnnnnnnnnnnnnnnnnnnnnnnnnnnnnnnnnnnnnnnnnnnnnnnnnnnnnnnnnnnnnnnnnnnnnnnnnnnnnnnnnnnnnnnnnnnnnnnnnnnnnnnnnnnnnnnnnnnnnnnnnnnnnnnnnnnnnnnnnnnnnnnnnnnnnnnnnnnnnnnnnnnnnnnnnnnnnnnnnnnnnnnnnnnnnnnnnnnnnnnnnnnnnnnnnnnnnnnnnnnnnnnnnnnnnnnnnnnnnnnnnnnnnnnnnnnnnnnnnnnnnnnnnnnnnnnnnnnnnnnnnnnnnnnnnnnnnnnnnnnnnnnnnnnnnnnnnnnnnnnnnnnnnnnnnnnnnnnnnnnnnnnnnnnnnnnnnnnnnnnnnnnnnnnnnnnnnnnnnnnnnnnnnnnnnnnnnnnnnnnnnnnnnnnnnnnnnnnnnnnnnnnnnnnnnnnnnnnnnnnnnnnnnnnnnnnnnnnnnnnnnnnnnnnnnnnnnnnnnnnnnnnnnnnnnnnnnnnnnnnnnnnnnnnnnnnnnnnnnnnnnnnnnnnnnnnnnnnnnnnnnnnnnnnnnnnnnnnnnnnnnnnnnnnnnnnnnnnnnnnnnnnnnnnnnnnnnnnnnnnnnnnnnnnnnnnnnnnnnnnnnnnnnnnnnnnnnnnnnnnnnnnnnnnnnnnnnnnnnnnnnnnnnnnnnnnnnnnnnnnnnnnnnnnnnnnnnnnnnnnnnnnnnnnnnnnnnnnnnnnnnnnnnnnnnnnnnnnnnnnnnnnnnnnnnnnnnnnnnnnnnnnnnnnnnnnnnnnnnnnnnnnnnnnnnnnnnnnnnnnnnnnnnnnnnnnnnnnnnnnnnnnnnnnnnnnnnnnnnnnnnnnnnnnnnnnnnnnnnnnnnnnnnnnnnnnnnnnnnnnnnnnnnnnnnnnnnnnnnnnnnnnnnnnnnnnnnnnnnnnnnnnnnnnnnnnnnnnnnnnnnnnnnnnnnnnnnnnnnnnnnnnnnnnnnnnnnnnnnnnnnnnnnnnnnnnnnnnnnnnnnnnnnnnnnnnnnnnnnnnnnnnnnnnnnnnnnnnnnnnnnnnnnnnnnnnnnnnnnnnnnnnnnnnnnnnnnnnnnnnnnnnnnnnnnnnnnnnnnnnnnnnnnnnnnnnnnnnnnnnnnnnnnnnnnnnnnnnnnnnnnnnnnnnnnnnnnnnnnnnnnnnnnnnnnnnnnnnnnnnnnnnnnnnnnnnnnnnnnnnnnnnnnnnnnnnnnnnnnnnnnnnnnnnnnnnnnnnnnnnnnnnnnnnnnnnnnnnnnnnnnnnnnnnnnnnnnnnnnnnnnnnnnnnnnnnnnnnnnnnnnnnnnnnnnnnnnnnnnnnnnnnnnnnnnnnnnnnnnnnnnnnnnnnnnnnnnnnnnnnnnnnnnnnnnnnnnnnnnnnnnnnnnnnnnnnnnnnnnnnnnnnnnnnnnnnnnnnnnnnnnnnnnnnnnnnnnnnnnnnnnnnnnnnnnnnnnnnnnnnnnnnnnnnnnnnnnnnnnnnnnnnnnnnnnnnnnnnnnnnnnnnnnnnnnnnnnnnnnnnnnnnnnnnnnnnnnnnnnnnnnnnnnnnnnnnnnnnnnnnnnnnnnnnnnnnnnnnnnnnnnnnnnnnnnnnnnnnnnnnnnnnnnnnnnnnnnnnnnnnnnnnnnnnnnnnnnnnnnnnnnnnnnnnnnnnnnnnnnnnnnnnnnnnnntctcttctggcttgtagggtttctgccgatataccactgttagtctgatgggcttccctttgtgggtaacccaacctttctctctggctgcccttaacattttttccttcatttcaactttggtgaatctgacaattatgtgtcttggagttgctcttctcgaggagtatctttgtggcgttctctgtatttcctgaatctgaatgttagcctgccttgctagattggggaagttctcctggatgatatcctgcagagtgttttccaacttggttccattctccccgtcactttcaggtacaccaatcagacgtagatttggtcttttcacatagttccatatttcttggaggctttgctcgtttctttttattcttttttctctaaacttcccttctcacttcatttcattcacttcatcttccatcgctgataccctttcttccagttgatcgcatcggctcctgaggcttctgccttcttcacgtagttctcaagccttggttttcagctccatcagctcctttaagcacttctctgtattggttattctagttatgcattcttctaaacttttttcaaagttttcaacttctttgcctttggtttgaatttcctcccgtagctcgtagtaatttgatcgtctgaagccttcttctctcagctcgtcgaagtcattctctgtccagctttgttccgttgctggtgaagaactgcattcctttggaggaggagaggtgctctgctgtttagagttcccagtttttctgctctgtttttccccatctttgtggttttatgtacttttggtctttgatgatggtgatgtacagatgggtttttggtgtggatgtcctttctgtttgttagttttccttctaacagacaggaccctcagctgcaggtctgttggagtacccggccatgtgaggtgtcagtctgcccctgctggggggtgcctcccagttaggctgctcgggggtcaggggtcagggacccacttgaggaggcagtctgtccgttctcagatctccagctgcgtgctgggagaaccactgctctcttcaaagctgtcagacagggacatttaagtctgcagaggttactgctgtctttttgtttgtctgtgccctgcccccagaggtggagcctacagaggcaggcaggcctctttgagctgtggtgggctccacccagttcgagcttcctggctgctttgtttacctaatcaagcctggacaatggtgggcgcccctcccccagccttgctgccgccttgcagtttgatctcagactgctgtgctagcaatcagtgagactccgtgggcataggaccctccgagccaggtgcagggtataatctcctggtgcgccattttttaagcccgtcggaaaagcacagtattcgggtgggagtgacccgattttccaggtgccatctgtcacccctttctttgactaggaaaggaaactccctgaccccttgcgcttcccgagtgaggcaatgcctcgcccagcttcggctcgtgcacggtgcgcgcacccattgacctgcgcccactgtctggcactccctagtgagatgaacctggtacctcagatggaaatgcagaaatcacccgtcttctgcgtggctcacgctgggagctgtagaccagagctgttcctattcggccatcttggctcctccccccatagatgttaattatatccagttaattgatggtgttgttgagttcaactttgtccttactggttttatgcctgctggatctgtccatttctgacagaggagtattcaggtctccaactacaatcatggattcatctatttctctttgcagttctgatgtttttgcctctcattttaatgtatgtggttaggcacatacatattaaggattgtatatcttcttagagaacagacctctttattgctatgtaatgcccctctttgtccctgataactatttttgctttgaagtctgctcttaatgaaattaatagaggtactcttgttttcttttgattagtgttagtatggtatatctttatccatttgtttttaatctatactgtctatttttaaagctggttaattgtagacaacatatacttgggtctggtttcttcatccactccaacagtctctgtctttgattggtgcattagaccactgacatgcaaagtgattattgatatagtgggattaatacctactctatttgttagatttttatttgttgcccttgttctttgaccctgtttttgtcttccactctttttctgtcttttgtatttttaattaaatactttacatggttccattttctctgttatacttttttccatatctattgtatctgtttatttaaacattttttagtgtttgccctaaaatatgcagtatacatttgcaagaatccaatccttcaaataacactatactgcttcatgggtagtgtttttagtaacaaagtaacccaattctttcctcctatcccttgtgtcaatgctgttattcattttacttatatgtaagcatacataagcatatagatacacataagatatatacataagcatatataacctaatacgttattgctattactattttgaaaactgttacatcttagatcagttaagaataagaaaaatagaagtttttaatttttccttcactttcttctccttctgtattcatattatgcatatgtttatattttgtagttgtttcacagttcttgaatatgctgtcctgctttttctagtctttattctctttgcttttcagttttggaggtttctactgatagatccccagtctcagaaattctttcctcagccacgttcactctactaataagccatcaaagccattcttcatgtctattacatggttcaaaaaaattgtttatatagatgtatggggtacaggtgcaattttgttacacgcatactggtcaagtcagggcttttatggtatttatcaccagaataacatacattgtacctattaagtaatttctcctcacctgccctctcacctcttcccctttctgagtcttcattgtctataattccactctttagctccatgtgtccaccttttttctcagcatccacttacagtgtttacagtgttctcatgtttctttgtttcttttctttttaaatttcgagacaggctacaacagaatccaaatccataggtaaagcaaactactcatgtaatttcaaagctgaagttgatagtatatttgtacccaatatgaatggttcacctgcatgagttttgagttctcaaaggccagtagcctcctttcccttttatgcatcttgagtacacttgagttagcctatgatacatgaatacctacaaagttgaggcctataaaacttacatggcaagcaatttgaaatgtgccaacaatgtgatactggagcaaccatagtgctgagaacagctttgactactgcaggaaatccacaaacctcaaatttagatgaaaacatttttgaacttaattcatactgagggacaaattatggtaatagtggagggaaagtctttttatgtgagatacaggaggctcctttagctctttcacctcctagagtcaccatagtggtaccttcatttattccttctcaaatattcctcccatcttcatttagatctgagtttcaggcctatattattttccctctttctgaagaactcttgacatttctttcaaggcatgtttactgacaacaaagtccctcaattttcatttgagaaaatctttgtttcccttttgaatgaaaattttgctggatacagaattctaaattggtgatttatttctttcaacactttattttactctaccttattcttgtttgagtcgtttttgaagagaattccaacgtaatacttatccttgttcctccagtaggtaaggggtttttgttttgtttttgtttttttgccttcctatagcttctttaaggattttcttttgtctttgattttctgcagtttatgtatgatattcctgggtgtagatatttcttggtatttttcctgcttggcattgtgtgagcttcctgaatctttggtttggtgtctgctattaattttggaaaattctcagccaatgtttctttattttttctgttcctttttttctcctccttttgttagtcccattatacctttattatccttctgtaagtgttccacagttcttggatatttgcaccatttcttttcagtctttcttctctttgctttgcaatttggcagtttctattaacatatttgcaaactcaacaattcttatctcagccatatccagtctactgctgagtccatcaaaggcactcttcatttctgtgagacagacataatctataggtgaaaggaactgatgtaaatacacctttagtgtgagattttatgcttatctggctaagagctctgcatgtattcctgtctgtctcccaaagtgtagaaagattttttttgttgttcagtttctcttaggacaacaggtcgttgtccacagtatgtgactcagcacccttggatgatgaagttggctaagatgttggcaggcagagaatcacccatggtgttgccagtggtagttaccgagaagccagctggggtgctactgaattctctggggagctgacctctgagagttgcccttcagggtgctggaaagactagctgggaagtgtacctgtgaggacaatcctgaaactcacttggaagctgccctatggtatgctggccaaactcactagaaagccacccttaggagtgccagcaaagctcactggggaggcatcttctacctatctcacatgccactggcagctatgtgcagcaagaacaaaccaaaaaagcactcaaatcaggaagtggagctccttcttccctcagcatctttctaatgccctctactggcaaagcttaccattgtccaactaacaaagggaaatgttcacaggatccagctctgccatcccaacccaggacaaagaagcgtgaatttataactcaaatgtaataaattaataactggcagaactgcccattacacataggatatattccaattctttgccagcacctataatgatttactctctacctatttcttcaacattattggaggtccaccctgcctactttccaccattttagccattctctgttatttgcacactccaagctcatcttacctcagaacctttgcccttgctatactccatgcttggaacaagtttcccctatatctttatataactagctctctattaatatttgggtctttgttaaatgtgacctcatttgaataatctaaaatgagcccacatgcctataataccttctgttgttttgctgtttagttttcttcacggtacttatcactaaattatccttttttttttttttactatgttcttatccacatagtaataagccaagtaagagccagaccataatctatattacatatcagcaataagaagagtacccggcaagtagtaagtgctcataaaaaatactatatagttgttgaatgaatgagtgatctctgttttatagctgaggactgaagctcagagagagaaagtaactttcccaaagaacacagctagcaagtgccagagtcaggagtcacctcaggtcctcctgatcacagtgctctgattgtcatggctctgtaccaccacctccctgagtgctggaaagagtgtagctgaggtacatgttacagtggagtctctaaaataattgagcttttgttatctcattacccatttttttctttctatggatctggctctctactgtgtgtgcatagatacagatccatgtactcgtgccccctactcagaataataatgtgttaaatatctttcaaagaaagaattattagacaaagtcatggaactcttcaccaaaaagatgaccttcaagaggggccatgcgcgatggctcacgcttggaatcctggcagtttgggaggccgttcgagaccagcctggccaacatggtgaaaccccgtctctactaaaaatacaaaaattagccgggcttggtggtgtgcacctgtagtcccaactacaggagaatcgctttcacccgggagactgaggttgcagtgagccaagactgtgccactgcactctggtctgggtgacagagtgacactctgtctcaaaacaaaaacaaaaacagaaacaaaaacaaaacctttgaaatactttgtaaaattagaaattgggtattgagaaaaataaaaatacatcaaatggaagacaggaacctagatcccatttttttcttttctttcttttctttttttttttttttgatggagtctaactctgttgcccaggccagagtgcaatggtggaatcttggctcactgcaacctccgtctcctgggttcaagcaattctcctgtctcagcctcccgagtaagtgggattacaggcgcccgccaccatgcctgccaaattttgtatttttagtaaagatggggttttaccatgttggccaggccagtctccaactcctggcctcaagatatccgcctgcctcggcctcccaaagtgctgggattacaggcgtgagccaccatgcctggccccagatccagttgtctaataccattcttcagtaaaataaaccagggctcttaggagaagtggtcaattctagcactggggcaggaaatacaaacataggcctaaggtaccagggcataaggaagtgttcagaaaacaaaaaaatcacacaacgatggggatatgttaaaaggaactgtagccagagaagggttcctaatggctgaagacagaaaaacttgagcaacaaagtcaacaaaatagtattggattataaagtataaataaatatccacgagtctgtccatactgatacaaataaatgattgaataaataaacaagtagtggagaataggtggatctcccatacagaagaatcccaaaaaatttatgtagatactctgtcctcaaggaggtagagcataattccacattcaagtgtgggttgcgcatactgacttccttcaaaataatacagttatggagagaggaaaaactaacttcatagtggaaaaatctgacaaaccccacctcagccaggggatcaaggtcagcatcaatggtatatatttttgatatgatgtgataagaaaggcatattatttccatagtcttcctcagcaaaccccaaacatcagcctaatcgtgaaaaaatcatcaggcatctcccagttgaagggccttctataaaatacctggccaatactccccaaatctgttaaggtcttagaaactgttttttaaaattattattatacattaagttctagggtacacgtgcacaatgtgcaggtttgttacgtaggtatacatgtgccatgttgttttgctgcacccatcaactcgtcatttacattaggcattactaattagggttactaatgctatccctctcccatccccccacccgccaacaggccccaatgtgtgatgttccctgccctgtgtccatgtgttcttgttcaactcccacctatgagtgagaacatgcggtgtttggttttctgtccttgtggtggtttgcttaaaatgatggtttccagcttcatccatgtccctgcaaacgacacgaactcatcctttttatggctgcatagtattctatgatgtgtatatgtgctacattttcttaatccgttctatcattgatagacatttgggttggttccaagtctttgctattgtgaatagtgctgcaataaacatacatgtgcatgtgtctttgtagtagcaagatttataatcctttgggtatatacccagtaatgggaccactgggtcaaatggtatttctagttctagatccttgaggaatcgccacactgtcttccacaatggttgaactaatttacactcccaccaacagtgtaaaagcattcctatttctccacatccttccagcatctgttgcttcctgactttttaatgatcaccattctaactggcatgagatgttatctcattgtggttttgatttgcatttctctgatgaccagtgatgatgagcattttttcatatgtctgttggctgcataaatgtcttcttttgagaaatgtctgtttatatcctttgcccactttttgatggggttgtttgtttttttcttataaatttaagttctttgtagattccagatattagccttttgtcagatgggtagattgcaaagattttctcccattctatatgttgcctgttcactctgatgatagtttcttttgctgtacagaagctctttagtttaattagataccatttgtcaattttggcttttgttgctattgcttttggtgttttagtcatgaaatctttgcccatgcctatgtcctgaatggtagtacctaggttttcttctagggtttttatggtgttaggtcttacatttaagtctttaatccatcttgagttaatttttgtatatggtgtaaggaaggaatccagtttcagctttctacatatggctagccagttttcccagcaccatttattaaatagggaatcctttccctatttggttgtttgtgtcaggtttccccattgcttgtttgtgtcaggtttgtcaaagatcagatggttgtagatgtgtggtattatttctgaggcctctgttctgttccattgatctatatctctgttttggtaccagtaccatgctgttttggttagtgtagccttgtagtatagtttgaagtcagatagcatgatgcctccagctttgttctttttgcttaggattgtcttggctatgtgggctcttttttggttccatacgaactttacagtagttttttccaattctgtgaagaaagtcagtggtagcttgatggggatggcactgaatccataaattaccttgggcagtatagccattttcatgatattgattcttcctttccatgaacatggaatgttcttccatttgtttgtgtcctcttttatttcattgagcagtgatttgtagttctccttgaagaggtccttcacatcccttgtaagttggattcctaggtattttatcctctttgtattaattgtgaatgggagttcattcatgatttggctctctgtgtgtctattattggtgtgtaggagttcttgtgattttttgcacattgattttatatcctgagactttgttgaagttgcttatcagcttaaggagattttgggctgagatgatggggttttctaaatatacaatcatgtcatctgcaaacagagacaatttgacttcctcttttcctaattcaataccttttatttctttctctcgcttgattgccctagccagaacttccaatactatgttgaataggagtggtgagagagggcatccttgtcttgtgctggttttcaaagggaatgcttccagtttttgcccattcagtatgatactggctgtgggtttgtcataaatggctcttattatttttagatacgttccatcaatacctagtttattgcgagtttttagcatgaagggcggttgaattttatcaaaggccttttctgcatctattgagataatcatgtggattttgtctttggtcctgttgatgtgatggattacgtttattgatttgcatatgttgaaccagccttgcatcccagggatgaagccaacttgattgtggtggataagctttttgatgtgctgctggattcagtttgccagtattttattgaggatttttgcattgatgttcatgagggatattggcctaaaattctctttttttattgtgtctctaccaggctttgctatcaggataatgctagcctcataaaatgagttagggaggatatcctctttttctattgattgaaatnnnnnnnnnnnnnnnnnnnnnnnnnnnnnnnnnnnnnnnnnnnnnnnnnnnnnnnnnnnnnnnnnnnnnnnnnnnnnnnnnnnnnnnnnnnnnnnnnnnnnnnnnnnnnnnnnnnnnnnnnnnnnnnnnnnnnnnnnnnnnnnnnnnnnnnnnnnnnnnnnnnnnnnnnnnnnnnnnnnnnnnnnnnnnnnnnnnnnnnnnnnnnnnnnnnnnnnnnnnnnnnnnnnnnnnnnnnnnnnnnnnnnnnnnnnnnnnnnnnnnnnnnnnnnnnnnnnnnnnnnnnnnnnnnnnnnnnnnnnnnnnnnnnnnnnnnnnnnnnnnnnnnnnnnnnnnnnnnnnnnnnnnnnnnnnnnnnnnnnnnnnnnnnnnnnnnnnnnnnnnnnnnnnnnnnnnnnnnnnnnnnnnnnnnnnnnnnnnnnnnnnnnnnnnnnnnnnnnnnnnnnnnnnnnnnnnnnnnnnnnnnnnnnnnnnnctttaaagtgtcccatagattctggtacattgtgtctatgttctcactggtttcaaagaacatcttcatttctgcctttattttgtaatttaccctgtagtcattcaggagcaagttgttcagtttccatgtagttgtgtggttttgagtgagtttcttaatcctgagttctaattttattgcactgtggtctgagagacagtttgttgtgatttctgttcttttacatttgctgaggagtgttttactaccaattatgtgatcaattttagaataagtgtgatgtggtgctgggaggaatgtatattctgttgatttggggtggagaattctgtagatgtctattaggtccacttggtccagagctgagttcaagttctggttatccttggtaaccttctttctcgttgatctgtctaatattgacagtgaggtgttaaagtctcccattattattgtgtgggagtctaagtctctttgtaggtctctaaggacttgctttatgaatctgggtgctcctgtgttgggtacatacatatttaggatagttaggtcttcttgttgaattgatccctttaccattacgtagtggccttctttgcctcttttgttctttgttggtttaaagtctgttttatcggagactaggattgcaatccctgcttttttttgctttccatttgcttggtagatcttcctccatccctttattttgagcctatgtgtgtctttgcacatgagataggtctcctgaatacagcacactgatgggtcttgactctttatccaatttgccagcctgtgtcttttaattggggcatttagcccatttacatttaaggttaatattgttatatttgaatttgatcctatcattatgatgttagctggttattttgcccattaattgatgcagtttcttcatagtgtccttggtctttaccatttggcatgttttcatagtggctggtaccggttgttccattccatgtttagtgcttccttcaagagctcttgtaaggcaggcctagagtgacaaaatctctcagcatttgcttgtctgtaaaggattttatttctccttcacttaggaagcttagtttggctgcatatgagattctgggttgaaaatgcttttctttaagaaggttgaatattggcccccactctcttttggcttgtagggtttctgccgagagatccgctgttagtctgatgggcttctctttgtgggtagcctgacctttctgtctggctgcccttaacattttttccttcatttcgaccttggtgaatctgacaattaatgtgtcttggggttgctcttgttgaggagtatctttatggtgtcctctgtatttcctgaatttgaatattggcctgccttgctaggttggggaagttctcctagataatatcctgaagagtgttttccaacttggttccattctccccgtcacttttggtacaccaatcagatgtagatttggtcttttcacatagtcccatatttcttggaggctttgttcatttctttttactcttttttctctaatcttgtcttctttctttatttcattaatttgatcttcaatcactgacatcctttcttccacttgattgaattggctattgaaccttgtgcatgcatcacgaagttcttgtgccatggttttcagctccatcaggtcatttaaggtcttctctacattgtttattctagttagccattcattcttctcaccttttttcaaggtttttagcttccttgggatgagttagaacatgctgctttagctcggggaagtttgttattaccgaccttctgaagcctacttctgtcaactggtcaaactcattctcgtccagttcgtttccttgctggcaaggagttatgttcctttggaggagaagaggcgctctattttttggaattttcagcttttctgctctcatttctccccatctttgtggttttatctacctttggtctttgatgttattgacctactgatgggattttggtgtagctgtcctttttgttgatgttgatgctattcctttctgtttgttagttttgcttctaacagtcagacccctcagctgcaggtctgttggagtttgctggaggtccactccagaccctgtttgcctgggtatcaccagtggaggctgcagaacagcaaatattgttgcttaatacttcctctggaagctttgtcccagaggggcacctgcctgtttgaggtgtctgttggcccctactggaaggtgtttcccagtaaggctacacgggggtcagggacccacttgaggaggcagtctgtccattctcagagcttgaacacaatgctgacagaaccactgctcgcttcagagctgtcagatagggacgtttaagtctgcagaagccgtctgctaccttttgttctactataccctgcccccagaggtggaatctatagaggcagtgagccttgccgtgctgcggtgggctccacccagttcgtgcttcttggcctctttgtttacactgtgagctactcaaggctcagcaatggcagatgctcctcccccagtcaagctgcagtgtcacaggtcagactgctgcactagcagtgagcaaggctccatgggtgtgggacctgctgagccaggcacaggagggaatctcctggtctactggttgctaagactgtgggaaaagcacagtatttggtcaggagtgtactttttctccaggtacagtctgtcatggtttcccttggctaggaaagggaaatcccctgaccccttgcgcttcccgggtgaggtgatgccctgccctgcttcagctcaccctctgtgggctgcacccactgtccaaccagtcccaatgagatgaaccaggtacctcagttggaaatgcagaaatcacctgtcttctgcattgatctcgctggagctgcggactggagctgttcctatttggccatcttggaagcaactgcccatcttagaaactcttacagccaagaggagactaaggagacatgctgactcaatgtaatgtggtgtcctggatggatctgaggaagggaaagaggatatttggttaggaaactctgaacaactaaagaaatctgagtaaagtatggatgttagttaatattcatgtattagaattggtttacagtggttacaaattatagaggacactgggtatgtggtatagttatacgagaacaatctgtactctcttagcaactcttctgtgattctaaaaccattctaaaataaaaagcttccttaaaaaaaattgatggcagagcaggagtaagtatttttgttttgtaaccttggaaaaaagagagttgaggcaaaatccacagaggactagaacctgtattcctatctggtgtgggaggagagagatgacatttggttgggagaaggctggagccaagttatggtgttcagtttgtttctgctctgctgtcatagggctcttccttggaggagctatagctctatggaaccgtatgaatgggagagtaaggttcaacagttcgttggtgtgacctgggtgtatgtgcacatgcggatgcattgtgtacatgcaaactcaaatccccatagcatccagctaggaagtctaaatgagcaaagcaagttgggtataagaaataagaaagtgctgggagctatgcttaataggagacacaagcctcaaatagcagaacagctgctgctctgttcagtgccgggtgatttttgctgtgcgggaaggtgaactgagatgcattttctggtatttcaaaagaagctgaaaatctagatttactttttgaatgtggaaaattctgctttttaaatgttggcaactatttcagaaagtttttattaatcatcatgtatgcccaatctgtgttgaaggaaatgtgtctgtggactgcacacagtccataccaccaggttgcaattatttctgtcaacctgagctatgctgagtccggtgggctaatacagatgaggcagggctgtgtctgtgtggtgtagagcatggagtcagtctgtgtcctgagctgtgatgagatcattctgtgagagtaaataactgagcttgtacttgaaagttgaggacaatgtggagaacaaagagctaagagcacaagcaaaggtccagaactagaacatcacagggtgtgttttggagactggatgatttgagtaaagaatcatgaagagcagaagtagttatcaggctagaaagttaggctggagccagataaggatgggcctgagtatttggaatatatactgttggcaacagatgactaaatactcgggttctcttgaaggagtacagggcagaaatcaggagatagaatgagaaatttgacatttacaccagaactttccagccacaaagagcaaggtagagtcaattaatgcactgagtctagttagaatgattgggttaaggtgagagtggccattcctaacacttagcaaaacagtgtgtatgcatatgcctgtgtgcagttatttgattatacatacactttccagctgggctaggctggcctatctgggcccagtcaactgctgtggacactgagctttaacaccaataagtgcgtgccgtattcatcctcattctcatttctttctcagtgcctcttgaccctccaaggattattgcactgatccagaactgctaaaatggagaaagccaggcctgacctgtgcgcacagcacacagcattgatatttgatgtgagattaggtcagagtcagccgggaagccttctaaagcgtggcatacagccaacaaaatgaaaaggctttattctggggggaaatgtttccctctctgcctggcttgctttccttatcctcccttagacatcctttcccctaaattctagttcattattttcatttgaaactctcaaattccactgggccactagctgaccacattcctccctaaacaatagcattctattttaaacacttattgtgccaatgttgacattttaatagcccaagaggggctgaaataactactcctacctcaccaccatcaccaaggagatcaagtatcatttctaggatttatggtaagcccctcacggtgaaagcacaaaaatcagaggccaggaaattggcagctacgtattttaaataggatttcggtaatctttggctggtctttcctaacaatgttgaagttgatattttgtaacttaacattggttctagttctgcctggtgagtagctctaatctcattttcattatgtgagaaaacacttattaattagtagaaactattggcaaacttgatatagttgtgaatgaataatgtaaatccctagtggggcccttcccaaacccttgctccccttcctaaataagcaaacagagggaaatttctgattttagtgggatgatgtaccactgattacccaacattgcttatgactttaccattaagatttataatgaaaactcttttatctatatgtaacaggaattaaactttatgcaacaagttaaataacaaactttctcgatatccaaatgagtgctttctttatccaagttcatcagtgtaggggaaagtcctaaccttatttcaaaaatgtgcaaaatattttgtaataactaggtaattctaaaaacatataaggaattatctgaagttaagtgtggtgagtgaagtggatgattgatagtcatttgggagcagtaaagtgggtaagagtaaaaattaatgagacagtcttcttcacgtggttcaaaaaacagcttctgaaggcagtttccctggaagagctccagaagtgttcttgtatgtggcagtaaagaaagacaatactcctgatgactggtaaccaagtaatgctggcttaaacagttacttatgtgataatcaaacttcccttgctgatataaaagtttttatgtattcttggtttgatcactcctaatttgtctgcatgcaaggagaaccagacttaaggtaggatccactcatttactgactgattgcttattgaatgccttctctgtgctggacagtaggagtaagatgaggagcactgtggactttgtccctgccctcatacatttatgataaggggttgtggggtcagggcatggaaaaaacaaaaggcaaatctttaagacaaactgattggaaacgactgctattggttaaatacacccacatgttgagataatttgtactttcccaaaacattatcttgataacattatagtcccagaaagcgttagggaatgtagtaatgaaactttggcaggtcttgtgcctctacaatgtttgtgttgctcatgacctttgtacatgaatgcttttgcccatgtggccagtcaaaaaatgacctggttgacctgtttttccaaaagacctttgaccaaatctttgatggacaaacagagaatcatgttttcaagaaggatctacttgcaagcaaagttctatagtgtagtcagggaaggctctatgaagtaatgaactcttctggcaaagatctgaaggatgagtagaaaatagtctggtcatgagctaggggaagtgatttacaggcaggagtaacatgtggaatacagaataatttgactttaataaatttcaaatggtaaaaattttccaaagttcaaaatagaaacataacatcccgtgatattagaaaatctcattactttactttagtctggccagaaatgtgtcaagaggaagacttcaaagaggtagatttcatctctctggcctgtaaacaaaatgcccaaaacacttccccaaggcttaaagtcagtttgtaattactcttttcatcacctcagaagaatttccaaactttagtaacgtagtaaaattttttttggcctttgtgaataaatactatgaaatttggttcaaaagataaagcaaagagcaactgaggtcttcaaaacatcatgtatctagaaggtattaccaaacatccgttttttttaaaaaagcataaggcataaaatcaattcactaatgtcatgctagagtgaggtagtaaaatgaggcaactcagaccagatggtgtaattcataaacagggctgtcatttgggaaaacgggtggagtggatggagaaattaacttgcagtctttccccttccatttcttcccaatccaactaaccttattcctctgggtcatttagctgtggctaaaacacacacacacacacacacacacacacacacacgtgtgtatatatataatatatatataatatactttttacttatagccataggtaaatggtgaatgaagtagatgattgacctgtgtgcatagcacacagcattgctatttgatgtttgatgaaatatcaatgctctcagaataaataattaaatgagtgtatatatatagacacacacacacacacacacacacacacacacatatatttcttttttaaaagagtgtaattgatgccaaagccactttctcttcagagctgcttaactacatgaagagtgtgcaccaacctggggttgcaaagagttctctaccttgtccggcttctggaaaggatgtgcgctttgctcaatggggaatggataagatgaggatgtcccactgctggttggttagtacatttttgtagatgaagcaaagcacatctgttcttatacagaatctcatctttaaaagggacctcagatagcatctaattcaaaaactcatctaatgcagtgcagtattcctctaagatacatacataaatgctggctaaatgcccccagggatggaagtttactgcctcacaaggcagccaattatctttctgacaggtgccattcttcctaatactgaggtaaagtccattgttctttagcttccacaaaaagcagtgataatactcttgacggcttgccctgtgccagggtctgtgccaaggagcttcatatgcattgtttgtaacacttgcaacattagtggcaggcagggatcatcctgcacattttacaggtgagggaactggcacaaggtcacacagctaagagagaaggatctagtctggctaaatccaatgcctaggccaatttcttgacaccatgcataattcctgtttcaaatttctatatgtgaaggcaccttttagactcttctgttttctcattgatttctcatatggcatgccttccaatgctttcagaatatgctatgacagtatctctataaaaatataaatcaatacaaaagttattgacccctagaaaatgacaatcacatacttcaattaaaatgagtagtacaaagagacttccttgaatcttttaataatggcatttatttttacataataacagcagcatattggttaagacatggatttaggtagatttgacacctggtttcaacattcattagctgtcagattcggggcattttatctaacttctcaaattatcagtttctcacttacaatgtggggatgatgatgatgcctatgttttagaattgtgagacttgacatagtacatataaagcacttagtatgatgctggcactatcttcaataaatggtattattatttctttatttgcagcaaaccaaaacccgtatgattgttgtcaagtaagacttcccctacatcatgtttgtaaattagaatgttagctataattataagaaattgaaaaattcatgttgtctaatcaatattacattttagccagtagtttcagccaggatcttggttctctcattaaatatactggtaatctttttcaattttgtgtcacctgcaattgttaaacatattttcagtatctttatccaagttgttgctaaaagtgattgaacagggaaatcaatgtttgttcccatctgtgggtgctgttaacagcttcgtatgtgtgttttacagtcacatatgtaattttccctgtgcttttctgtctatatcatacacttgttgtatcccctagtgatctctgaagttttaagctgtctttgacctatgattctgtacatctcctgatattgacatagctgaatctattaactaacttctaaaatggaaaccaggacacctggggctcagcactagcctttccccagtgtacttaagccctctgtggctccatttttcatacttttaaaactgagcaaatatttgccctctccttcctttcaatgatatggtgaaaatgaatttaaagcaattataaaaaggacatgtgttcttataattggtagcatatcatttacagagaaattcctcatctggtcactatctaagtagctaaacaactaaacattagcaagagaagtctttgagcagtcaatgtaaatgacaccaagtctatgcatttatcatgtgctttactcatagactcatacttattcacagtcccattacatacacacatctaacaagcttgtttatttcatttcccagtccacagccaaatagaggaagaaagtggatggagactgcccaaagtgggtaaattgaaagtagcaagaaaaggccaggtgcggtggctcatgcctgtaatcccagcactttgggaggccgaggcgggcagatcacgaggtcaggagtttgagaccagcctgaccaacatagtgaaaccctgtctctattaaaaatacaaaaaattagacaggcgtagtggcgtgcacctgtaatcccagctacttgggaggctgaggcaggagaattgcttgaacctgggaggtggaggttgaactgagccgagatcgcaccattgtactccagtctgggcgacagtgcgagactccatctcaaaaaaaaaaaaaaaaaaaaaaagtagcaagaaaataatcattttgaaaggtgaaaaaaaaaaagacaagagaattataaaaattagaaactcaaaaagtaaagaagcctgagaccactaattaaaggggaaagatagccttaaacatcagttttcaagaacattactgaattacaagttaatactataattgatgttcaaaatgattattcattattgtgttggacttccgtgttttcacatgctcagcattcattctgctctcctctggaggcagcactatgatttttcttcagaaaattacccttcccaatttgtattctgttccaaaggaaccatcatgtaaggagctttcccatctcctgaacaaggctgagcttatggtccaagacaagtcagtcacctttttgcaggaatttggatgttgagcagagccaacacaaagctactgggctggctcatccttatggtggtatcctgaattcttcccttccacgtagaaccctggagctgcatggtccctgaccttttcaagactggttgtccaattttcttttaatttggaagactactttaaaacattctaataaaatatgttagtcaaaggtggtctttggctgctcacagcttgtgtttcataactgacacagattcattaaagggatcaattttgttctatatgcagtgttcaaaaagccacagatatttgtaataaaaattaaaaataggccaggcatggtggctaacacctgtaatcccagcactttgggaggcagaggcaggaggatcacttgagcccaccattacgaaaccagcttagacaacatagtgaaaccccatctgtacaaaaatacaaacatttagctgggcatggtggtgtgtgcctgtaatccctgctgctcgggaggcttgaggtgggaggattgcctgagcccaggaggttgagtctgcagtgagccatgatcacgccactgcactccagcctgggtgacagaacgagaccctgtgttaaaacaaacaaaacaaaaaaccccccaaattaaaaatatttccatccaacttggttaaaatagaattgaaaacctttagcattaaagggatgtttccattataaataagttactaatttcctaaccatactagatgaatgagttgttattgcatacaaatccaaaaattattacattttattgtagcttgaatatatcttggtgaactcattttcttagagtggctctggttagctctttattaaaatgacaactgatgtcacagaagctgcctgaggacacatctaaaatgaacatgcttttagtggtggttaaaatactttgaacagtcaacaaatatttacagctctttttgtgtaacgtgctgtactaagtgctgggataaagcagtgaacggggtggacatagcctcagaactcccggagcttgtggtccaatagctcagtaaaggtctactgaatgaaagggagacttccctttgctcacaatgaggtcattcctcatgtttttgccaatgtatttttcctgcctggataatccaccctctgacctttatccacatcctttacccatttctttttcaaggtccagatcaaacagcaagttctccactaagcctctaacaataataacactgatggcagctaaacatttattgagcctgatgctaacctctttacatggattacataactcatttctcacaatgcactatgagatatttacatataattcttcagtaacccaattgaggggaattgcagggcaattaaaaaatacgtataacttaaaatgttgaactcagcatgcccagaactactagaatctttttgagcatagaacttaaaatgtaaggtgcgaagaaaacaattttatattttactgtgcctcagaattgcttggtggggtcttttaagaaataaagatgccagagtacattgtcaaaatttccaactaattaaaaacacacaagcacacatatgcagaacacagtacagaaaattgccgcaaatatcttctaaagataaccacaaattgcactttatgtgtttccattcagtttttcttctttttttgtagctataatcttttagacataattttaggataggtatcaccttatcagtgagatctttccttacccacctccattccctgtcctcattactgcttaagttttctccaaagaatttcttaccttctatttattaattactttttaatttactttgcttcctcagagtaacttatctccccacctccccgtggccccacttccacatacatactagaatgtcagctccataagggcagagatttttgtctactttgctcacttcagtatctacagtcgttaacagagtgcctggcatggagaggtagcttagtatctctttgtccaatgatggatacctgaatgaatacaactgtcaaagtgcccttcagaaatgctgtactatttccacttctacacgaagggtaaggcagtgccatgtggaaggtatatttttaatgggtgggaccttgagtcatcccttgaatgccacctgggatctctgtggcaggcacttgcaacaccaaaggagtgtacactgtgcctggggccaagggcaggtgccatacacaagtgcaaggccatactgaagaggccacctgccctcaaatgggttcaacaggaatgctttttaaagcaatgccccaaaattggttttagcacttgattgtataacctgaccacattatgagttctggaatttgttcagggctgtgtcctgtttcctttagatcacatctttctctcacccagattgcctaatttttgaacttttaaagagcagagtactgctttcagtgctatttagtcatttcccacagctcttcatccctttagagtagcttttatagttacttgggccattttgggtagtggacattggattactatttttgttcaaccaaataaatggaaggcttcttagtattattaatgctcaaaacatgcaacccacactcctattatgcaattgaatattgttttgaagtcatcctgtaattacaagatttccttccaaatcagacaataggtctgaaagtagtaattttgacctaaatatgtgcaagagcttgaagggcttcttataaaaactaagaggaagaccaagtttagtggaaaaacacccaggctaggatttgggagacctgggtcccactgacatctctgccaattattggctctccaagtccccctttggttgggtaatggggccgtccatcctaactcactctattatgtggaatataaatatgggaatcacaatgaaaactgtaaaattatattacatctaaaaggctgccatgttttcttaaacactggttaattatggtaggtagaaagaggtcttttgaaggcttttagagctcattttcccaaattgttttgtgtggacctctgcttcagggagatgtatttagtcagcttttgctgcatgccaacttcaatatcaaagtggctcatattccatacacattcctatgcttgctcgtctgcagttcagttagagttcagtcctgaagtttaagttgaaaggaagaaacttgatcttagtgggtacttaatctgttcagctcactaaaaacaaaaacaaaaacagctcagttgtatggaaggagcatgttaaccacaaaaagtaggggtagaccagaaagaagtaagctagaaggtgggttttggaatgagatcagcgccagtgaatctacccttcagttctagatttgagaaaagtagtcaaccaccataccaatgggcaacaagtaggaccaatggaaactgtactcaccccacctgttgaaaacctggagtttgagtaggtcttgccttgtgtaagaaggagtggagaagaaaaaaatcacaccctacatttggtcagggccaaacaagattgaggacaaatagaactttgtgttaaaatacttgtcccaggtccagtttcgttttgcaggattcagaaagagttgtgtttgtttaatacagtcttataaagaatttccaatcccagaggattcatgaagcaaagtgatgctacagcttccacggtgtgtatgtcagagcaggcaggattttggagattgtatatcccaacactgtaattttacaaatggaaaaaggcacagggaggaaaataaagctcaggattattcagttggaggagatagaaatgcacctaagtcccatagctcttagtacaggacatatttttttttacaatagcagcagcagcagcattattaaataatgatcatggaacatttatgaatctaggcatagttctaagtattctatatggattatgacttttatgccttataatagcccatagaggtacacttcccctttgtacaggtgaggaaaccgagagaggcagagaggttaataaacttgtccccagagtaacatgtaagaaaatgatagagataggacatatcatgaagcaatttccaaagcgtatctggcatataccagcttcgcttccagagacatctacctgaccagaggtagagcagtagtttacacttcttcacttgttcagacaataaagaaaatgggttttgaggaagccctgtatgcctttctaaaagtgctttctaagacagagtacatatttcctgatcttctgtatatccgtcatcaaactcaactgtcatcttcttaatgccaggtagatactaaaccacaaatcctccaaaacaactgggcagaaagtagaagacaatcagcagcattcactgctttctaagaaggcaattcccaggaatacagtcctgaaggtttaagttgaaaaagaaacttgatcttagtaggtatgtaatcagtttagctcactaaaaacaaaacaaaacaagacaaaaaacaaacaaacaaacaaacaaaaaaacaactctgtcaggtggaaggaacgtgaaacgtgttaacccatgaaaaacagaagcaggccagaaggaagccagctagaatctagggtttagaatgcgagcagtgcctgtcaatctacccttcagttctagatttgagaaaagtagtcaaccaccacaccaatggacaatgagcaggaccaacagaaactccatccacctacctattgaaaacctggagctttaataggtcttgccttgttcaagaagtagagaagaaaaataaaacaattcctatggtagaaaaaaaaaagatactgtgcaacaaagaaaaaccgtatcgagatggtttttgaggaagaatacacatgtgaaaaccagctagtctgggatccagaaaaatatttaagaaatagtctggcatcctcagaaaagtacaagaagatatggtgtctatgaaccaggagctgcatggagacagatgtatccagtaaggactagagtgaagctaagatataatggaagggagacaaaacactccctatctctggaaacaaaataaaatggaatacagggtgccagttaacccttgcagtaaatgataatttaaaaggaaaatacaaaatacccacaggtgaatgataacgaaagtatctcatatcaaaatttactggaagtcgctaaggcagaggaaatttataggtttgagtagattttctgtttttcctatttatttatatattaaagatatatacatgaggatatttatccccattttacaaaagaggaaaaagaagctaagagaagttgagtagcttgtcaaagttcacactaccagtaatagcagagccaggatctgaaccaggaggtctggttcactcttaataagacagaaaaatctctagcaaggttaagaaaaaaagaaaagatatgaataagcaaaatacatgataaagagagaaagaaaaaaatgttttgaacaactagcttacactccaataaatacgtatatattagtttcctagagctcttataacaaaataccatagactgagtggcttaagcaacagaaatgcattttctcacagctttggaggctagaagtctaagatcaaggtgttggtaggtttggtttcccctgaggcctctctccttggcttgcagatgactgactgccttcctactgtatcctcacgtggtctttcttctgtgtgcaggcatgcctgctgtcacatgtatctccttataacaacagcaggcaggttagatttgggcccaccctaacagcctcattttaacataatcacctctctgaaggccctatctctaaatacagtcacaattcgaggaattgaggattaagactttatatgaattttctaggaatatgattcagcccataacagtctagaaaagtgggtttcggggaaaaaaaacccacaacttcccagcataaatgtgaaatagaaaattaaatacaccaataatataacatgattattaatcctttccttttactaccacattcctagtagatagagactgtggttgttttacaggtgagtccaaacacactttccaaggaacagaaaatccctatattactttagttgtatcagaaaataaaagataagaaaaagttgcccaactcatttcattctaaaagtggattgaataggtataataaataaaagtaaattatagaccaatgtttaagacataggtacaaaaatcccagactttatattatttaaaagtaattacagcaatatgtataggaattaatacatcattatcaagttcaatttattccaggtatgtaaatatacttcaactttggtacaagtttggtacaacttcagacacattatctttcaggtaatttgctaatgttactaaaaaaaaaaaaacaccccagaagaaaagttaaaaccctaaacaaaaacaagaaaaagaagagtataagaattagaagaaaaaagaggaaattagcattttagaaattttatatgatgatttaatatggaacacctacaacaagctacagatacattactaaaattgattaaaaagtttagataagttgttggataaaaatcaatatacaaatacattgtatttctatacaacagcaacaaagctctaaaagagctgaaattaaaagttacaatttaatttacaatggcaattttacacatacacacacacacacacacacaccagggaatgagctgaaaaaataaagaccttaatggagacaattattaaatttattaaaagatattaaaaataccagaattaatagaagatatatcatatgtatgaatttgtagacaaaatattttgagatgctgtatctactcaaatggaacaatatattcaatgggattaaaatatgtatctgaaggcaatctgtgttgtactaaaaagcttgaaatgacaaagcttgaaagctggttctaaaatttatatagatgacttgagggtctgagaatgacccaaattgtcctgaaaaagatgaagcaaattttattattaagcttattaaataagaagtgagtgagtgactggtatgaggactaagggaccaagggagcaatggaacataacaaacttggtatgtgacagaggtggcattgctgaaaaccagtgaaatgagggaattggtcaacatatggggttgaaataattggttacttacatggaagaagtggaattggatgttcactttaccatgaacatagatatcaattccatgtctattaaaaatgtaaatgtgaggctgggtgcgatggctcaagcctgtaatcccagcactttgggaggccaaggcaggcgtatcacaaggtcaggagttcgagaccagcttggccaatatggtgaaaccctgtctctactaaagatacaaaaaaattagccaggcgtggtggcacacacctgtaatcccaactacttgggaggctgaggcaggagaattacttgaacctgggaggtggaggttgcagtgagccgagattgtgccactacactccagcctgggtgacagagtgagactctgtctcaaaaaaaaaaaaaaaaagtaaatgtggaaggtaaaagtctacaaagggagtatctgtgacttggggcagggaaatattgcttagacaaaacacaaagcgcacaaaccataaagagaaagattggtaaatttgagcacattaagaacctctgttcatcaggagacactgtaaggacagcagaaagcagacttggagaatgttgtgtgtgtgtgcgtgtgtgtatctagcaaataattagtattcagatatacaaatcaatattgatttttctacaaatcaataagaaaaagacaataccatggacatgttctcaaactccttagtaatcttggaaatgaaaattaaaacgacaatgtatcaccatttcctacctatcagattggaaaaatacaacctgatattacaaaaaactgttgatgtaggacaatgagaaccttagacaatgatagattcagcatggaattaacctaaaggaataaggcctgtctcctaagtttttgagggagttacgatatcacaacaaccttaggcttgtgtggcatcagcctgtgaatattaacttatatcaaggccaccgctataaaatcaaagtccttaaaatgccctaccaggacttggtatgtatgatctggttctcccttgcttctctaatctcacttgttactactttcccatcactcttgccatcctcagtccttggaagtatttctcgattattcttttatatttgccattccctcttaccggaatatccatcctccagatatccacatggctctgtctcttcattcattctagtgcctgctgaaaggtcatctttttaagatgatttctctgataattttatctgaaaagtgaccacccatcctacttgtcactatcttcttccttgtttttttttctttataaccttcatcatgactttacattttaaatttttaattttttcccttctctccttttttttttgagataaagtcttgctctgttgtctaggctggagtgcagtggcacagtcatagatcactgcagggtaattttaaattttttgtagaggtagggtcttgttacattgcccaggctggtctcgaacccctagcttcaagagatcctcttgcctcggccttccaaagtgctgggattaaaagcaccagtcactgtgcctggcctttacacttttttattgtgtgtttgtatccgtccactaggctactattgcgatacccctagttcccagattacttggcccatagtaggagcttaatatttgtgtaatcaggggacatgaaattccttataagctcttatttaatagaattaacaaaatattttacttctagattttaaaatctaatttactaacatcatttgggaattttgttacatatacatgcctcccacacttttttttttaaaaaagagttcgtttatcacacacttgttttttaaactaatgatttgctttcaagtcagtgttgtcacacgtccaaggttttcctacattctggtcaatatttattctattgtggactgtacaaagagagcgtcatcagttgttcttttaacactgagacttgtcaatatgaactaggaaagaatgatgataaagaacaccgaaggtacaggaggactctgggtgaggcatagtgccatcagatcagaatcctgagtatttcatgcaactgaaaagcctctggcttcaataataactcatggggaaggaaagttgttccacacccaaagagatcatattttgtaacaagccaatgagatcaagatttgtttaggtcaatttcagagcaaacataggttatcagatgcatccttcaatatggtttactagaatctgaaaattgcatgcttcttttgaagaaaaggatggttaaaggatactgctatgatttttattctgaaattcatcacaatactgtatatgtttataaggaaatctgctatctggtcagtgaaaggaactatctttcagacaactaaattcatgtttgtttcatatgaccaaaaatgcagacagaagccggatagtaaagatgccaggcagagagaatacacttgaagtagttggaaactacttgggtttaaattattggttgaaatctactggggttcaaattccatccatgccactcactgtttgacattgatcaatttagctaactcctctaagtctcaatcttttcatccataaagcatttcttcatctataaaacagggaagagtaatgagaaaattcagataaagcagtcaacacacgttcataattatgttaatttacaactaacgtatcttgaatgcttaccatgggccaggcactgactgggctaagtgccttatgtatatttttttcttttttaatcattatgtgcagtaggtgttgtgattatatcctttttacaaatgaaataaaaggcaaagatgagggagccaggacccaaaccctctgccctgtggtgggccccaaagtctgcatttgaaattcttggctttcttgcatctttctgttgccatagagagcatcaccatcaccttttagataggaggtggggttcagatgatcttcaaggttgcttacataaatcttttcttgttgtcacatgcagacacacaaactctctctctctctctttctgagaggtcagcccattttcctgtctgctacaagttgtgccattttcagtattgttctaaaatcagattagtcacaatagatcctatagtgcttccattaccaatttgtacagtcagtctacaatattgcttataaaaatgttcttttggagccattgtgggtctctttgaacatttctgcaatgttgtctgtacagacagtacatccaagaagaatgaggatggggaatgacgtaattaagcctgttgggaagctctctctctaaggtgaactggagtgtcagatggagttacggtgcttctgaacaccattccccaaagctccattttggaatcttagatttaaaaggcactttagcaaatactgtaaaccttttctctcatgctgaattactttggtaatattcttcatagttatctccacttgctgtagttggagagggaagcacaatcttctgggaattttaactttatttctggaatctactaacagatagttcattcagccgtttttctttatgcaactttcattctctgatgtgagttctgcctttgaaagcagaacagaatagatatatattttattcatgaaaaactttaaaatttgaaggtaacagtcaaatttcactcatgaggcagggattgggtctcattttgtgctccattataaccatagcacctagcgctgtgtaggaaatatagttggtactcattaaatttcttgatgaatgactaaatgagttctctcttttctccactagagtgactgaaagaaagtattatatttctttgacatgtgaagcataaaatgtgaccattaactcttctcaaatgtgagctccatgtggtgaaggaccacatatcatatgtaagcaggtaaattcatgattgagtgaataaatcctgaatgctgctctagtagtggttgtaacgttttaccctgccacacttggccatgacttgttggagaaaaggtaaatatctgatttaatctgggccaatcaaattcctctcctgggtatttggaattaagacctatctctggggagatgagctgaaagttccaacactaaggctgaaagtgaggactagttaaagcctcatggaggctaacatttctaggagaaccaagagtaacaaagatgagagacacgtgacctcagggagaacatgaggtgggccatatggctgtccagatacctgatggctttccagcccgtggctccagtttccatgatggtcagctgttcttcatttctttgagatctctgaatccttacaataatcaccgtcccaccctgacagaaaaacagagaaacacacacatgtgctgttattgaaggttgcctatgttagttctgttcctaccactctataaaacagtttattcaatctaatataacactaattcttgactcatattctgcacacagataactaaaacacccagatcttttcacacaaactgcagtttaaccaattgtataatagaatttttggaaagtttgctcattcacccattcattcaacaacaatatattaagcaactactgtatgtgaatggactttttatagtttttactatttgtctgtcagttgtcactttttgctgctgcgaaggatgttgtcttttctttccatttacttattagcagtggaattgagtaatgatgagtaaaataaaagctcgtaagctctgaatgtgggcactacatgatgtttgtcatatctattttgagtgtggaaagaacattttgcctactgtctgtttccctcttagattctgggttgttgtaggtatagtaagtaaatattggatacttgaattgttatgtgtggttttatatatacatttatatgcatatatcttatataaatttaaatctaaatatatatacatagctaggaaaaaacaaagtaaggttgtaccagagtaaagaaaagttgaccatatttaaataaataaatgtgattacatttacagaccagcagatgtacttgggactgtcacctctgtgtatcttgaataaaactgaaggttaaacttgtcccttcattgggctttaaattaaaaaatttttttttaaaattatcttaggtacataataggtatatatatatttatgggcacatgtgatattttgatacaggctacaatgtgtaacacctcagggtaattggggtatgcatcacttcaagcatgtattatttctttgtgttaggaacattccaattccactctttttctttctttctttctttccttttctttctttcttttttcgtctttcttttctgtttttcttttgctctccttccttcctttctttctctctttctttccttctctctttctttcatctttctttcttctccttccttccttcctttctctttctttctttgtttctttctttcctctttctttccctccctctctccctccctctctcttcctttctttccttctttctttctctttctttctttctttctttccctccctccctctccttccttccttccttcctttctttctttctttctttctttctttctttctttctttctttctttctttctctctctctctctctctttctttctttctttctttctttctttcttttctttctctttcctctttctttccctccctctctctctctctctttctctttctctttttttctttcttcttcttcttcttttttttaacaggatctcattccatcaccctggctggagtacagtggcatgattatggctcactacagcattgaatcaacctcctgggctggagcaatcctcccatctcagcctcccaagtagctgggactacaggtgcacaccactgtacctggctaatttttgtattttttgagacagggttttcttatgttgcccaggttggtgtcaaactcctgagctcaagcggtctgcttgcctcagcctcccaaagtgctaggattacaggtgtgagccaccatgcccagcctagttattaaaaaatatacaattaattattgttgactatagtcaccctgttgtgctaccaaatactagatcttattcattctatctaagtttatttttgcacctattactcatttccccaccccctaccactcccaccctgctatccttcccagcctctgctaatcatccttctactctctatctcaatgggttcaattgctttaacttttagctcccacatgtgagtgagaacatgagaagtttgtctttctgtgcctggcttatttcaccgaatataatgtcttccagtttcatctatgttgttgcaaatgacaggattttgttcttttttattgctgaataatacttcattatgtatatgtaccacattttctttatttgttcatctgttgatggacacttaggttgataccaaatcttggctactatgaatagtgctgcaataagcatgtgagtgcagatatctcttcaacatactgatttcctttcttttggatatttacctagcagtaggattgctagatcatgtagtagttctatagttttccaaggaactttcatattgtttgccatagtggctgtactaattgacattcccatcaacagtgtatagggactccccttttgccacatcctcaccagcatttgttactgtctgtcttttggataaaaacctttttaactacagtggaatggtatctcattgcacttttgatttgcattactctgatgatcaatgttgttgagtatttttttatatacctgttggccatctgtatgtcttcatttgggaaatttttattacagatgttttgcccatttgtaaattggattatttgattttcctcctatagagttgtttgagttacttatatatttgggtattaatcccttgtcagatggatagtttgcaaatattttctcccattctgtgggttgtcacttcactttgttgtttctcttgccacatagaagctttttagcttgatgtgatctcatttttccattttcactttggttgcctgatcttttgaggtattactcaagaaatagttgccaagaccaatgtcctggagaatttccccacattcattgggcttttagttaatctcctccatcccactctttacttcaaccaaatcaaccaacatttaaacactcattttcaagctgcttttctgtaattccaatttgttgggatttccctggcccctatcacttgtgagttcagttttatgggtgagaggggacttgataaagaaggcacaatttttttttcataccccaaatgccagggcaataagccaagtttatacttgatgcgtcctccattttcattagcaatagaaacagtatagtgctactaaggtcaggggtttgaaccctggctctgctacctttcaggtatgcaatctttcggaaattctcttaatttctttgagcttcagtttcttatttctaaaagataattaatactaccagattatagtgattactgtgagggctaaaagacttaatgactacaaaatactcagcacagtccctggcacctagtaaatatccaataggtcatcgcttccagtgttgtttttattactgggggatgctgctgtccacgtaccaaaagagaactgtaaaaaacagcttgcaaagtaagagaaggaagggaagtgttttaatgtgtaatggcacattacattttctggtaatcccaatgttactttaaaaaatcttaaaaatttgacagtggtagcacagtttatttagagccttgtcttggggataatatgaatttttctgggaggattatacataccaggcttcttttcctgtgagagcaaattcccttggacttcttaaatttctgttttcttggtgtagagactgttttctctaattcactgtgggttttctgaacttttccccgttcaatcctagtggtttcaatctgggctgttgtaagaatggcttttagaggaaagagatattagaaatgacagcttttcaagatgaaaaaggtgccttaagactccaaataattctgttataatttttcatttcttcttaagcattttacggaaaatggcccatcttgagtatttttatccttgggcctaaaaacaagttcttgttagccagcggctaggcctttgaagctgcagtgcttgtattttggtctccaccctcttggatgacttgtggaagtatcttccaagctccttcctgattgcgtttccccagtttcaactgagaaggagaaagaactgtgactatatcgatgatttcagaagtgtaaacaacttatcatgtttgtggaacactggataaccctcacaggggatgctgaggaatctggatgcccatggatttttaataatgggagagaatgctatttggaaatcagaggattgaatggatcttggattggatcttgaacacaagactccaactccaaaataaaaactgtgggctgaacaatatgcaattatatatgtggttgtataatgtgcttccatttccttactacaccctaacaaagtctttgttgctggcagggagatcagcctggccttaagaatctgcttctgctagttcagatgggaagtgattagtgtttgtcatatgcttaaaatcctttatgataaatggcacaggcagttattttcgtatgtacacagaatacatcacgaagatcaaagaactctaaccagaggccccatttccagctaacaggtctgagtctatttgggtttagattgtaaaacttcaggaaaatctaacgagcttatgttaccctgaacaagaaatgagatttcttagtaatacccactattgctaagtgactattaaggtagccaaatatcattctttacctatgctttagtttaaaatttcaaagagaggtatggtcagatttatccatgtgttcaatatctaagattttgtcttttaagggaaagcgctttctcctctgattttctgcctaggggaacctcaaggtatctatggcgtaaaagccaaacgtctgttttagcaaatagccagacattacagtggggagtatgtagatcatcttgattattttaccaaccatcagggcagagatggaaacattgtgagctgggaacattgagtttcatttttaccagtatccttgccttttagaaggtatctgttaggagtacttaaagtaaaatggattgtttctaaaattgtgagatgagctatagggcagcttttctacttaattagcttttgtcgttttgtgtttctgttgagaaaagctgagtgggacccaagctatccattcactgcagcatccaagttgcttagaatacttttagaatttagctaagaatactgtttctacccattccaaaaagtatagctagataatttgtaaattcaatttcatgttaattataaacaatttcttgtgctcctttctgtactgtgggtatttaccgagttcaaccatagcttatacctcatatgagaaagattaacaataaaaaatcttttctgtgcacaagtgggggtaaaagactcattatcttctctactttacccccagtgcacccaggctccaaactccagaatcatatattctttctccacttccaatctaatattaaatcatgttgatttttgtctcaacaatattttttgtttgtttttaatttttcattaccgttgtcattatcttagcttaggctctcttctttcatgaattaagcttttccttattatgcgtgaagttattaattgaacaaacacttattattcacctactaggtactaggtattagtaggtgggaataacagcaataatcaagataaaaccttatgttgggtacaatcttcttactcaagtcactgaaaagcctttaaataggtcctttatgtattttctctctctactccaaaacattaaaaacataattgcaaaactagttttatgtaatgcttcattatggcctgagatatcctaatagtgtggccatagtcttctttctagggttacttcatattattttcttaattttcccacattttagataaatgcatgtgttaggtatacgttaccatgattcctggcctttcgtatagcttcagtggttatgttattcttgttgtatgggaatgctttcctctccatctcatatgttaaaattcatccatcttttttttttttccaaaaaagtgaatatttatttatttattttaaatttaatttaattttaagttctgggatacatgtgcaggacgtgcagttttgttatataggtaaatctgtgccgcggtggtttgctgcccctatcaacccatcagctaggtattaatcgtccatcttttaaagctcactttaacttccacttttccatgaagcttttcctgatcttcctcctccttccatcctggaaaatccttgcagtttgttctgcagcatcacacctagtgtctagccatccctactttgtccctacactttttgaattgcttaccaacaacttagagagggagctagagattgttgctggccattgctccttgttttttctcttatttcaggtacttttttgtattttgtcgattcttcccggacgctgccagttttttgcccatctctgttctatttttactgcaactccacaccagttctggttctttggttttcctacttgttctcttagcatttgataattgattctccacaatagattttgaaataacttcttggatttttttctaaattaggtattacagggtaaggtcttgcttttgctccatattccagaatccaatcttgcctggggccaaacccatgccaggctttccctcttttttctcccaaggggatggggtggtcagtcaattatctttatagatatttttttcattaaaattaaaaaattcttaattgtggcaaaagacccataacataaaatttaccatcttaaccatatagttcaatagtgttaagtatattcacattgttgtacaaccaatctgcagaacttttttcatcttgagatctttctttacatttttaagcagtcatttatttacttgttttctcttgtatatcggaccaaaattttcttgaggacaaggctgtgttactgacttgtgtatcttttagtcaaactacctggtataatcaattaataattgtttcatgaatttgaattgaccctggcttccctgatgttctaatctaatgtgcactccacaggaaccctattctgtcaacagacctggattctgatatcaatgaaatagtgcacatcttgaaaacatttccactaatgtaaacaagaaagatgaaagtcaacagagtaagaagttggcacaaggagttgattccgtctgctttggaggttttgctttttggcttaactgttacatggtgctattgtttttgttctgggaggtgggacagtgctgctttatttattttaagaaggcagcaagccaggaacacataattgaaaggaaatttctgtactggcgtattattttttcaactaagatggcaataaataacttgcaacttccttttgtttgaagtggttgatatgaactagagtttaatcttatacactcataaaattgcacatggcaaatactttcacaattgctatttaaaaataggcctatatacttacacactactaataatgtgtccctttacatcatagccttacagcattaggggaaagtcattatctcccctcctcctatatctccaaatgttctctgagggcttacgtctcttatagtcacctcttgttctgacttctggattctcaaagttattttcctcacctgcattttgcttcttttggctgttctctctcctccactagcatgtaccccaaagcatcaatttttctttggtttctcaaaatatcacttaaggcagttgtctgtatgagatatttaacagagaaaaagctatcacaaaggtttactttatatcataatgctacagaaaaatttaaattggacttaggcacaagttcttaaactttcttagccactgtaaatattttatagactgacttctctcttcaatttctagggtctcctgccatatcactgatttctttccattcccttattgctaatctttggcgcctaatctcctgctaggtggttctggaaatatcacaacccttccaaacttaatatttctctagtctctatctatcatgacctggggctatgattccatagtcataatggcatttttttcactaaaaagataattatctcaaaatgagtcaaagacttaaatgtaagatctgaaactatgaagctatgagaagaaaacataagggaaatgctttaggatgttggtctgggcaaagattttatcaataagaccttaaaaaaacaagtagtaaaagcaaaaacagacaaattggagggttatatcaagtgaaaaagtttctgtacagcaaaggaaacaatcaacacagtgaagagacaatctacagaataggagaaaatgtttgcaacctatacatccgataaggggtcaatatccaaaatatacaaggagctgaaacaactcaatagcaaaaaaagccaataacccaaaagacctaaatagacatttctgaaaagaagatgtacagatggccaacagatggaagaaaaatgctaatatctctaatcatcagggaaatgcaaatcaaaaccatgataacatattacctcactcctgttagaatgactgttgtcaaaaagacaaaaggcaacaaggtttggtaactatgtgaagaaatgggaacccttaacacactgttggcaggaatttaaattagtgcagccattatagaaaacagtagggaggtgtcctaaaatattaaaactggaactatcatatgatccagcaatctcactactggatatttatccaaaggaaaggaaattagtatgttgaaaatatatctgcactcccatgtttattgcagtgctattcacaatagacaagatatggaatcaacctaagtgtccatcaacagatgaattgataaagaaaatgtggtatatgtatacatgagggactattattcaaccataaaaaagaaagaaatcctgtcatttgtggcaacatgaatgagcttggaggatatatgttaagtggaataagccaagcacagaacgacacacaccacaagatctcactcatatatggtagctaaaaaagttgatctcatagaattagagagtagaatagtggttatcagagcttgggatgggtaggggagtggaggatagggagacattggttaacaagtacagaattatggttaattaggaagaataagttcaagtgttctatagcacagtatgaagactatagttaacaacaatttattgtgtatttcaaaacagttagaagagagaattttgaatgttccaaatataaagaaatgataaatgagatgatggatatcacaattaccctgatatgatcattacacattgtatatacttgtatcaaaatatcagatgtatctcataaatatatacaattattatgtgtcaatcaattttttttaaaaagccacaataaagaaaatactttaccccaaagataattatctccttaagagaaaatttgttttaataaaaacttttattttagggccaggtatggtggcacatgcttataatcccaggactttgggaggccaaggcggtgggatggcttgagctgaggagttcgagaccagcctgggcaagttggcgaaaccctgtctctacaaaagaaaaccaaaaacaatagccaggtgtggttgcacgtgcctgtagtccctgccagttgggaggctgaggttggaggatggcttgagcttgggaggttgaggctgtagtgatcaaaccactgcattccagccttggccacagagtaagaccctctctcagaaaacaaaaacaaaaacaaaaaacacttttactttagaattgttttagatctaaagaaaaattacaaagattacaagaaagttcatgtgtactgtacactcagttttccctattattaacaatcttatatcctttctatcacattcctgacaaatagtaacatctgcttaaatacttccagtgactggcaacccagtatgtcttaatgagccccattgccagataactctagagcagtgtgacttgagatgtagtcctaggaccagcagcagcatccatacaacctgggagctgcttagaaatgaagagtctcagatctcattccagacctgaattagaatctacattcaacaggatctccaggtgattcatgtgcacatccaaatttgaaaagtattgctctagtgttcatatacatatatatatatatacacacacacacatatatgtatttttcccaaaagatggcaaccaaggtcttgcaatcacattgccccattcattaatttatctgtgtattcacaaaacatttcttaagagcatattatgtgatttaatttgaattttttttagaaaaaattatccctaccctaaaaattttcacattccagtcctgtcatgcaaaaggtagttgaatgaacagggtaatttttattcagaaaagagaggactaagtttgaagagctgaccctgaaagaaaagcaaattcagaaaaattcaggaaaagcttattctttataatatccattctttggtctcaactgggtttcttttaactttgtgtgcatctagtctgtttcttattccacatgacagctgttcagataatcgaaggcagaatccaagtttttacttggctggactcttcctagattgttcaaggctagacacccttcctgtcttgagctgtccaatagtaactttgtcctgcaggattgcttttacatgaatgtcagggtctgcaactgaaagattgatgaaagggaaggcaggctacctcatccctttgccctaatcgtaggtggaatgggaatgagagagaaagaacattatgagtgggttgtttatacactcaagcctcaggacatataaacaggatgaaaccacttatctcacccttactgactgttttctacagattgtggcattttcctgtatttgctcttctctcaggcacagctcttcaaacttagtcttctcttttctgaacaaaaattaccctgttcattcaactgccttttgcatggcaggactggaatgtgaaatttttgagagtagggataaggtcttatttaaaaaaaattcaagttaaatcagtgcttagcaatcatatgttcttaagaaatgttttgtgaatacacagatgaataaatgaatggggcaatgtgattgcaagaccttgcttgacatcttttgaaaacatcttagtgcgttactgtcccctgtccctgataaaatgtggcatcatgaattgagcagaatactccatatggtgtatgaatattgtaggatagtggtataattaatttccctaatttagaatttactttttgatgagttcagcctaataaagatgaaagagaatatgacccccatcattatggcggtctgtgtttagaaggccaaaatagacccctacaacgttgacttagcttatcagtaaggtagaatttgctttaaatggcaattttgagatttttcttgaggagctgaaaggctttacaagattaggaaggtcccccactggctaaataactgctgagggctttcccccttttctttccatcattctttgcttccttctttctctaactgcattgcaagccacttccctcacctgaaattactttttttttctgtaaatactattacaaaaaaaactgtaaaagagagtggtaaatgcagagtagatggataaacataatgacccaagaatgacgatggcgaaatatgacattttctggtgttgggtataataatgggtagagacggaggaatggaaaaaatagactagctcttttgccatggcaacaataagtgcatttattatataaacagaagaaggaaaggcatttatttggtccttgttccttttccctcctaattctcagtttctcctgttttttgtttagtttagattctcaaaagctggaagccagttaccttgcaaagacattgatcatttctttaaatacccaggtatatgcttgactccataatattttactgtttaaaaataaataaatgaatgttttctttaaaagctgattgaagaatagctcaagtcctcttttatcaaacatagaagaatgctctctttaaaagtttgcatctttatcttgagtcaataaccttacaagcaggaatcaaggcacagttttctttccaattgagtatcattagaacattgtctggttcattcatgtatgtctcaagggtaaatggccatcagcgagtctctgacagagaaatactaagtgatcctagtctaaaaggaaagccaatgtgcacttgagtagcagcattcactttacagagagttcaaagggcactttactatgtctaaatgccctttatgttctctggtgccagcaggaaaaggaaagctattaaatgcttataagagtgagacactgtattttaggacataggaaagatggggggaaatagatggcaaactaattgtaagtcaagaatatagcgagtttcccaaagagaattcctgcattttcaaaatattcttcttttttaagggtgtgtggggtgggtggcgtaaaatggaaaaatatgtaaagcctcatttaatatgttttctgaataatccaaaattttcaacatgagctgtaggttgggttgggttggggcaaatcgatgaggcaggagcctaaaattataccaaatttctggatataaatatcagccccaccattattagatatgtgaattccgggaagatacttaatgtctttgagtcccagccttcacgagtatacaattaggaggataaattccaccacggagaaatgttgtcaggtttagtgtagtaacatatataatgcagtcagtagggggcctggcatgtgttagggcttcaaaaataagaaccacatttccattcccactgtcccttaggatcaaatctgcagacatcttctttaggcatttaatacctcccagtattccttgtctacagctcatcgatgtttgtttaccccaagtatttgtataaaattttacacacaaccttcctaacttacatttaagactgtgccatttctgattttctagaaaagagttcagattccttatcacagcatttaaggacatccatgttctgaccctgacctagttgggctgtgtccccctccaactctcatgttaaattgtaatccccacatgtcaggggagggagcttgtgggaagtgattgggtcatggggttggatttcctgcatgctgctctcataatagtgaatgagttctcatgagatctgatggcttaaaaatatggcacttcctccattgctctccctttcctggtgccatgtaagatgcgccttgcttccccttcaccttctgccatgattgtaagtttcctgaggcctcctcagccatgtggaactgtgagtccattacacctcttttctttataaataacccagtctcaggtagttatttataacagtgtgaaaacagactaatacagacccccccaacaaataacatctcctttataaagaccctatgttatattggccagttcctcaatatgttctgaaatatttttcctccataatttcattcacttttcccctgactataatacagttgacccttaaacaacatgagtttgaacagtgcagtttcacttatacacagattttcctctgcatctgtcaccctgagagggtaagattaagcctaccttttcctcttccccctcagcctactcaacatgaagacagtgaggataagacctttatgatgatccatttccacttaatgaatagtaaatatattttgtctaacttacgattttctgaataacattttcttttctctagtttaacttactgtaagaatatagtatataatacatgtagcatacaaaatatgtgttaattgacaacattatttgtaaggcttttggttaacagtgggtaattagtaattaagtgcttggggagtcaaaagttatatgcaagtttctactgcacgaggtgttggcacccttaacccccacgttgttcaactataccttccatttctgcactttgaaaggttattctttaaattccagcatcaatgtcatgccctctatgaagtcttcctgaatactttggacagaagtgatttctgttcttctggaattgcctagtaattcctcataatattaataataaagttctatacattcgtataatgctcaaatcagtggacacttcctgatttagatatgatttaacctgcatagagtagttgacaatacaagtgactttccatccattttcctcctctgacttctgaaacattctggttttcttactacctatatggcttctctttctcagtcttctcagtgaatttattcatttcctaggactgcctttaaaacatactacaaactgggtggcttaaaacaacatgaatttattatctcagaattctggaggctagaagttcaaaatcaaggtgttgggagggccatactccctctgaagcctttaggggagaatatcccttgcctcttttagcttttggtagcctcaggcattccttgttctgtggcagcataactctaatctctgcctccattttcatgtggctgtcttccctctgtcactggtgtccttaaaagaagagaaacagacacaaggaggaaaaccttgtgtctgtttctcttcttataaggacactggtcatattggattaggtctcatcctaatcaacaatgacctctcatcctaatttgattacatctgcatagagcctattttcaaataaggtcacattcacaggtactaggggttaggacttgaacacatcttttggggggatacaattcaacccaaaacagtagcgttcccatttcttgcctctcccttaaatattaggtttcttcagagtgatttcttaggctcccttctctcagcaattatttaaataatgaggaaaactaaaatttggcagtgtcaaatatgtgaatcataaaacaggtgtaacacaagggtccaaggaggatattcgagatacagtgttctgatgcgtcctccttgaatgtgactatattcccttagcttttcctttagaaccacacttgaggtggtggagcctttaaaaatatttaacaaatgttacttttgaagaagagagtaagagtatttaataaggtaacattggcaatgtgaaagttatatgagatacataatcagtggtcctcatctttgtctccttcttaaagaaaacaagaggaaatgattgaccactggaagggtaatttttgtgggctgaattgtacattccccaaatttctatgttgaaaccccaacgcccagtacatcagaaggtaactgtatttggaggtagggccttgaaagagacaattaaattgaaatgaggctattaaggtgaaccctaatgtaatatgtcttatgaagtcatcataagacagggaaatttggacataccaagagactccaggtatgtgtgcacccagaggaaagaccatttgagaaaatgaccatctgtaaaccaaggagagaggttttaggagaaaccaagcctgctggcaccttgatcttggactttcagcccagaactgtaaaaaaacacatttctgatgtttaagccacccagactggcattttttttttatggcagcttagcaaacgaatacagcaatttttagttactgatttagtgactagtgtggtccagatgctattctgggtgctgacgatatagcttccctgtggagctgatgttctagcggatggagaaagggaataacaataaataagtaaaatatatgtcagatcagactaagtgctacagagaaaagaagtcagagaaatcatcatatagaaagttgcaattttatagttatgaagccttcattgtgaggctgaaattttaacaaatatctgaataagatgaggaagaggcagaggatcccaggtttaggaagtagcaagttcaaagaccctgatttgggattgtgtctgacatgttcaagagacaacatcaagaagccagtggggctgaaatgtatagagcctggggggagagtaacatgtcagagagaatgggggtgggggagctatggagctactggggactaacttgtagagaaaaccagtccccagaatgaagttaatacaaaaagaagggtgagcaggcaaaatgggggagggtatggatgagggagggagagagaaagagagagaaagagacagagagacaaagagaaagatgccagtctgaaaaggctacacactgtatgatttcattatttataggacattctggaaaggcaaaactatggaggcaacaaataaatcagacattactggggtttggggagagaggaaggttgaacaggtgaagcacaaaggatactctttgtaagtgatgaaaccattctgcatgataccataatggtgggtactcaacgccatgcatttatcaaaacccatagaactttacagtacagagtgaaacttaatgtatgaaaattgtaaaaaaaattatttctgaggtcagagggtcacagggtggaatatagaacatgactaaacaattaacaatgctacaaacatatgataaaacctcactgaagggactggcagaaaaagttgctagcctgaataactttagaaatgagcagagattgtaagactaaagggaaaaataattgtatgtaagcacggtaatctagttgataaagtctcccatgggggaacaggttaacaattctgaaaccatcatacatctaatctggaactgaagaattaagtaaatggaatgtggatagcaggaagcacgagccaggtttctcactgttgaagtgggagcttacaggaaagcatggggagaaggcaagaatgattcatatggttatggattagagttagagacatcagtatgaactcatgcttacattattataggtacagacgtttacatatagaaatatttatagatacgtatatatactgaagttagctacacacacacacacacacacacacacacacacacattttgctctgtcagctgaagaggtcaagatacaaggatacacctaacaagtcagatctttgtttctaatactatttgttccaataaaaggaaccagggatccttagagagacggctgattctcaggaagcatacaatataagtctggagcatgttgtagtttcttaaaagaaagaagtacttaatacccacaatgatggagcacatcaaagggagactagagccaatgtaagcagttcctaatggcctacgctgggacgatttgagcaataagataaataaggtagcaatggattatgattcaggtatatatacaataaatattcctgtctacactgacataaataaacagtcgagtaagtaaacaaatagggaacaagatacatctcctgtgcaggagaatttcaaatagtttgtgaagctcttccatcctcaaggaggtagaacataactcctactctgtaagcatggatcgtgcatagtgatttccttccaaagagtaccatatggaaagcttagaaaagagtaactttaaagggtgaaacctgataaacactacctcagccaggtgatcaaggtcaatattaaagtggtaggtcatgttgatagtatgtactcttgtatgatgcaatggaaatgacacttaacttctgtggtcttcctctgcatgtaacaaacatcacactgcaatcctgagaaaagcattaagcaaatcacaattgaggggcattgtacaaaatatcagtacttcttaaaactgtcaaggccatcaaaaacaagaaaagtctgagaagttgtcatagccaagagcagtctacggtggcatgcgactgcaagtaatgcagcaccctggttgggatactggaacagaaaaatagtgtgaggttaataactactaaaatatgaataaagtatggacattaattaaaaattatgtaccaatattggttcattggttatgaccaatgcacctcacttatataggatagaaataataggggagattgggtgtgaagtatatgggaattctactatctttatcacttttctgagcatctaaatcttttaaaataaataaaaagtttattttaaaaaatctcattccaagttttaccccattccaattaaatcagaatttctagggtgtgagaagggatcagtattttttaaacatctcaagtgctgtcaacgtgcagcactggaaacctctgtagtagaagtccctgagctgtggtagctgttatattttggtactccttaattcatacaaaatgtcctgagctaaatgaaaatgttgtgtgttgcctccattttgtacctatgtgaagtcaaaattttaattatgagtatgataaaaataaagtactggaacatgttgcccatttgagcaccacttgatgttacactattggatattgagctcctaactgacaaatgtatcaagcatataattacaagcaatattacatcttaaaatgtctcgtaattttcctccaattgaaatgaaaaaaagaaaaaaggatatgacatgcatactctttcctctgtctgatccctatgctgtctgatcccacattaatatgctttggtggattccaccacgattccatttttctgccgttttttgaccttgtttgtactccaggaggctgactctatggactgcaatcctcaggcctccttgctctctgatttccagttaggtttaggcaagatggaggagacaggtatcatcgttttaacccaagtctttcccttcttcatcatggttctggcagtggctgcgtttgttgcaactccagctcccaccccctctggctcacacttggctctggaaacacagttgccttttctcaccccttcaaactaagagggagtaatggtttcctgctgttgctagtctctaggtaactcaccatccctttttttttttttaactttactaatatctctgtaaattgtctctttactgaaatattttaactttttgagggtgtcatctgtttcctgataggctttctgactgatgcaattagtctatcattgtcaattctctggaaatgatgactctttctcccccacctctttttaagccaagataacgtcttgcctacttttctggccttaaaaatgttctttgttttgtgaaacaatgttgataatagcgaacattattttccctaaggccttatttggcaaaagtaagagctggcaaacatgctggttccccacatatttttgaaatttcattttcaaaactggagtctgggaaccattgacctaagtgagaattcaactttgaaacattaaggggattcagctatcattcactttaccacaagaatcttacaaatctgatgaaagttgccaatggctgtcacagtagacactcaagttaccgggattcagttgtttgcataacatattgtcccactcctggtaaagagggaagtagtatctgggaaaagtaggaggatcgataaaaattgaagtggttatttttgtatccactgacacagaaggagattttacagcacactatgttttgagtctcaaaaacacacgtattgcatttcactggagatctgatgggggaagggatggagaagaggaaaagagtgcatctgaaagttttagcaagaagttgcaaggactcttcaattaagtatggatgcagtgtgacagtgacttagaacttccatgttcacagatccagcgctgttaactttatactagtctaagtcttttttcttataaataattacaaaagctcattaagcaatacagactgggaactttttttttcctccaaattctagtttatttttaattgacaaatagtaattttataaatttatgggggtacaatatgatattctgatacatgtatactctgtgggatgatcaaatcaggctaattagcattatcagtcatttcaaatatttatcatttctttgtggtgagaacacttaaaatcctctcttagagattttgaaatatgcaatacattattattgcagtcagtatgctgtccaatagaacaccagaacttattcctaactgaaacttcgtatcagctgaacaatatctctcctttccctgtccacactctcacccactgccagcctttggttaccacctttttactctctgtttctatgagtttgactttttaagattccacataaaagtggggtatttgtctagccacgcctggcttatttcattttttttgagaccaagtcttgctctatcgcccaggctggagtgcagtggcgcaatcttggctcactgcaacctctgcctcctgggttcaaacgatcctcctgcttcagcctcccaagtagctgggattacaggcacccgccaccacgcctggttaatttttgtacttttagtagagacgggatttcaccatcttggccagggtagtctcgaactgctgaagtcaagtgatctgtctgcctcagcctcccaaagtgctgggatgataggtgtgagccaccatgcccaactgcttatttcacttaacataatgccctctaggttcattcatattgtcccaaatgacagagttttttaaaatgctgaatagtattccattgtgtgtgtgtgtgtgtgtgtgtatatatatatatacacatatatatgtatatatgtgtgtgtatatatatatacatatatatgtgtatatatatgtgtgtatatatatatatacacacacacacaacattaaaaaaaatccattcatttgttgatgaacacttaggttgtttccatatcttggctactgtgaataatgctgcaatgagcataggagtgcagacatctctttgacatatgatttcaattcttttgcatatacccagaggtagaatttctagatcataaggtaaatctatttttagttttcatatttttaaaacttcatactgtttttcaaaattgttttcaaaattgctgcacttaattgtaataccaccaacagtgtacaagggttccttctccacatacttgctaatacttatctttcgaaatagctgatctaacaggcatgaggtgatatcccattgtagttttaatatgcatttctctgataattagaaatgttgagcattttggtaaatgtatgtcttggccatttgtatgtcttctcctgagaaatgtctatggaaattctttgccagttttttcattgggttatttgttttcttgttattgagtagtttgagtttcttgtgtattttagatattagcctcttatccaatgtataacttaaaatactttttcccagtttatgggttgtttctttactcttttgagattttcctttattgtgcagagtttttagtttgacgcaatcccatctgtctatttttgcttttattgcctgtggttttggcattatagccaagaaatcattccccagaccaatgtcgtgaaacttttccctaggttttcttctagtagttttatagtttcaggtcctatgtttaagtctttaatccattttgagttgaatcttctataagggataaggtaatggtacattttgattattcttcatgtggatatccagttttcacaatatgatttattgaagagatgtcctttccccattgtgtgtgcttggtatctttgtcaaaaatcaattgactgtagatgtataggtttattcctgagctctctgtgctattctgttggtctatgtgtctgtttttatgccagtaccatgttgttttgattactataatttagtaatatattttgacatctgatagtgtgatgaccctggctttgacttttctttctggtcaagattgctttggctatttggggtcttttggacttcatacaaattttagaattttaaaaaatttctgtgaagaatgacattagcattttggtagggattgcaatgactctgtagattgctttgagtaatatggatgtttaaaaaatataaattcttccactccatgagcgcacaatatctttccatttatttgtataattttcaatttatttcatcaatgttttatagtttttggtatacagatcttccacttcctcggttaaattactcctaagtattttattttttttgatactaatgtaaatgggattgttttcctcgtttctttttcagttagtttatggtttgtctataggaatgctactgatttttgtaggttaattttgtatcctgcaactttactgagttagtttatgagttttattaatttttttggttaggtcttcaggattttccatctataagagcatgtcatcagcaaaaagagataattttacttctttctttccaatttggatgccttttacttcttttctcttgcctaattgctctggctaggacttcccgtactatgttgcataggagcggtgagagtggatatccttgccctgtttctgatcttagagaaaaatcttcagcgttcacaattgattgtgacattagctatgggtttggtgtgtatggcctttattgtgttgaggaacattctttctactctgaatttgttgagcgtttttatcatgaaaggatgtttaattctgtcaaacccttttctgcatctattatgatgatcatatgttttttgtccttcattctgtgggcatttttgtttattgatgttttcaattgaatgtgttttataatgtcaagtacatcaaatttagaacagaaagaaaaattttacagtatcttatgcttggatagggtacaagaaacagggcgtatgtttatcacagtttagtctccttgactttaaaattcttctgtgttgggaatatgaggtccttctttgttatgttatgttatatttaatattgagtgaaaaggaattaacacacaattgttttttaaatttttatctgtttaaaaacttcctttgtttttattctcattactttctgttttctgactttaccttaagaaaaacacagagcaatcttttccaattcatttttttcctttgtatacatttaaaagggagttttaaaagggctggatagcttggtcataaagaggagtttttctttaccattacaatccaaacacaagctgtcgtccacatggcatggaataattagagaactcaagaattttctttctcttgacatttctactacttaaacaaaataatggaaactgatttatttcttcctttatctggtgatggaaaccaccctatggaaaacctgggaatggtcagcactatgttttccactatgtggagagagttggtcagtaacaggaaatgaaactgactcatatggagaagcagagacaagagataggattactggtgattttagggttcccgaagaccatctacatatctcccattcctgttgcctgactgttgaaatttttctgattccatgaaataaaaattctcctttttggctaagctattattttgggtgggattctatagggtgcaagtggcaaaaatgtagctacaattagcttaagtaaaaagagggaattgaggagagatccttaggtaactcacagaattaaaggaagactggatcaattgagctttagcaaggcagaagcaagcactttagaagggactcagaacctagggccaagacttaggtaatgcagcagcacacttccctcacgtggcctttgctccttctttctggacactgtgctctctgtggaggaatactttgattaccttatgtgtttccaccagtactttatttaccccataaccctcatctattcattggcatttttatgtgcattgccacagaaggagacgttacagcacactgtgtttttgaatctcaaaagcgcagactaggattgaattcaggctctgaagattaagagagctatcccacgttagcgggaaaaggaaagccaaaagggaaagaaagacagctgagttggtaccactgggaaaggggccctgcacctagtagatgatactgtcactaggcaacacacagggggcatttgtgtttattgttttaaattgaatatgttttataatgtcaagtacagccaatctgtaattgaaacaaaaactttgaagtactctgtgaaattcatctctgaggactgaaccctctgggggaggagcaatagacactcccactgcaccccaccctgggtgacagagtgagaccctgtctcacaaaaaaaacaaaacaaaacacttattttagaattgttttagagctaaagaaaaattgcaaagatagtacagaaagttctcgtgtactgtacacccagtttcccctattattaacaatcttacattctttctgtcacatttctgacaaacagtaacatctgcttaaatacttccagtgactggcaacccagtgtgtcctaaagagccccattgtcagatgattctagagcagtgtgactagagatgtggttctaggaccaccaacatccacacaacctggaatctggttagaaatgaagagtctcagaccccaatccagacctgaatcagaatctacattcaataggatctccaggtaattcatgtggacatccaaatttgaaaagtattgctctagtgttcatatatatatgtatacacacacacacacacacacacacacacacacacacacgtgtatttttcccaaaagatggcaaccaaggtcttgcaatcacattgccccattcattaattcatctgtgtattcacaaaacattttttaagagcatatgtgctaagaactgatttaacttgaaactttttttagaagtaagatcttattcctacactaaaaaatttcacattccaattctgccatgcaagaggtagttgaatgaacagggtaatttttgttcagaaaagagaggactaagtttgaagagttgtccctgagagactagcaaatgcaggaaaatgccacaatctgtagaaaactatcacaacagctgagagaataacagagtagaaagagctactcccctttattccagatagagctaggggtggagagaaaacccctctgcaactcgggttagtgtattagtctgctctctaattgctgtaaagaaatacctgagactgggtaatttatagagaaaagaggttaaattgactcatggttctgcagactgtacaggaagcgtagtgacttctgcttctggggacgcctcaggaagcttccaatcatggcagaaggcaaacggggagcaagctgtttcacatggtgggagcaggaacaagagggtgaagggggagatgctacacacttttaaaccagcagatgttgtgagaactcactcattacagcgaggacagcaaagacccatgagagatttgcccccatgacccagacacctcccactcactaccacaagaacagcaccaaggggatggtgctaaactattcaatagaaactgcccccatgatccaatcacctccctccaggccccacctccaacactggggattacaactggacatgagatttgggcggggacacaaatctaaaccctatcaggtagcatggggcagtatgtaggaatagctgcgtgatgaaggtcctcagatctgaagcagcctcatggagttccaacttgcctcagcaaggtgtaggagcagtagactaattcctgagcctagcatagtcatgttgctgcgccttcacccaggtgcccagatcccagaatggtgctggagaacacttttcaatgcacttcagcagggcatcaggggccaggaaggagagtcattgatcctgaagtgacctttggcatggatccatgtagatcaacacttgaaaaacagacaggatgaggagggagatgccaaattcaacaaatgaccaaatatcagaacgtttgcttattctggccctgccttccttctgtcccgtgtcccttgcttaaaattagatgtgaactgaaggaaaagaaatgggagcctgaattcattgaggctgagtttctatcatctagtaaaacaggatctcattgaagaaattaagttcagttgcatgaaaaaattaagccacgctttctgatcatctgcttatgtgacctgaaatttaaattttgtcttctacttcagactgtgttcttatatgcggcagagaacctggctactagcagctgcagcttgcaactgcatatattcaccatctggaaggaaaaagctcttcacctccttgactcttacagcatggtgccctcatccaagctcctgtttgaaaagcttcagagaacaatcttgactggcctttttctagtcatgttctcatcctatttaccaattacagagttaggaatgtgagatactatgatggttccagcttggagctcttgctatgtggcctctgaagccagcatgctgtaactggtagctctgcctagatccatgtgcttggtgttagggaaggaacagtttctctgccaaaagggaataaatactttgatcagaggtagaggaggaggggaacaggctgataaaaacactgaactgcattatctaccttgtgtgcctatactaataaaggtttccttaatgtcacattgatatgatcaaagcaagaaactaaaattatgaacaagatactgactatgtcttttatgactcattagttcagaattagaacctgggctctggaaaaaaaataacacagccatttcattgtaaatttgtaaactttgcagcagtttaaccatgagagttggcatataggtcagggaataggcctggtgggttttgctgtcaaatcccattatactcctgcagagaataaagtgctttgtgcttcgtgaaaattggtttgtagtatgtgtgtaccaattatcaggattgtcagaaatgttggccaatttcctttcaggttcatagggacttaaatctgaaatacttctctacaaaaactttacttagctgcataattctgaaatagctttattctggccaactgcttatttataacagccttttcaggtaatattctaggagttatttctcaagatttattccctttatttttcttgatattctttcaggtgcaaggaaataaaaaataatttggcttatgtatacaatttggataattttgtagtttttcttacactgtgttgctcatttatgagaaataggcaaatagataaagaaaattcggttactgcatgaagtactgaaaaaatgtaaaaaaaattccttggggaagtcatattttagtccacgttctgttgttaattttaatcttggggttaagtaatttttgctcttggtatgagattataaacaaacaatccaattgacttgcctttcaactctgaacagtttcttgatcacagtgtaaatagctgcttgaatttcactgctgttacatagcttttcagatagtcaaggaaatatgattctgccatattcatgccagcagattccaaagggcaaggaaagatgtttcaacagatcaggagtctaaatgagttacacgttgagcaattggccagtgaagagccaccaacagtaactgggcagccccaggcctgtaggagcatctgaatggttctagttcccaggaagagcttccaaagaacacatggtcttacatagatattttcaaatagctgttttcctcccaattattttagtaaacctatgattgttgtagataaattagaaaagtaaatataaacaggaaaataaacttatgcattattccataatctgaagatgcctttgataacattttggtgtatagctcatcattttttcttatgcatatatattttaaaatccatttagattatgctgaatatataattcctataatatatgttctgtggtaatttagaataaaaatcccttcggtatgtgaatttaaaacaaattataggcatataatcattgtgaagtatctattcttcaaatcacttttttgttctttttagttatacaaatgggaaacagtaaaatttgccttttatacttgagtccaatatatattatttgagcaatttctaaatctaagatactgtcataaatactttaggaaatagcgaaacaacattaataagacataacatttgccctcagggcatttatatagggatacgcataagcaatcattagatgaatcagataatgtttcatgataaaatggaaaccaaataaatttataaacgatcatagaccttagatagcatggtcccaatctgggagattacaaggaatattttgttggatcttgacgtattggccaggatctcagccagcagatgatggtggtgggtgatggttgagggagggatgctgtggaatgaaggaataacattcaggatggcatagcatgaacaaaaccaggaagtgaaaataaatgcaaagatgctcttaagtcactgtgagttctctgctgaagcggaagaaaacactggtaaattaagttgacaatactctgagaacgaatttcagttccagacttagtttaaactttatcctgtaggcagtgcagagacacagatgcttttgagcaagtccgtaaaatggtcaaggctgtaccttaagaatatctcatggaaacttaaattcctagaaggaatgacaaaaccattttttgtgtaggtaagtgttcatataactgttctctaaacatctcatatttattttttaatataagttatagatacagttttatttttacttttgtaccccaagaataccttcttagaacttcttagaaaagcataaggatatcctgaagtattttaatgtctaaactttcttgttattagtatttgtttttctcaatttatggcttgacaatagagtgttcgtttgttctgtatgtatttgttcctcttgtctttctttcatagaatgcccctttcattcaaaaagcattaatggagcaactatatgagtagactatcgtattgtataatgagcactataaaaactgtgtgtcctggagaatttgggttaaattatctggctgggcctggagatagcactttagtaagatacattttgaatatcatgaaatttaaagaaaaaattgctagcacttaagatagtcaacttggttagttgatatcaattatcctgttaattaaggattttgaaactcagattctcctgatttgttgttcaatttcctttctaaaattttaaagtacttttcttttattgcttattagctatttggtttaactttaaattgctaaaactttttgaagaatgaaatgtattttacagttaccatttgcatttaatgtgtaaaattgattttaggctttcattaagtcaacttttatactcaaggtttagaattttccttgattacaggtggctcacacctgtaatctcagcactttgggaggctgaggcaggcggatcacaaggtcaggagattgagaccatcctggctaacatggtgaaaccctgtctctactaaaaatacaaaaaaattagccggattagcccggcgtggtggcacacacctgtaatcccagctacttgggaggctgaggcaggagaatcacttgaacccaggaggtggaggttgcagtgagccgagatcactccactgcactccagcctgggcgaaagagcgagactccgtctcaaaaaaaaacaaaccaaaccaaaccaaaccaaaaaaaactactttccattgctaaatgtgtttccggctcaagcagagatactggttgccatttactcaaataagcaagcctactaattatctgcaaatggcatgtcaagtgacccccaaaattaaacatctttatgtaaaaggttttctcttctaatgtttactttggtctcagaatccattatttaattaaacagttatattgtttatccagctaatgcaactcagtgcgtaagaaggcatttacttaaatctaagaatatacttgaatttttattgctattaattgtattggtgaattcttttgtaccatagcacctttcaagtttgaaaatgcagctcttttgctgttagatgtaagtgcctctgtacccatttcataaagactcatcacctattctgagaccttgattttgccaccccatcacccttttcccttccaaaggcaaggacaaaccagagcaattgtagcaacatgaaatcgcaaaagaaagacaaagcttcatggttctctttacaccataataaccgagcagtctcaaatctctcattaaattttagtgtttcgagtaatctcccatggtttttagatggtaatagtaatgtccttttacctctaccagtttgttccagacttctttgatattacaaatgggatacggtgtataaagctggtcaaagtcaagaaaactttggtaaatactcctgtaactatagatactggtggttcctgcagggtattggtattccagacctgaaagactcatacacaatcaatctgaaagtcagagcagagcaaatgcaccataagctgtgaagttacttagtggttctttgactgcttaactgagctggtgaaagtcagggcctgtgtatatatgtttaagtgataatctgcatcagttaattttcctgtttcagatttgccagttcaccctgaccatcttgaaaataagttatctctgatctctgtctgtatgttacttctctcccctcaccaacggagaacaaatgtgggcaaagtaagtaaagcaatcaccacctttggagggaagaattggtcatgttctatggatggtggatcaactctattgcggatactcagtaacatttttactctctaactcatcatttacacctcaaatcttttttatttaaatgctctgaagttgtagctttgaataatagtcttcgatgtggtaggggccttaatcaccatcattctagtctaactcgtctcccatcaaatcccatcctatgacattcctgatgaacataatttagcctctatttaaaaatatctatgatgaagagtgcattgtcttaccagaaagcccattccacttccaattgttgtgagagttagaaagttattcctcagttttggtttaaacctggctccctcttcattccacacattgacattagttcagtttacaggagctacatagaatagtctaccatattttcctcatgactgtctttccaatatgtgaagtgaactataattcttgccttcctcctaaatgtagttttctccaatttcatttggtatgcctattaaaatgcagagtcctgtttctccagaggtttttgttgattaggtttctggtaggcctaggatttctgtctgttttgtagtgtgatctgtgtttacatccgagtagttttatcaggctgtttcttgtctgtggaattttggaggtccaatagctttcttttgtcttgtactctatcctttaaatttcaaagtggcagtgtttccactggtttaaaattctcaagaatcttgtagttttcctgtgtatattagagaaattcactcctgaagaaaagaagcttgtttatagatttttcttagataatcttgtctctattttgggggtctgctgagaaggccgagggggtccatgagtcacctgtttaatctctttaaagagccttttgtgtgactgaatactgatttttatctttctgaggtaatagcaaaagtgttaccagccacacttctggctttttctctacaatgcacttttctggcagcgaatccttaatttttgctgataacattttaagtcatcaagtcctggccacttttggtttcaccgttctttccctaatttttatctttccttttacatcttactataagcagcgagaaaccaaaatgtgccttcaacactgcttgaaaatctcctcagctatatgcccaacttcattgtttacaaattctgctttccacataactgcaggacacaattctgccaagctttctatcactatgtaacaagtatcacccttcctccagtttccaataacacctttctcatttccacctgagtcctcactagcagccagcttttttcttttttctttttctcttttctttctttctttctttttctttctttctttctttctttctttctttctttctttctttctctctttctctgtttctttctttctctttcttctttcttctttttcttttctttttctctctctctttccttccttccttctttctttcttctttctttctctttctttctctttcttcttttcttttctttctttctctctctccttccttccttccttccttctctccttccttccatcctctgagtctctctctccttccttccttccttccttccttacttccttacttccttccttcctttccttccttccttccttccgggtctcattttgtcacccagcctggagtgcagtggtgtgatctcagcctactgcaacctccacctcccaggctcaagaaattcccccacctcagtctcccaagtagctgggactacaggtgcacaccaccacaccctgctaatttttgtattttcagtagagactgggttttgccatgttgcccatgctggtctcaaacccctgggctcaagtgatccacctgcctgagcttcctaaaatgctgggatcacaggtgtgagccactgtgcctggtctccagcagccactttcatgtccgtatttctatcaatagcctgttaataatgatttaggtattctctagggtaatatatatttttctctaccttgcttctcacttccttctgaagaagcagagttgttaacatccatatttctactaaaagtctgtttaagatagccttctaactttctaacttagcagacttttagtagaaatatggattctaacaactctacttcctcagaaggaagtgagaaggtcttgatctgtcgcccaggctagaagtacagtggtgtgatcacagctcactgcagccttgacttttgagtttgagcaatcctcacacctcagcctcccaaatagctaaaattacaggtctgccccaccaagcctggctaatttacaaaaaaaaatgttttttttgttttgttttgtttttgttttttgagatggagtctcgctctgttgcccaggctggagtgagtggcatgatctcagctcactgcaacctccacctcctgggttcatgccattctcctgcctcagcctcccaagtagctgggactacaggggcctgccaccacgcccggctaattttttgtattttaagtagagacggggtttcaccgtgttagccagaatggtctcgatctcctgacctcgtgatctgccagccttggcctcccaaagtgctgagattacaggcatgagccacagcacctggccaaaaaaatgttttttaaatatagggtcttgctatgatgcccaggctggtcttgaactcctaggccttaagtgatgctcctgccttggactcccaaagtgttgggattacaggagtgagccaccatgcctggacttaaccggtttgcccagagaatacccaccagtggcgtctgtagctgtagcatttaccccaagataactttgccaagaaatatgcttttattattattttcgcatccctctggtatattgacttcagaaacaaaagacatcactctattgatcacattctgtttttagtagtgatatttccatttacaaaatatagtaattctcaatccctgaaaatgtcaaatcctagaaaatgtggcattcctatgaatgatgttaacatcattattgaagagttgtttgccaagaccagctcggctggggagaccctaacccagcggcgctagaagaattaaagacacacacacagaaatattgcatgtggagtggaaaatcaggggtctcagccttcagagctgagaacctcgaacagagatttacccacatacttattgacagcaagccagtgataagcattgtttctatagattatagattaactaaaagcatttcttatgggaaataaagggattggctgaagtaaagggatgggttgggctagttatctgcagcatgaatatgtccttaaggcacagatcgctcatgctattgcttgtggtttaagaacgcctttaagtggtttttggccctgggtgggccaggtgttccttgctctcattccggtaaacccacaaccttcagcatgggtgtcatggctatcacaaacatgtcacagtgctgcagagattttgcttatggccagttttggggccagtttatggccagatttgggggcctgttcccaacagttgttggccaaagattcatttgattaacctgatttttccgtaacagacgattccgatgattctggtgttagctctgtttagaaataactccaagaacagtttttatattttattttcacattgaaaatcagtcagatttgcttcagcctcaaagaatgtgtctaatgaaaattaaatgagcgctggcagtgagctgcacttttctttttctaaatggaaaaagggttaaggccttttgtctgatcgaaaacccttaaaacagccatctgactcaaaggcctgacagaaccaggcccaccatgattatctaggataatctcttgcatgtacagtcaactgattatggactttaatgacatctagcgactcctggattagtgtttgattatgtaattggggactgcagcctagccatactgatacatcaaaaagactgtcacggtgtcttctatcacttattccattaaccaaagctgccacctcacataacacaataatttattttcacttgaacatttaggttttaaagggacttattctcagagacatgttaggaatcaaaatagaaatagttccatatcattggctcattgaacacaatagttcttgaattagcagttacaacttacaagttgtaaattgtttttccatgaggacttaaaagtttcatgtacattaaatataaatttcttttggctggaaatggcattggtactatttaaatagtctattgctggctgggcacggtggctcacacctgtaatcccagcactttgggaggttgaggcgggcggatcaattgacgtcaggagtttgagaccagcctggtcaacattgtgaaaccccgtctctactaaaaatacaaaaattacgtgggtgtagtggtggacacctgtaatcccagctactcggaaggcttttatatgcatttttgaatgcaaatttttaagatctgtgtggtaattagacatataatcatagttataattattattttatactgaaaaactttccaaaagacatttagggtatcatggccaaagcgagtcactgttttatttaaaactacagtcagttcaaccacaagcttttctgagtgtctattgtagtggatatatgtgcttttctttgtcaacttccccatcagtaaaagcaccctaattttattttggggttccactttctccctgccctcagtaatttggttaggttaagactcaccctcctcatatcccccattttccaggtttacttggaaaatagtttccaggtttaccattttcccatttacttgggcagtcatcatattccaactctctggccacacgactggtgcggggatgggcctgtaacccatgtaagtcaatgaataagacccagcttggtagttattaagatataggttgattgcttaaaattgtaagagtggaagagtaagaaggaaagtcaaagagaaaacagttgagccggaaagaaaacggagtcattcaaatcattattcgtaaagagtttcaagaagtggcgtatcaatattctcaacttaatagttgggcaatatttatgtttttgaaactaacaactaaaatacttggataaaatatttctcctgatttaagtaactataatttcagtcatgattcattgttcccagcaggatctgtatctgtgtaagtgggcatagtattgattttttttcaaaagagaagataggtgatctcattaatttccttttcacatcaaagctttccttttagggttttttttttttccttctctcaaaaaaaatactgaatgagtcagggtgctaatctgctttgctctagtaaattctatcttctcattgtagagatgtttttcaccgtagtaataatttgcttagctgcttggtatttactcatgtattcattcacagttctttatcaggcttcaggtatgtacccaatattgtgccaggtgaaatgagattcaaaggtgtctcctagcctagaatgtaaattctataaggaccttctcactcggagcacagtattggcacattatcagaaatctatacagatgcatttaggatgcatttctgtaacaatggtcacttgtgaggtgccatgcttgaccttcaagtattgcctgaaactcaaacacaagttgagggtttgagcctttgtacttgtttcctacagggcagttattcttcaaaatgcccaggtttaatgatacttatttttattttttattatttatttacttttttgagacggagtctcactgtcaccaaggctggagtgcagtggtgtgatctcggttcaatgcaacctctgcctcctggattcaaccgattctcttgcctcaggcccccaagtagctgagattacaggtgtgcaccaccacacccagctaatttttgtatttttaatggagatggggtttcaccatgttggtcaggctggtcttgaactcctgggctcaagtagtctgcccacttcagtctcccaaagtgctgggattacaggcatgagccaccatgcccggcgatacttatttttagtagttcacaatgaaataattaattatatttagtgccaatacaatttcaaataatgatgctggaatgacacccgataccacagtaggcaatgattttgatctctattagtttactagttatagtgggttaaatagtgacttcccaccaaaaatgcccacatcctaattcctgtaacctgtgaatgtgaccttatttggaaaaagggtctttgcagatgtaactacgttaagaatctcgagatgagaccatcctgaattatctggttggtccctaaatccaaagacaaatgtcctttacaacaaaaagaagagaagagggcacagacacagaggagaaggcaagtgaagatgaaggcagagactggagttacgtggccacaagccaaagaattcctgaagccaccagaggcaaggaaggattttctcatagagccttgggagccagtacacacctgctgacaccttgattttggaattttagtctccagagcagtgagagaatacatctctgtttgagcattaagtttgtggtaatttgttacagcagacctaggaaactaatatgttagttcgtactgattatttaattaaaggctctttttgtattgttttgttttctaaatagtctgcagaaacctacctcaatttttgtctccatccaatagagacacctgtctgtctgttgagatttggtggaaatccaagggttagtgtttctgggttatttttcgcctaccacagatagtgctgaaagcccatttagtacacaaatatgacacttctgaataaagtggcttcaacaactggtctggagatccaagtgctattcaaaaaagtgacactcgttctgagaggcgattcctatgaaggagaagctccatttgcgaagttatagcaaggttccttccataatgcacagcagctgggccagggagccgggagtcgtcgcttctggcctacccatctctgggctacttcccgcaactcactttccctgtgtgcctggaatgcttcttcctatgaggccgttagtcaaattaagtagaggcctttaaaaattagccatccatccaatctagagaatgtccactacgcttcattctttctcccttaccctgttgatttcttccatatcacccagcgctgatggtaattgtatgaatacatgcttatctgtctgtcctcccacccctaactctaaattcaaggaactctataactgcacctagcatattgtctgacactcctcaataaagacgcatttaatacatagacaaataatgagtgaacattttgagtggagggccggaaaatgtctatttactttggagttggaatcagactgttcaagagtactttcaaaaaaaattttgctacgtcaaacatcattgaatttcaggattgaaagagtggtggtcatatagctcaatcccctccaaacacccccacccaccagatgcgcgaatgccctcttcagccttcctgataagcatgacgaagatgctggcggaagcatccctggtatcaggaaactcatgacctcactagttttgatcttttccatttagctttcttttcccactcctcccagttattgcaaccttaattgtagcattttacacaactgctgctgcagagttctggaagtctgggggtgggagggacgggggaaccccagtgcctatctcaagcctgcggtcaccgacgcgggtccggggtgggggggtactgccagggaactcgcggcaccgcgtgcttgctgagttcgcctgggctctcggcctccctgcgggcaggggtcctccctccccagcgccgggtctctcctcccgcaggcccgcggccacccgcagcggcattccccgccgccgcccccgccacctgcgcgaccgccctagccgctcgagtccgctcctcccgctcaggggcggctgcggagggcgcggggcgcacgcgggcggccacccgactcttccctcccttctccccaccccagcctgctcctgctcagccccacctccccacgcactcggctgccctcctcctctcctgagagttgccccgcaccttgggcgaggagttcggagcggccccatcgcagagcccacggccagccgagcgcgcgcgacgcaggtgcccgagccccggcgccgccgccatctctgccttcggtcgagttggacccccggatcaaggtgggacctgcttccctctccgacaccccctattgccacctcttcccgctctgggtaactcgagaatggggctttgggacgcgcgtggcagacgcggagccccgcgggccgcttagggactgggagtccggggcagcttagcgggaccaccagaggggccagcgcccggcgggcggcgggggtggggtgggtgcgacgccgggcgactctcggctcccgtggggcgaggaagatctggacacacggctgacagcagccggcagcgcctggagcgaacctgctcgggaccaccgagagagcatgccacccggccaacttcttttccaggcttcgtgcctactttggaaactgaagggactgccacctaaaacagtaaaccctggggtcctgaagagaatttgctggttcgaatgacaagagaaaaaataattgttctgtagggatggtttagacctcagcttttgtttcccacctccccccttccctgcaagcaaattaaacaacaacagtagcagcatcagcagcaaaaccccaaacccaatcctaaccaaaccacttactgaaagagatttgtagtggtgagaaaaagagacccaactgaggaatcatttgggaaccgcaggtatggtgccatttaaaaactggttctttctggtgttatttctagaacttgtgtttgcaaacagattagaattctgggctcttgtcagcctaatggagttctttatactgaagggtggcctggggtgtcctctgttaacatttatttctgtaagtattaaagtatattgaaacaaataccctttcacggctctggaattggaatcagaaaatctgagttttggtgtgatttccattttattacctatgacactgtggttcgtttaacctcagtgggcctcagtttcctcattttttcaagttggagggttggattaagataatttctgagggccttttgagaatatctaaggtatgccccagaataaaaaagtataattccttaactctctttaacttgttacaaacattgctagtttcataatttcatgaaataaaaacaatctgtattaatcttggcactagtttatatgcatttatgacttaggcttttaggattttcccaccaaaaggtatagagaaaaacatgtataaagagctcagaaacatatagatttatatgaatatttacacctctcatactaccttaaataatctttaagccagtatttgcaacactgcaacaaaaatacatggctttagcatagcacgtattctctttaagtattgtacatctggaggaaataaaaatgtgtttgaaggaaaacaaacattgcacctttcctatcaattattgttcttgaacagtgctggctactttttagcataaagttgtgggcagaatgttaaaaaattggtttcaggtcacttctgagccgctgtgaaattaagcacaatagcagagatgccaattttagtaatgcagttagttgccttggaatgaatcccagaaaatagcagagattaactaaacagataaaccagaaattaggaatggacacacgcacacacaaaagtgtctacagtgagtatgtactgtgaagggttagtgtacttcatactttctttttgattagaagaaaatgtcgggttgttttagcagacagagaatgttacagtagcttttgttgctacttctaatgttttatcagtagcattttcaagattatttgaaacttagttatcactagtaaggacaggtttaagaatatttctgcctcttttcggtggcttggattcaaaataataaaacaatcttttctcacccacatgtactttgtatgcagtttgggagagtgaaatggatttgaagtactcttttatgagtacattttaacttattttcagtgactttttgcctttgggctggaaatgtcgtaagttactcaggcatttatcttccctcatattctctggtgaagtagagatagtcatctccgttgaaacagatgctcagagatgtaagtaaattgcttgttgagtgaacagggaatcgtagaactcaaatataccctggttgctaagtcatttggaaaacaactgaaactggatggatccaacagctcacggtccacagccaactcattcatggcttgggagtgtcatcatgggtggcagaggctctgttcctcctttgtaatgtggggacttactctctcagcaatttactgagaaaaaagtaatctcttcacacttagatcactattataggaacaaatggtgtgtatttgtgaagtgcaatatttctgggaggtcttggaaataaatactaaaagtatccagaaaaaaaaaaaaagaactctcttggcagatattgtactgcatttttcatactgagagccaaacacacccacttaaagagtatgtcctgtggagttaaaaatgaagaaaaaggcttatagtctgctctaattcttaagactttatgtgatttacaaattccagttttaattaaattagaaagttgcaaatgttcacctactggccacactcagtatgtacaaccttttggagttgctcttcaaatacgatctgcttatagtttggaatattccttctcaaacatgttttttggagtcttgctatgttgcccaggctgatttaatactttttgtgacttaatagtgatattacctgttatcatcacacataatcttattaatatttaaaatattttaaaactacaaatcttatataaatataaataaaatctttaaaacatttgaactgtaatgaatatagagagaagcatataaaacaaatttaatggttgacagataatatgataaatcattataataattgtaaggcaaatttctcattattcaccacccccaaaaaaagaacattgcaaatatcccaaaacttcttgtttgttccttcttcatcacaaatctaatttacctttttttaaaaaaagaaagttatttacttatttattttgagacggtgtcttgctctgtcgcccaggttggagtgcaatggctcgatcccagctcactgcaacctccgcctcccaggttcaagcgattctcctgcctcagcctcccaagtatctgggattacaggcgtgtgcctccacacctggctattttttttttttgtatttttagtagagatggggtttcaccgtgttagccaggatggtctcaatctcctgacctcatgatctgcccacttcggcctcccaaagtgctgggattacaggtgtgagccatcatgcctggcccaaaaaaagttttatatgattatggtaggcattaaatcatagattattttgcttaacattatgtttatgagattaagggatttcttctctctcctttaaaacaatattttttgaaagagttatctcggctgggcatggtgcctcacgcctgtaatcctagcattttcggaggctgagacgggtggatcacaaggtcaggagttcaagaccagcttggccaagatggtgaaatcccatctctactaaaaatataaaaaaatttatccagacctggtggcaggcgcctgtaatcccagctactccggaggctgaggcagagaattgcttgaacctgggagacggaggttgcagtgagccaagatcgcaccactgcactccagcctgggagacgagtgagactctgtctcaaaaagaaaaagaaaggaaggaagggaggaagggagggagggagggagggagggagggattgtctctattccctgtctccaattattctcttcacactgttaaaaaaaactcattcctattaatcttgttttcaatattctgctaaaactacgtcaaggtctactactgtcaagttcaccaatgatactacctttgctcatccagtagtcagttgtcagtgttcattttacttcactactggtagcattgtcacggttattactctgctccttgaaacagtcccttactgacttccaggacaccatgcattcttgattttcctccttcttcactggctgctcctttctgtctcctgtgctagcctctcctcttttcttagaggttttaaccttggaataccttaaggtttagctcttttttctccatgctttttgatgatttcatgcaatctctctatgtgtgtgtgttgatgattccgaaagtgatagctcaagccttgactgctccctctggacttcagatctttatattccagctgtctactgagcatttccatttggatgtctagtaggcatctccagttcaaattctccacatggaatcttcatctttcccaaacctgcactatctgcagtcttcctcatctccatctttcaagttagttaggccccaaaccttggagtcatcttcgattcctcctattctctcatacctcgtttgtaatgtgttggggaattctctgtgctctatcttcaaaacaaatccagaatataatgacttctcattacttccatggctctgttacaggaaaggggtcccaatccagaccccaagagagggttcttggatctcatgcaagaaagaattcagggcaattaggtagagtaaagtgaaaacaagtttatttggaaagtgaaggaataaaagaatggctactccatagagcagccccaaggtctgctggttgcccatttttatggctatttcttgatgatatgctgaacacggggtggattattcatgcctcccctttttagaccatattgggtaacttcctgacattgccatggcatttgtaaactttcatggcgctggtgggagtgtagtagtggggacaaccagacgtcactctcgtcatcatcttgattttggtgggttttggccatcttttttactgcaacctgttttatcagcaagatctttatgacctgtatcttgtcctgacctcctatctcatcctgtgacttagaatgtcttaactgtttgggaatgcagcccagtaggtctcagcctcattttacccagcccctactcaagatggagttgctctggttcagacgcctctgacagctcccaccctagtacaaggtgccatcaactctcacgtgagttattgcaaggacctccaaactggtctccctgcttttattttttgccctcttcaatacattctcaaaatagcaatcagagcactccttttataatgcatgtcggatcatgtcacttttctcctccaaactctccatggatttctggttcacacagagtaaaaaccaaagtccttaggataacctccaaggccctacctgatcattctgcttgccactttacctgtctggtctcatttcctactgttcttcctttcactttactcagttccagccacactgggctccttgctatttcttgactatattagaaaccatcttttcattttagcttttcctgccttgaatgcttgtcctccagatttccacatggttcgctttgttactgtcacttcttttaagtcttcgttcaaatgtctccttttcaatgaggcctactctgattacagtatttaaaattccatatcttcttaccttgtaatatattctttttcctttcctttcctttcctttcctcctttcctttcctttcctctcttctcctctcctctcctttgtgtctccctatagcattattttaccttataaaatactgtgtgactttctaattatcttttttttttctgtcccatttccactagaatgtgaactccacaagggcagaattttgtcctgttttgctcactgttgtgtccctagtgtgtgaaatagggcctaacatgtaagaggtgctcaatgctttttttggtgattgaatgctattgtttgttcatttttattcctggatatattcaattctataaatataacacgttaatttaaaacatgaattctgattatgcacatttagtttccttcctttcttcttccctcacccatcacttcttccttcctgccttcctcccttccttcttttttgccactataaataaagcagctatgatccatctacaagtgtgctagtatacgaagtttctttagagcgtaaaaccaatagacaaattacgggctagcaggacttgcagacttcaactttattagataatgaatgccacacatttttagtgtggattcaccaatttgcattcctgtttttattgctctacaccagatggacaaacttcgtattgccagaacatttaatttttcgccatctgatgggtattatctcattaatagttactactttaattactggtgagattaagcctggtgtctgtgaggataggttaggttatgctgcagtaacagataatcttcaaatctcatgggcttaatgcagttcttcactgatgcaaagtctcctatggactaagacaactctctggggcaacttctccatgtaataacttggaggtctaagttcagggaaactccatcattctgtaactgtaacaatctggaacatggaactttcccatttggtgtggtaggggaaaagacagcagggatggatactcgtgagccatcttcaaatgcttccatctgaaagtgacatgaattattttcaaatgctaaacgtaagtgtttaagatagtcatatggtaatatgacccagtaattctattcctaggcatatacctaagatggatgaaaatatacatccacacaaaaagttgtacagaagtgtcagtggcaacattcttcataataaccaaaaaacagaaactgcccaaatgtccatacactgatgaatggataaacaaactgaggtatatccatacaatggaatattattaggcaataaaagggaatgaagtgctgataaatgcttcaacacgatgatccttgaaaacatgatgctaacagaaggaagccagttactaaagaccccaggattttatttatatgaactgtccagaataggcaagtccataaacacagaaagcagatcagtggttgccggggatggaggaagctggtgaaaggggagcgactgctaatgaggaagaggtgcattgtggggtgatgataatattttgaaattagacagtggtgatgattgctctgttagatacattcactcaatgtactaaacctagtgaattgtatgctataaaagagtgaactttatgatatatgaataatagaccaataaaactgatattttaaaaaatactttaaaaataaagtatatttctatatgccatcaagaaacagaaaatgaaatattttagaaatgcatcatttaaaatgatttcaaaaacatgaagttcctgtgaaaaacatctaacaagatgttcagggacttttatggaaaaaattagatgagatttacatctcatattagggaagaactcagtatatggagacagatagtcatacattttaggactgaatgattaaaggatatcaatttccttttcattgttatagactcaaaacagtctcaataggatctctattaaattcctaacaatttttttagaacttgacaagctgattctaagatgtatatggaaagtcaaaacccaaagaatgctaaagcactcttgaaaaagatgcaaaatgggagaatttgtgctatcagatagcaagactcgttttaaatctgtagtaatcaagacaatgtttctttattatttctttttcccttctactttctttgattttttctgttctaactgcttaagtgaatgttcgattaaatgttttattctaacagattataaaggaatgatagcacattaattttcagcctttcttctttttgaaaagtattatttatggctttgagctgccttctacatacttctttatctgtgtgaaataaattttgagatactgttttcactaagatcagtttaaaataggttctgattttcatatttctttttgcccagttattaacttaaaagtatttttctggttaattgaaactttagtcaatttggagtaagcttcttgatttctaatgtttctttttgcattaaagcctattttgtatgatattgatataactccaccagctttcttttgttccgtatgtgcatgttaaatcttttttccatcctttgctttcagatttctacatacttattttaaatgtgtctctgtatcctatatcatttttctgtcattctgcattcaacctttctatattcttatgttttagatgtgtctgtagtaaacagcatttatttcttaaggtattttaaattcaatgtctttccactggagaattttgtcagtttacatttaatacaattactgatatattgaggcttgtatttactttctgctttctttatttgcccataattctggttattttcttttttattgccacattttaggttgattatttttatcacttcaaattttctttcattactttaagagttatacactctatttctattgttcagtaactactgtggaagttaccatatgaatccttaagttatcgaagttgaaaatgaatacactttgagcactaatgagtacaggaaaatacagaggccttagcttactttaacttcatttaatactctcttgccatatattgtgagcatcttgaattccatttatttattcaaatatttattgagagcttactcggggctaagcattattctagatactgaacaaaatagatgagcatccctgtgcttgtaagacataacagagtgcaaacaataaacttaatagagtaaattataccatatactagaaggtagtaagtatatggaaaaaaaactagagcaaggcgaaagagattaggagtgccgagagagggagaaagagaatgaatgagagtgagtgcacataagtacaagtgaaagtgagtgagtgtgccctagctttggaccaatactgtctataaagtttgtggggacatataaatgttttatctattttcactagataacagctgaaaggtttgagccaaatagagagtctcaggtgcttctataatggtattataataggctttaaaaacgtgaaaaactcatgtttaagaacagctgttaccaactatctgttttgtgagggtggaggacaacttagtttttctcagaattaattatactttcttattgtaactttagccgctgttatttgggtctctaaacctatacaaattaagaagctatgaacatgagagaatcaaacaattagatttctgtgcacaccaacagaatttctgaaccaaagtggtttgtgtttaggagatgaaagagatgataaatcatacacacacacatagataaacacacatattatatgcatgtgtgtgcatgtgtgtgtgtgtataaacacagagagaaaacatactggcatacacataagcacctgttaattgtagttgctgttatagtagtaagatgttatctcttagaattatggtatacttatcatattagacctatccaggaggtagctgggtatctagtgtggtgatactatctagtgtggtgtcttgcaacaacactgctagtcataggtctgatttgggggagaaaatatttttttaagacagtgtctcgctctatcacccaggctgaagtgcagtggcatgatcatagctcattgcagcctcagtctctgggttcaagctaccctcctgcctcagtgtccccactgcatgctaccacacctggctaattttttcaaatttttagtagggacgaagtcttgctatgttacacagggtggtctcaaactcctgaactcaagtgatcctcccgctttggcctcccaaagcgcagggattacaggtgtggaccatcgtgccaggctgggagaaaagttttgttgacacaacaaacaggatgcaaagaaacaatctataaaaacagtaatttaggtaagtggcttcttggtcttttgattaataggattctaaacttgcaaatcaattcttatgcaggagttcttattggcatttaccgatgctctttggctgatgtttgtttttactgaccagaggttctgtgggaatctcatttattaatacttacaatgtgcttcatattcctctgcatctttgagggacaattaaatgtccactctatggaatcttttataatttcccaatcataagtaattactctgatttctcctaattacccttttttctaggtagttgtgattctttaagtctaagacagcatggatttttaagctacaccactgatatagtttggataatagtcccctccaaatctcatgttgaaacttgattcccagtgttagaggtgagtcctgaagtgggaggtgtttaggtcatggagcagatccccaaagagtggcttggtgacatcatcacagtaatgagcatgttcttactctattagttcctgtgagcactgatttttaaaaagagcttggcttgtccctcctctctcttgcttccatgctgtcactatgtgatctctgcatgctggcttcctttcccctctcctttgcctgcactatgagtggaagcaactcgaggccctcaccagatgcagtacaggtgccggtgccatgcttcttgtatcgcctgtggaaccatgagccaagaaaccttttttcttcataaattacccagtctcaggttttcctttgttacaacatgaatgaattaagataaccatcatttttgtatcagtaaaaagaaaaagctctgcgtatttaactattatacagtattttttatcatttaaaaatttatacttattcagatagctcactaagaattatatatataaacatttttatttaaatcatgccattctcataaggaaagtataaatcaaagatttcggttaagggattcttattcatattcaaagtctgtttttttcaagttgcttttcatctcagaactgttgatgtaaatattttcccaaacagtatcatactctgggctatcaagaatatttgtgatacagcaattcaaaaaagaatgcctcactattgtttctgggattttcttccaagctggttcattttgctaattttgatgcggcttttaactgatcttgtaagatgtcaatatcgggttttttggagttcatattctttcctcaaatggtctttaaatagtttgttgaccaaaatattgataggttaaaattgtccagttggtcattaagaaagtgtccagttttgatgtatgcaatcaataacaaccagatcacagctgctaccaggccatcgggaattgtaagatgctataaatttaaacaatgatgctgatgccagaggtgttaaaatgttgtgaatcttaaaacagaagacatacaatactactctcttcctttgtatttcctgtagttcaactaaaaatctcacctttcgttggcccctaggactttgtgagtagctattttctctgaaatcccatagtactttatttaatgaaaggaactaagtaataatttggggtgaaaataatccatgtacatggttaaaaaaaacttacttatgtataaaccagtagccctctgctctactacctacactaaagggtataacctgaccctaggaacaactagtttgaaccatttctggttttagtccttcttcctctagggctaaattgtatgtttatactgtctgcttttctttttttttcatttatcatttaagcagataccatagtagaagataatttagcctactcatttcacctccttttcttttttgctcctccacatatattaattttatgagctcctttattggttacatttgtcatttccaccacgatatttgttccattaactacagacagtttctcttgaacccctgcttcatgagtttgggatatttcaccctttctcctctcaccatctctccttgtatattataacacctaaatctgacaactgtgtggtgagagtattgataatattttaggtttagtatttgttattaaattttgtatttttgtctattggttgaccctaaaagttgaaaaattaataaatagcattaaagttattatgaccctgtaaatgttgtttactgcagaatcaagaagtattctacagttacatttcattcagtatggctcctgagccacccaaagaatgttcctagaatcaaagttaaggagattctttctttcaaatggattatttaattctagcatttgctaaaaatttgccatattttcttttcattcatatttacattgtgaatttctgtgacgctttttcaaattacctttattttttcttattgggaaagcatatgtgggccttcctggtttcatccttaataattttcagctttttacttcctttatttttttgaatgcattttcttccttttttttttgaagtccactgactcatattctagtggcttcaattttgaattatgacttcctttttccctggtgtttattctgtttttattttattttcaagtttttttctggcttcaggattatattatgtgtcaggttgccttccatctccaccttcctccttgccatctccttttgggggccatctatactacagctgctatctggactagtcatttgaaagtttgcagagccagcaaacttgtttgtaaccacgatttcctgaatgtgtatgtttttgtcgtttttggttttctcctcattttgctggaatactttataaaattacttctggcaaataaatttatactatataaattttgtaagccattacattactaaaagtatatttgtttctctcggatacttctttgactggatgtaaaattctaaactgaaaagaattttctataagtcagttgctggattattttctagtattcggtgttttgggatgaaacatttgttttccattctctttcttactcctttagtgatttttttcttctctggaatcttttcttatattctttttttctttgttgtttggtaatttcttaattatatgtttaggaatgaatctgtttccattcttctttcttggagcctggtagccatatttttcactttgaacacttgtgccttttatctctgggaaatgtgccttttatctcttgtgccttttatctctggaaacacttgtgccttttatcgctgggaaattttcttgtattttttttgtgtgattattttctcctttctattctttttttctggaagtactgttggttggatttgggtctcttggatttatttttaagtgacttctttttcttaaacatttatttcctggttttttttttttgcctttggggggaaatgttaattatgcattttttttaaaaccattgaaattttttttttgtactatgcatgtaattttcaaaagctctttcttgctctcattattcctttgttattttatggatccaaaactttctgaaatgtctctgccaatactcattaaagatttgttaaagcttttttttttttctttaatttatccctgtgtccctggtggttagtttcctttttactttctttttataaaagaaaaatttaacacaatgctaaagactttcttcatgtctttgtgtctccattcagcatggctgttaaatgaagaaacaggaagaatgtgacttctgtgcatatgggcagtgttttatcaactgataggcttcatgttaggcactcaatcaaagagctgccatttatgctaaaggcctgttgcctaaatgtcagggctttaccataccggtgccaagtttacatgaaaagctcaagttctcaaacaacttgtactttttcctcctttaacacataggagtgtatactataatttttaaattgtctttggccatttgacacctttgaatactttgctcgtgtttgaggaatttccacttaataagcccctgttttcccaagcttcctggcagtctgcctgtagagtgtgaagtaggctccatcagttagaggcatttgtgccagattttagatcagaagtgtgggacatgaaagggcagatgagctccccggagctcagaggtagtaggcattgaggtttcagtcataacatgcagtatcctggtatggtgcagggctgtcttctctagagcaattctgcatgggattttgggtgtggtcttggctgtgtgcttttctagcttggttctctggcactcactgaggttcggagagctacccagtaaactttaataaatttctttcctgcttagactagtcaaagttcatttcagttgtttgttagtcactctcctgacagttacatggagctagtttagctgctgtgcaatgtttgtgaggaggtgaattacatacgcagatattacatgtgcagaccaaaatggcctctccttttagccccacctcaccctcctgcccttatcatttagaacatctgcaggtttgttttctcattgttgacagcctattctccaaatatcctatgtagttactacctttgttatacctcattagtctttgctaattgatatggtttggatatttgtcccctccaaatctcacgttgaaatgtaatctccagtgttggtggtggggcctggtgggagatatttgggtcatggggtgggtccctcacgaatggcttggtgccctccctgtggtaatgagtgagttcttgctctgagttcatgcaagatctggttgttaaaggagcctggcatcttcttccaccctctcttgctcccccttgccatgtgatgcacctgctccccattcactttccaccatgactgtaagcttcttgaggccctcaccagaagcagatgctggcctcatgcttcctttatagtctacaggaccatgaaccaaaataaaacacttttctttataaattacccagtctcagatattcctttttaacaatgcaagaatggactaacacactaatgttttagaaatttgtttttctcttttgctgctgatcgctctctcattcactcttgtagtgggttgatattatttactttactataattttcaaggtatctcaggagggaaagatcagtttgttcagtttaccatttttttttgagacagcatctcactctgtcacccaggctagagtacaatggtgcaattttggctcactgtaatctctgcctttcaggctcaagcgattctcatgcctcagcctcttgagtagctgggattacaggcatacgccaccatgcatggctaatttttatatttttagtagagatggggtttttccaggctggtctcgaactcctggcctcaagtgatccgcctgccttggggttccagagtgctgggattacaagcatgagccaccgtgcctagtcccagtttaccatcttgaacctgaagtcccactggtattatcgtgctttgacatgtaaaaaaattaataaaatgttatttcttaaagtaaataaattttaattattttctacatttctagcatcacatgtggtagcttgcattttattgaatatctggttaatatttaaatgagtcaatttatgtagagcttttagattacaccgtaggtaagatgcctactctgactcaactttgttgactttatggtacccacatctgtgaatcatagcttatccttatgcattttttaggaattaatatgtgacaagttcacacagagtaatatcaggaattaaagtacttgaaattatgttttccaagtgacaaatatttatgccaggatgttggaaggttttttttttaattaaaaaataatttaagtctttaacagctacttgatgggaataacatgaccaatttatattccaagtgaataaataaaagttaacatacttaaaatgacaaggctactggaaatagatcaggctatatttattttgttaaatttttgatacttgaagaaatagtgtttttcagttgcatttaaattaaatgtttaaatgcttatttaagtgagagatagatagatgcttctctaacaaaaagtaaaagcaaaaattagtggcatttggagctcattgagttaactcatcaaagcaacattattgtcagaattgcttttcttactcataaactttcctacacactcagagattttttgagatcaatggagcaagttgtaaataattttatttctgctcaaacactgattgagactgttctgttttatatttaagtagaatttgataggtaaaaataacacaaataatcctttacaatagaaattaaacagtctgatcttcctttgaaagcccaaattatgcttattcagtagaatatagatttggattttttcttcatagtaataactgaagagtaagcatgattaatatgcttactgtgctgggcatattatgcaaattaaattactgcttgcatacccatacatcatggatgtatcatttagatcagactgtggatttgtctttgtatactttatacagatttcttcaaatatttgtatatttcaacataggcttttttttcttttcatttctttctaaattcctaagggctgtttttctttttaaacgtgagaataaatatctacattaattatttattatatactttaattgattcaacaactatttatgagtacttacgatgttccagagaatatattaaaatacttgtttttcagaagtctaatatggatgagaaacattgtgcctattctttttttttttttaaattgtactttaagttctgtgatacatgtgcagaatgtgcaggtttgttacataggtatacacatgccacggtggtttgctgcacccatcaacccgtcacctacattagatatttctcctggtgctatccctcccctagccagccaccccccgacaggccctggtgtgtgatgtttcctctccctgtgtccatgtgttctcattgttcaactcccacttgtgagtgagaacatgcagtgtttggttttctgttcctgtgttagtttgctgagaatgatggtttccagcttcattcatgtccctgcaaaggatatgaactcatccttttttatggctgcatagtattccatggtgtatatgtgccacattttctttatccagtctatcattgatggccatttgggttggttccaagtctttgctgttgtgaatagtgctgcaataaacatgtgtgcatgtgtctttatagtagaatgatttataatcctttgggtatatacccagtaatgggattgctgggtcaaatggtatttctggttctagatccctgaagaattgtcatactgtcttccacaatggttgaactaatttacactcccaccaacagtgtaaaagcgttcctatttctccgcatcctctccagcatcttttgtttcctgaatttttaatgatcgccattctaactgacatcagatggtatctcattgttgttttgatttgcatttctcaaatgaccagtgatgatgagcttttttttcatatgtttgttggacacataaatgtcttcttctgagtagtgtctgttcatatcctttgcccaccttttgatggggttgtttgtttttttcttataaatttgtttaagttctttgtagattctggatattagccctttgtcagatggttagattgcaaaaattttctcctattccgtaggttgcctgttcactgtgatgatagtttcttttgctgtgcagaagctgagctgtttagtttaattatatcccatttgtcaattttggcttttgttgccattgcttttgatgttttagtcatgaagactttgctcatgcctatgccctgaatggtgttgcctaggttttcttctagggcttttatgggtttaggtcttacatttaagtctttaatccatcttgagttaatttttgtataagttgtaaagaaggggtccagtctcagttttctgcatatggctagccagctttcccaacaccatttattaaatagggaatcctttccccattgcttgtttttgtcaggattgtcaaagatcagatggttgtagatgtgtggcattatttctgaggcctcttttggttccattggcctatatatctgttttggtacagtaccatgctgtcttggttactgtagccttgtagtatagtttgaagtcagttagtgtgatgcctccagttttgttctttttgcttaggattgtcttggctgtgcaggctctcttttggttccatatgaaatttaaagtagtttttaaaattctttaaagaaagtcaatggtggcttgatggggatagcactgaatctataaattactttgggcagtatagctgttttcacaatattgattcttcctatccatgtgcatggaatgtttttccatttgtttgtgtcctctcttatttccttgagaagtggtttgtagttttccttgaagaggtcattaggtattttattctctttgtagcaattgtgaatgggagttcactcatgatttggtgctctgtttgcctattattggtgtataggaatgcttgtgattttcacacattgattttgtatcctgagactttgctgaagttgcttatcagcttaaggagattttgggctgagacgatggggttttctaaatacacaatcatgtcctctgcaaacagagacaatttgatttcctctcttcctatttgaatacccttaatttctttctcttgcctgatttccctggctagaacttccaatactatgttgaacaggagtggtgagagagggcattcttgtcttgtgccagttttcaaagggaatgcttccagcttttgcccattcagtatgatattggctatgggtcataaatagctcttattatttttagatatgttccatcaatacctagtttattgagcgtttttagcatgaagcagtgttgaatattatcgaaggccttttctgcatctattgagacaatcatgcggttttttttttgcatataaatataatagaatattattcagccttaaaacggggtgaaattttgatacgtggtacaacattgataaactttattttattttattttatttattattattattatactttaagttttagggtacatgtgcacaatgtgcaggttagttacatatgtatacatgtgccatgctggtgtgctgcacccattaactcgtcatttagcattaggtatatctcctaatgctatccctccccactccccccaccccacaacagtccccagagtgtgatgttccccttcctgtgtccatgtgttctcattgttcaattcccacctatgagtgagaatatgcggtgtttggttttttgttcttgcgatagtttactgagaatgatgatttccagtttcatccagtgcctacaaaggacatgaactcatcattttttatggctgcatagtattcccatggtgtatatgtgccannnnnnnnnnnnnnnnnnnnnnnnnnnnnnnnnnnnnnnnnnnnnnnnnnnnnnnnnnnnnnnnnnnnnnnnnnnnnnnnnnnnnnnnnnnnnnnnnnnnnnnnnnnnnnnnnnnnnnnnnnnnnnnnnnnnnnnnnnnnnnnnnnnnnnnnnnnnnnnnnnnnnnnnnnnnnnnnnnnnnnnnnnnnnnnnnnnnnnnnnnnnnnnnnnnnnnnnnnnnnnnnnnnnnnnnnnnnnnnnnnnnnnnnnnnnnnnnnnnnnnnnnnnnnnnnnnnnnnnnnnnnnnnnnnnnnnnnnnnnnnnnnnnnnnnnnnnnnnnnnnnnnnnnnnnnnnnnnnnnnnnnnnnnnnnnnnnnnnnnnnnnnnnnnnnnnnnnnnnnnnnnnnnnnnnnnnnnnnnnnnnnnnnnnnnnnnnnnnnnnnnnnnnnnnnnnnnnnnnnnnnnnnnnnnnnnnnnnnnnnnnnnnnnnnnnnnnnnnnnnnnnnnnnnnnnnnnnnnnnnnnnnnnnnnnnnnnnnnnnnnnnnnnnnnnnnnnnnnnnnnnnnnnnnnnnnnnnnnnnnnnnnnnnnnnnnnnnnnnnnnnnnnnnnnnnnnnnnnnnnnnnnnnnnnnnnnnnnnnnnnnnnnnnnnnnnnnnnnnnnnnnnnnnnnnnnnnnnnnnnnnnnnnnnnnnnnnnnnnnnnnnnnnnnnnnnnnnnnnnnnnnnnnnnnnnnnnnnnnnnnnnnnnnnnnnnnnnnnnnnnnnnnnnnnnnnnnnnnnnnnnnnnnnnnnnnnnnnnnnnnnnnnnnnnnnnnnnnnnnnnnnnnnnnnnnnnnnnnnnnnnnnnnnnnnnnnnnnnnnnnnnnnnnnnnnnnnnnnnnnnnnnnnnnnnnnnnnnnnnnnnnnnnnnnnnnnnnnnnnnnnnnnnnnnnnnnnnnnnnnnnnnnnnnnnnnnnnnnnnnnnnnnnnnnnnnnnnnnnnnnnnnnnnnnnnnnnnnnnnnnnnnnnnnnnnnnnnnnnnnnnnnnnnnnnnnnnnnnnnnnnnnnnnnnnnnnnnnnnnnnnnnnnnnnnnnnnnnnnnnnnnnnnnnnnnnnnnnnnnnnnnnnnnnnnnnnnnnnnnnnnnnnnnnnnnnnnnnnnnnnnnnnnnnnnnnnnnnnnnnnnnnnnnnnnnnnnnnnnnnnnnnnnnnnnnnnnnnnnnnnnnnnnnnnnnnnnnnnnnnnnnnnnnnnnnnnnnnnnnnnnnnnnnnnnnnnnnnnnnnnnnnnnnnnnnnnnnnnnnnnnnnnnnnnnnnnnnnnnnnnnnnnnnnnnnnnnnnnnnnnnnnnnnnnnnnnnnnnnnnnnnnnnnnnnnnnnnnnnnnnnnnnnnnnnnnnnnnnnnnnnnnnnnnnnnnnnnnnnnnnnnnnnnnnnnnnnnnnnnnnnnnnnnnnnnnnnnnnnnnnnnnnnnnnnnnnnnnnnnnnnnnnnnnnnnnnnnnnnnnnnnnnnnnnnnnnnnnnnnnnnnnnnnnnnnnnnnnnnnnnnnnnnnnnnnnnnnnnnnnnnnnnnnnnnnnnnnnnnnnnnnnnnnnnnnnnnnnnnnnnnnnnnnnnnnnnnnnnnnnnnnnnnnnnnnnnnnnnnnnnnnnnnnnnnnnnnnnnnnnnnnnnnnnnnnnnnnnnnnnnnnnnnnnnnnnnnnnnnnnnnnnnnnnnnnnnnnnnnnnnnnnnnnnnnnnnnnnnnnnnnnnnnnnnnnnnnnnnnnnnnnnnnnnnnnnnnnnnnnnnnnnnnnnnnnnnnnnnnnnnnnnnnnnnnnnnnnnnnnnnnnnnnnnnnnnnnnnnnnnnnnnnnnnnnnnnnnnnnnnnnnnnnnnnnnnnnnnnnnnnnnnnnnnnnnnnnnnnnnnnnnnnnnnnnnnnnnnnnnnnnnnnnnnnnnnnnnnnnnnnnnnnnnnnnnnnnnnnnnnnnnnnnnnnnnnnnnnnnnnnnnnnnnnnnnnnnnnnnnnnnnnnnnnnnnnnnnnnnnnnnnnnnnnnnnnnnnnnnnnnnnnnnnnnnnnnnnnnnnnnnnnnnnnnnnnnnnnnnnnnnnnnnnnnnnnnnnnnnnnnnnnnnnnnnnnnnnnnnnnnnnnnnnnnnnnnnnnnnnnnnnnnnnnnnnnnnnnnnnnnnnnnnnnnnnnnnnnnnnnnnnnnnnnnnnnnnnnnnnnnnnnnnnnnnnnnnnnnnnnnnnnnnnnnnnnnnnnnnnnnnnnnnnnnnnnnnnnnnnnnnnnnnnnnnnnnnnnnnnnnnnnnnnnnnnnnnnnnnnnnnnnnnnnnnnnnnnnnnnnnnnnnnnnnnnnnnnnnnnnnnnnnnnnnnnnnnnnnnnnnnnnnnnnnnnnnnnnnnnnnnnnnnnnnnnnnnnnnnnnnnnnnnnnnnnnnnnnnnnnnnnnnnnnnnnnnnnnnnnnnnnnnnnnnnnnnnnnnnnnnnnnnnnnnnnnnnnnnnnnnnnnnnnnnnnnnnnnnnnnnnnnnnnnnnnnnnnnnnnnnnnnnnnnnnnnnnnnnnnnnnnnnnnnnnnnnnnnnnnnnnnnnnnnnnnnnnnnnnnnnnnnnnnnnnnnnnnnnnnnnnnnnnnnnnnnnnnnnnnnnnnnnnnnnnnnnnnnnnnnnnnnnnnnnnnnnnnnnnnnnnnnnnnnnnnnnnnnnnnnnnnnnnnnnnnnnnnnnnnnnnnnnnnnnnnnnnnnnnnnnnnnnnnnnnnnnnnnnnnnnnnnnnnnnnnnnnnnnnnnnnnnnnnnnnnnnnnnnnnnnnnnnnnnnnnnnnnnnnnnnnnnnnnnnnnnnnnnnnnnnnnnnnnnnnnnnnnnnnnnnnnnnnnnnnnnnnnnnnnnnnnnnnnnnnnnnnnnnnnnnnnnnnnnnnnnnnnnnnnnnnnnnnnnnnnnnnnnnnnnnnnnnnnnnnnnnnnnnnnnnnnnnnnnnnnnnnnnnnnnnnnnnnnnnnnnnnnnnnnnnnnnnnnnnnnnnnnnnnnnnnnnnnnnnnnnnnnnnnnnnnnnnnnnnnnnnnnnnnnnnnnnnnnnnnnnnnnnnnnnnnnnnnnnnnnnnnnnnnnnnnnnnnnnnnnnnnnnnnnnnnnnnnnnnnnnnnnnnnnnnnnnnnnnnnnnnnnnnnnnnnnnnnnnnnnnnnnnnnnnnnnnnnnnnnnnnnnnnnnnnnnnnnnnnnnnnnnnnnnnnnnnnnnnnnnnnnnnnnnnnnnnnnnnnnnnnnnnnnnnnnnnnnnnnnnnnnnnnnnnnnnnnnnnnnnnnnnnnnnnnnnnnnnnnnnnnnnnnnnnnnnnnnnnnnnnnnnnnnnnnnnnnnnnnnnnnnnnnnnnnnnnnnnnnnnnnnnnnnnnnnnnnnnnnnnnnnnnnnnnnnnnnnnnnnnnnnnnnnnnnnnnnnnnnnnnnnnnnnnnnnnnnnnnnnnnnnnnnnnnnnnnnnnnnnnnnnnnnnnnnnnnnnnnnnnnnnnnnnnnnnnnnnnnnnnnnnnnnnnnnnnnnnnnnnnnnnnnnnnnnnnnnnnnnnnnnnnnnnnnnnnnnnnnnnnnnnnnnnnnnnnnnnnnnnnnnnnnnnnnnnnnnnnnnnnnnnnnnnnnnnnnnnnnnnnnnnnnnnnnnnnnnnnnnnnnnnnnnnnnnnnnnnnnnnnnnnnnnnnnnnnnnnnnnnnnnnnnnnnnnnnnnnnnnnnnnnnnnnnnnnnnnnnnnnnnnnnnnnnnnnnnnnnnnnnnnnnnnnnnnnnnnnnnnnnnnnnnnnnnnnnnnnnnnnnnnnnnnnnnnnnnnnnnnnnnnnnnnnnnnnnnnnnnnnnnnnnnnnnnnnnnnnnnnnnnnnnnnnnnnnnnnnnnnnnnnnnnnnnnnnnnnnnnnnnnnnnnnnnnnnnnnnnnnnnnnnnnnnnnnnnnnnnnnnnnnnnnnnnnnnnnnnnnnnnnnnnnnnnnnnnnnnnnnnnnnnnnnnnnnnnnnnnnnnnnnnnnnnnnnnnnnnnnnnnnnnnnnnnnnnnnnnnnnnnnnnnnnnnnnnnnnnnnnnnnnnnnnnnnnnnnnnnnnnnnnnnnnnnnnnnnnnnnnnnnnnnnnnnnnnnnnnnnnnnnnnnnnnnnnnnnnnnnnnnnnnnnnnnnnnnnnnnnnnnnnnnnnnnnnnnnnnnnnnnnnnnnnnnnnnnnnnnnnnnnnnnnnnnnnnnnnnnnnnnnnnnnnnnnnnnnnnnnnnnnnnnnnnnnnnnnnnnnnnnnnnnnnnnnnnnnnnnnnnnnnnnnnnnnnnnnnnnnnnnnnnnnnnnnnnnnnnnnnnnnnnnnnnnnnnnnnnnnnnnnnnnnnnnnnnnnnnnnnnnnnnnnnnnnnnnnnnnnnnnnnnnnnnnnnnnnnnnnnnnnnnnnnnnnnnnnnnnnnnnnnnnnnnnnnnnnnnnnnnnnnnnnnnnnnnnnnnnnnnnnnnnnnnnnnnnnnnnnnnnnnnnnnnnnnnnnnnnnnnnnnnnnnnnnnnnnnnnnnnnnnnnnnnnnnnnnnnnnnnnnnnnnnnnnnnnnnnnnnnnnnnnnnnnnnnnnnnnnnnnnnnnnnnnnnnnnnnnnnnnnnnnnnnnnnnnnnnnnnnnnnnnnnnnnnnnnnnnnnnnnnnnnnnnnnnnnnnnnnnnnnnnnnnnnnnnnnnnnnnnnnnnnnnnnnnnnnnnnnnnnnnnnnnnnnnnnnnnnnnnnnnnnnnnnnnnnnnnnnnnnnnnnnnnnnnnnnnnnnnnnnnnnnnnnnnnnnnnnnnnnnnnnnnnnnnnnnnnnnnnnnnnnnnnnnnnnnnnnnnnnnnnnnnnnnnnnnnnnnnnnnnnnnnnnnnnnnnnnnnnnnnnnnnnnnnnnnnnnnnnnnnnnnnnnnnnnnnnnnnnnnnnnnnnnnnnnnnnnnnnnnnnnnnnnnnnnnnnnnnnnnnnnnnnnnnnnnnnnnnnnnnnnnnnnnnnnnnnnnnnnnnnnnnnnnnnnnnnnnnnnnnnnnnnnnnnnnnnnnnnnnnnnnnnnnnnnnnnnnnnnnnnnnnnnnnnnnnnnnnnnnnnnnnnnnnnnnnnnnnnnnnnnnnnnnnnnnnnnnnnnnnnnnnnnnnnnnnnnnnnnnnnnnnnnnnnnnnnnnnnnnnnnnnnnnnnnnnnnnnnnnnnnnnnnnnnnnnnnnnnnnnnnnnnnnnnnnnnnnnnnnnnnnnnnnnnnnnnnnnnnnnnnnnnnnnnnnnnnnnnnnnnnnnnnnnnnnnnnnnnnnnnnnnnnnnnnnnnnnnnnnnnnnnnnnnnnnnnnnnnnnnnnnnnnnnnnnnnnnnnnnnnnnnnnnnnnnnnnnnnnnnnnnnnnnnnnnnnnnnnnnnnnnnnnnnnnnnnnnnnnnnnnnnnnnnnnnnnnnnnnnnnnnagctgtggtgggctccacccagttggagcttcccgctgctttgtttacctgatcaagcctgggcaatggtgggcgcccctcccccagcctcgctgccgccttgcagtttgatctcagactgctgtgctagcaatcagcgagattccgtgggcgtaggaccctcccgagccaggtgtgggatataatctcgtggtgcgccgttttttaagtcagtcagaaaagcgcagtattcgggtgggagtgacccgattttccaggtgcgtccgtcacccctttctttgactcggaaagggaactccctgaccccttgcgcttcccaggtgaggcaatgcctcgccctgcttcggctcgcacacggtgcgtgcacccactggcctgcgcccactgtctggcactccctagtgagatgaacccggtacctcagatggaaatgcagaaatcacccgtcttctgcgttgctcatgctgggagctgtagaccggagctgttcctattcggccatcttggctcctccgtgaatccgtttcttaatgttttacactattctttgtggtaaagtgtggtttccattttaaattacatctctcagaataataggcagctctgaaaggggttgtagagaccatctaacagtctgatttgtagatgaggaacctgaggtctagagtgttgaaaacccaagtcccacagctgattaccggaagagcttagcctggcacccaacactcctgatgcctaattcaggtaggttttcatccaaagtccaagccacatatattaaaattatactactatttggatttatgacatagtagtacaaataatcatatttgtgatactccaacttgagtagaactcataggaaatcttgtctctgaagtcggacttcatgtgggtatattaagccaccagacttttaattattctaactctccaatattacctcatctgcaaataaacaataggtttccaaaggtctactggtaaaatttctcctctttattggaaataaataggcagttgttacctatgcaataattatttggccttacaatatcatagtaaagataaagactttagaaaacagggaaattttaagacctgagcatgaaagaaattgaagacggtgatattaatgatgttaaattagctgttacatattttatcaacattgtgagcacttgcatttagttaaaatttcagtcttatcccgtgatacctgtcctggtttgttatggcataaaggaacattcagtttaaattttttcgacttgtatttttaatgatgtaagataggatgcgtacaggaataaatctatagcctaattttacgtgagatatttctcagatattgatctagagtatcacatgtaaatttagagacttatctataatccctttccttttatgttttccacagacaacttatatatatgtgtttttgtttttgtgtgtgttctgattttagatttaccttttccaggtgtacttctctgaagtaagatgatttgtcaaaaattctgtgtggttttgttacattggggtaagttatttgctcatttgctgttttaatgcccttaaacatggtagagattttgcctttagagatgctgttttatttattagctaacagaatttcctatttctagttaggaattctcatacatgcttatgattaaaaatgcaaaccatagtataggtgtatcagtgtgaaaacgaaaacccttcccaacctcctaaagacaacctgatggtgtatccttccagaatcctctctctctctcacacacacacacacacagactcacacacacagactcacacacacacatacacagacacactcatatctatagctgcaaaaatagcactggtctgtacatgttgttctggatgtttatttttccatttaacaggtttccaatttatcatgatggctttttacctttatcagtatttaccgggatacttattagtttaatggttgcatgacaatgcactgtatgaatatatataaaattattagtctatttgaccaattcctgattgatagacatttctttttctgtaacaaataatactgcattgaaacttcatgtgtctttgtatatttggaaaaatatttctgtagattaattctttttttttttttttttttttgagacgcagtcttgctctgccgccagactggagtgcagtggcatgatctcagcccactgcaacctctgcctcctggattcaagcaattctcctgcctcagcctctcgagtagctgggactacaggcacgcgccaccatgcccagataatttttgtatttttagtagagacggggtttcactgcgttggccagatggtctcaatctcttgacctcgtgatctgcccgcctcggcctcccaaagtgctgggattacaggcgtgagccaccgtgcccagccgatacattgccaataacttttgagcatactgttctcacgtgtttcttaccacattctggtgacattctgatttccttaaaccaaatcatctaagttagattgtgttccaagtttttgaaattaaagttagagtatctttaacaaaacttatgtgatttggcaattgtttatctagctttctttaacaaaacttatgttgtggcaactttatctggcagctgttacctgtgtgtcaactgattctgagcatctccttggctaccccaatctaaaggggctcttctaagcttccctataggtcttccttgtggtacatacttctctttcattgcagccatctgtatatttccagaaaataacctagatagctccaccattacagatttccaaaaaattatgccacaagggactatcaaagagaaataactcattctctttttatattctctaattttattagatatatttaagggaactgttcattctcttttataattctctattaattttcgttagactctagtgttttacattgactttctggaaggtttctggtttgatcaagtttttgaatcaaaagaattcctgggatattgttacctgataagatatgccttcagatgaaaattctagaccatctttagagtttaggattcatttggagggaaagaaatatcatttgcaaagttgcatgtggataaaatagactcatcttttaatttaactgcatcaatagttgctatgtttttaaagttcatcattacattttacatttaaatacttctgtgaggattttaggctaattcatttcaagcaactgaatcctctatgtagacctagaatatataatgctgtaaattagtaatattacatattcttggttttgtaaacctcctccctcaaaaaactattctgttttctttgaggtgttctgattttagaaacatgttagaaggagtgaagtccaaaggaacataattgtaatatggatttacttttggtaatgttgtgatacctaattgttatcagtatggccatagtcacatttgtcacattaatcactttggcctcaatttttgcatctatacctatttatattaatttatatctatagaaatctttagaaaccaaactattaacagtcattacctatgtattgtttgaatattttcactgataattgcttttgtaatgaaaaaatacatttgtgaattgattaaaaattttattttcttacatttttaaaaagcctttattttttagagcagttttaggttcacagcaaaattgagaggaaggtacagagattttccatagactccctgccccacacatttataaccccccattatcaactatcccccctcagagtggtacatttgtcacaattgatgaacccatactgacatatcattgtcactcaaagtccatagtttacattatggttcactcttggtgttgtatattgtatgaatgttgactgatgtatgtatagtgacctttatctgcagctgtagaaacatacagaagaatttcactgccctacccatcctttgtggccttcctattcctccctccttcttacctaactcctgggaactgccgatctttttactgtttccatagttgtgcgttttatagaatgtcataatgtcatatagttggaataacatagtatatagtcttttcatactggtttctttcccttagtaatatgcatttatgtttcctccatgtcttttttttcctctttaaatttttatttttttagattcagaggttacaagtatggttttgttacatggatatgttgcgtagtatgtacatcacctgaatagtgaactttgtgtacaatactacttataagtgagaacatgtggtattggattttctgtttctgagttatttcacttagaataatggcctttagctccatccacgttgttgcaaagtacatgcttttattcttttttatggctgcatagtattccatggtgtgtgagtgtgtgtgtgtgtgtgtgtgtgtgtgcatgtgcatgtgtgtgaatatgccactttttttaatgcagtcattcattgagggacacttaggttgattccatgactttgctattgtgaatagtgctgtgacaaacatatgaccgcaggtgtctttttgttacaatgatttcttttcctttgagtagatacttagtagtgggattgctggattgaatgatagttctacttttagttctttgagaaatctacacattgttttccatagaggttgtacaaatttacattgccaccaacagtgaataagcatttccttttctctgcatcctcaccaacatctattattttttgactttttaataatggccattcttactggtataagatggtatctcattgtagttttaatttgcatttttctaatgattagtgatattgggcatttttttcatgttcattggctgcttgtatgtcttcttttgagaaatgtcttcatttcttttgccttctttttaatgggattatttgtttttttcttgttgagttgtttgagttccttctaaattctggatattagtcctttgttggatgcatagttctggaagagtgctggaacctctgtatcttttcgtgacttgatgtctcatttctttttagccctgaataatatttaattgtctggatgtaccacaatttacccattcacctactgatgaacatcatgtttacttctatttccttacattattacatttgccaaactcttcaaaattctcatttcatacaaatccatacaagattctcagaattcgtattctgcattagtgtctatataagccaacacaattgttgcatcatttgggtaacttactgaaaaaacaattatggagaattattttattttcaaacaaatatttaaaaataagtttggctgggtgcagtggctcatgcctgtaatcccagcactttgggagaccaaggtgggcggatcacctgaggtcaggagttcgagaccagcctggccaacatggcaaaaccccgtctctactaaaagtacaaaaattaaccgggtgtggtggcaggtgcctgtaatcccagctactcaggaggctgaggcaggagaattgcttgaacccgggaagcagaggttgcagtgagtcgagatcatgccactgcactccagcctgagcaacaagagcgaaattccatcttaaaaaaaaaaaaaaaaaagacaaggtttaacttttgcagatcttttggtacaggattatataattgttcttaatttttatatttaaacagtgataatttaatcagcagtgggcatttcccataagaagtctattcttttgcatcattttttgtgtaatgtgctaagggcatgtcttatatgatgatgttttgtatttggaggatcatgggaaaattcaggagatcatcaagccatcatcatgttgaagacaaattctttctaaaagtgctcagcgaaagcagtgttaatattttggtgttactctcttaaatacatattaaaatagcactttaatgtttgtttatataattgcacatccagatatttatttatcatttatactggatattatatttatcatttataatggaagctagaataatatgctttagaaaggaaaaataaaatattcagtgtttgtttccttttattaaaacataaatataaaatgtcagcttaaagagaaaacatgaagtgtgagtcttcaaaaagaaaagagatgtcagaaagtggagtaatttctacaaatgaatgcatcctcttgaatgtaacacattgtacaatggaagcacaaagttattcattagacactcactgaggacttagaaagttaaataattattgagcactacatggtttaatctcagatactttctattcatgtcttagtcaaaatgattacttttttctatgtgtctttttaatatcctaacagaatttatttatgtgataactgcgtttaacttgtcatatccaattactccttggagatttaagttgtcttgcatgccaccaaattcaacctatgactacttccttttgcctgctggactctcaaagaatacttcaaattcgaatggacattatgagacagctgttgaacctaagtttaattcaagtggtactcacttttctaacttatccaaaacaactttccactgttgctttcggagtgagcaagatagaaactgctccttatgtgcagacaacattgaaggaaggacatttgtttcaacagtaaattctttagtttttcaacaaataggtaagcattagctattttttaaatgtattgaacaatgttttttaattctttgatacctgtatgaaatagatgtcttatggctatgattttaacatacataatcatttttatatggataataaaattaggattcattatgtgaacaaactaataaataatttccaaattatcttgtatcccataaaaatataatgagggaattattttacttttaagtacattccttgtagtcttctaaatttgctttgaaatagaaaaacacaccttatttttgttaaatgtataaaatatcaaatgactgataatattgttgaattggttaaattttaaaatattcatgaataataataattcttcaggcaaggaatatctctgaaagaatatacgttttaaagatgggtttttcagaaagaatagctaatggatgctgggcttaacacctaggtgatgtgatgatctgtgtaacaaactgctatagtacatgtttacctatttaactaacctgcacatcctgcacatgtacccctgaactaaaaataaaagttggaaaaacaaaaaaagaaaagaaaaaaattctttttttttgtttaagtataatgcatactgattgtagctagtgtagttaaaaattctgcatctggaaatataaacaacaaaattatcccaagtcttttggaaaagctaggaagagtggagtcaattgactcatccatgtagagagacctccagtatgaaaatacaggcatatcttttcctcccttaaaagcgtgatgattgggttttcacatgtatgagtgagatgtgcctccctcagaccttgttatgatgttggcacattacctgtctaatgttaaaaaaaaaaaaaaaaggctgggcacagtggcttaactgcctgcaatcctagcatttaggaggcctaggcgggcggatcacttgagctcaggagttagagaccagcctgggcaacataatgaaaccccatttctcccaaaaaaaaaaaaaaaaaaaaaaaaaaaaattaactgggcatggtggtgcatgcctctagtcccatctacttaggagactgaggtgggaagattgcttgagagatggaggctgcagtgagccatgatcacatgatcatgccactgcactccagcctgggtgacagagtgacaccccatctcaaaaaaaaaaaaaaaaaggaaagaaaaagaaaagtgagaactgagctaggtgagttttgagctcttttgtcctatttaagtggtttgaaattaaagaaaatttgagaagcaataattgaatttaattctattactttagaaaaaaggaaactgagggccagagggactaagtgatgggcaaacgcatgccactagttaaagcttgttctttttctctcagaataggcaatggaagttgtatcagaacactggtaaatttgatttagctcttctctttcactgagttgttcagatggtttttgagatttcatgtagttgtttttttttttttttttttttttttttaaattcagatgcaaactggaacatacagtgctggctaaaaggagacttaaaattattcatctgttatgtggagtcattatttaagaatctattcaggaattataactataaggtccatcttttatatgttctgtaagtaccaaataattaatttggcatttctaatacacagtttttttaaaagagctttcatatacggaagtagattataaacctcttgcatccctacatttcctattatatgttttattttttaatatagcattctgctctgttaggtttcctcttttctcctcctgctaattgaggtagcaagacagtcaggtttagggtcacgattgtcaggtccatgagtataccaaatgttcagttcaagttcaggttctagctcacactgaggtccgaagggagtgggtggatgggcaatagctgaacgaacactctgggggccttaaacaggtgaaacgtagttttattcagcagctctctatcagcagcttactcaaactaggtctctcattagcagctctcttagcagcagctttctctcactgtctgctctgttttgactgcttgggccagctgctcctatgcacagctgcacggctggctctctcttgccttcagggtcagcagcttaactctttctctctctgggcatgaacgtgaaccatgctgtgccatgttgtgccatgctgagccatgccctggctcccctcgtcagagcaagactgacagctctggtactctctctctgggtacaagagcgcctgtacaagaacatctgtagagtgtcagcagggcaattataccttttacagacaacagtggcatatggccaagggatggccttcccatgttatggctacatggctgtgataacagatggagttatatgcctgcgcactactcgctgagtcatgcaggcctggacatctgccttggcctgattcttgaccgaagcacatccatgtaccttacaaagatattgcaggtataggtgggcatgtagtctgaaagaagagtgaactcagttcaggagtgctagatatttgagtggaaaaggaaaaaaggtgcgttttatatttctttttcagatgatttttcgtattcgatctctttataaacttaaaaatatgggtggctaatatttgtgctagaaagagaacaaagatattgttttcaaatagccatatacttataactcaaacagcgaatatgtcattaagttttctaattactctagtgatgatatacaccatttttatgtcaattttaactctttaaaattctttctcattaattcttctatttgatgcttaaagtctcgcttccttcagttctgcagttattgagataataccgttgaggagcaatgtgctagaaactgtccctatacaaatgaatagagacagaaagtaaagtggggctgagaggagggggaattggggagttactgtttaatggatataaagtttcaatttgggaaaatgaaaaatgttctggagttggggagtggtgatggttgcataataacgtgaatgtatttcatgtcattgcactgtacacttaaaatggttgaaatgttaaattttatatacattttattacagtaaaaatttaaaaagaaacttaaagacatgtaaaaaaggatgaatggttacgatcactgtcctttaggtgctcaaaggctagcagttgggacctgtatgtacagagtttcagtttaagtggttaccgatatgtatttggtaggtacataatgtcatgggagcccatcattgttgtgagatcttagatgggggttatctagttaagctggtgagagaagagaggaggaaaggtttcctaaggaaggagatagctgagttgagtcattagagataaataagagctaatgagaaaatatgtgggcagtgtagtgttgggaagagatcagtatcacctggaaccttgttagaaatttaaatttgcatgctaaatgacgagttaatggttgcagcacaccaacatggcacatgtatacatatgtaacaaacctgcacgttgtgcacatgtaccctaaaacttaaagtataataataataaaaaaatttaaatttgctagctcacccctgtgaataaaaaattagggggggtggagctcattaatatatgttttgccaagtcctttgggtgattctgatggaactcaagtttgaaaattcctgctgtagaggttaatatgacagattttagagtcagactacctggctgtaccacttactaaatgcactcacaaagcacttgctatgtttaacagttgttctacctctagaaattaacacaatggaaatatttacacaatgtttaaaaattatttgttgaatgaatacatattgccaaaatgctttctaaaatattttccaatttaccctccagaaatgtcttaatgagccaaaaagttaataaaaaaataatattgtctgaaggtgtgagtagtgagtagtcaacggtcagatatagcaggaagatataataaggtctgaatgatatgtacggatttggcagtgtgaaagtaatgggtctttaggcagagctcattcgggggagcggaaggagaggttgccagaacaaagggaaacttgaagaaaggacccggaagagctgatctttatgctagttcctcattcagttgatggggggacactgcagagctggaattcatatatccaaggcatactatggctggtgctgagaatatgaaaaaaacctggttactgggaccaactgctgctgcccaggtgaggaacctttggctggagtgatatttcaagaatggtaggcaaaacaggaaggatcaactcccttgtcactccattattctagtctctttctagctcccccacaggtagaatttaacaagaatttaggtagcagaggagaactatggtttgcagagttccagccccagcatggtgaaacagagcatagggtgcatttgaagatggcagtcaatagcttaaccaccagcaaaattcacttcattggctcattggctacttagaacattcacacacacctttctacgcatacctacctttccctacaacttccttataacttcatgctttcacttaattaagtgcaactatactttaaaaaaaaaatcaaaaagatcctttatttcatgtgtatgtagtatcataattcatcaaaataatttataatagttaactgcccctcaaatattgttttataaatgatgccttctgaagttaaacataatgtagattcattttttaaaaattgtctgtttagaacatactaaacaaatgataagttaaaaaaaaatataattctctcctgtgaagtcttctaagaaaatcatggcaagttcctgataagataaaaaccattccatcattaaaggggattaaaaagaggcataaataaatttgaataggaacatctgtttgctgagttttttcattgtgtacaaatgaaactctagagttaaaattatattctgatttccttctataagcaagaaattccttaatagaagctcagaaatgacctcagtgccttggtgaaacatacttcttcatctgcggacactcagtgctcccatctctatcagatctgctgtgttacctctgttaacattcccaggcatctccaggaagacgggagatgtcatcctctccaagatggctctaccaaaccaaggctttcctggcaccaacaacgttctttctaaagccctacacttcacagaggaggcaaagcccgacgaagcaccatttctgccacggtgtccaccttaagcttccaactgccactgttgtgaggaggagccatcacagattgccatagccacagagtcttcctgaccctgtggagccactgctctcaggcactgtccagctgacgtctggtgtagccaattattttccccaaaggtccatgtctgcctgacccatggcactccacgagttgtggtgggtctgatgagctagtttctgtcatacctagacaaagaagatggtttaaaaccaattcatgctcttcattataaatccagatctgatttgtgtccccatgctcacaagtcttaagcactagtaggcctcctttccaacttgggcagccctgagccaccagacatttgttggtctggaggtgatagagccttccaagttgaaggactttggggcattttggccctctactgataaaagtgggttgctgggatttgtcatgggtcccagatatctgcatctttgggtaaatattacccaaataccattcaaatgatttgcatcctaacttctttctcaattcaacatgctcactgatggttccaaagcttttcctctccagattaagtcttaaggaaaaatactgcgcctttattcatccagccagacatgtgccagctgcaaaaagttgtgttcatggcatcccggccttcaggagatccatatggtcccctttttttggaaaatgtgtcctactgtagagcaaggcatgatgaagaacttacctccacacacccagatctgaaatgttatttccaagttttctcctctccagatatccatgccagtatcatactgtccaagttcctggaaatactgtctgttcctggcaaacaatcctccagccattatcggtgactttgttggtgctgtggctttttctgctcatcctagctcagaaaggggaacaagctcctatttgaagtgcagccctcagttgaatcccccacggacaacagaggatgagctgtaggctagcgtgttggcactaatgatatcaatcactgagaacatcatggtctgctagtccacacagatgacagccagcaagggctgctgccacatcacattcacttcaattggctgtctaggaacacaaggacttctgttgtgtggactgctacactcattcttccttgaatcaatccctcacactttatgtttcttataccttaatttttccaaggaggtatttttggacatattcatctcgtcctcctttcaagtcatcaaggtcgctaacaacatccataaagatgatttcatgaagcaggtttgctggcatgcaatttgtgacaatgtgcagcgtctggagacagggcagaaaaagcttcattgtggaaacagataacaattatgtaagcaactggcaggtcaggaggtaggactttacatgctgtattctttgtccctggcacatctctgtggtagcctgcagttactgataagcatattaaaagcacatttctgatagcccgtctctcaactcctgagcacgttaattaaaaatcatgcctagttcagaagacaatttcaagtggcctttttctggatcttcaatatgaccatcacatcatcaattttgtttgcttcgaactgtggctctagtaatagacttggaccttgagtgaatcaggaatagaattgttttggaaatggtccatggggtccaggccccttgagcacattctttttttttttaatatagtttaagttctgggatacacgtgcagaaagtgcaggtttgttacataggtatacgtgtgccatggtggtttgctgcacccatcaacccgtcatctacattaggtatttctcctaatgctatccctcctctagcctcccacccccctacaggccccagtgtgtgatgttcccctccctgtgtccatgtgttctcattgttcaactcccacttatgagtgagaacgtagtgtttgtttttcggttcctgtgttagtctgctgagaatgatggttttcagctttatccatgtccttgcaaaggacatgaacttatccttttttatggctgcatagtattccatgatgtgtatgtgccacattttccttatccagtccatcactgaggggtatgtgggttggttccaagtctttgctattatgaatagtggatgagcacattcttaagtggctgagtcacttcaccgaagttgaaatgaacaaaaaccaaaactgcacaggtcacagatgtaaaaatgtacccataacagaaatattgaactgtgacacttcccataatagacttagcataactaatgggccattttcaatttctgcagcactggcagtggccttccaggactcaggctgtggcatctttcctcctgccacagcccctgtctgagccacaggagctgcccagggggtgaggagtggtgggctacactttgaacaaaaggagacagtcttattctctctcccaaatgggatgatgctatgtcacagttgtcattatgttttctgtgcaacatgtacagtattgctctctgggcagtattaattgctcctcacattcaatcactgtttcacctgaatgaatattgtggaagctaaatataaaattgtaaatttaataattccaggaatccttatataaaataatagggggaaggaaaagattgagaagaaattagttaatatatagaaacacacacacacacaagcatactgtaagggaggaaatatgcacagctgccactgctcttctttctgtattgattaccaggctgtagttaatatttattactagtgttagaccactggactaattctttaagtcacccagaggaggaacccagatatagtgccactgccatcatatctggacattgaatgtccctgtggtcatcatttccacatggaggtcacctgatgccacgactgatgaacctacaagcccctgcatctttgtgcaatcgtcatgagggctagtgtctcagatgtagttatctagttggtgagaaggtgctctagctgccagtgtttcagccttgtatgatggtagattcttcagtcagatattgggcaaccagcaagtagacaaatgtccttaacaaaagtgactgagttataaatctctagaggcctgagaagcctggctggggttggaaagtggaggtggaagactaatggataatgaatgtcccagggtggataattaaaggatgaaatcatgagtttgtttctagtctatagaaagtgacccagcagggagagaaaagttgataatcgaaggggagccattgaagatattttattgagagtgaataatggaataggccaattccatgaaaagagcacagggttggtcttaaagaaggtttacctcaacttctgagtattgagagaagaaaggaagccctatggtggatgaagatatatttgaagctcagggcagtttcctgctttattgagcaaaataggttttagctcagagaaaagtattcctttgcatagtagtaccttcttgcaatgacctaaatgctttggatgtgattaaagattctcacttgggtgcctactctagacaatttctgatcttatcagcaggttaaggcaaaatgctcagttttaaagccccgtgaatatgtgtaagggcttaaattctattatgtatatattataattatgatgaggtatttttctgaaaaagataagtatatgtgtaatatatagatatatataatttcagagcattataaatttgaatagttacttagttatagctgagaattttagcttcagtttagtcagccaaacagtcattggtctattcttctaaacaataggacccagaagaatgagaaaattaggtaaattaggtagattttcaaactttcttacaagatgatttttaatttggtcttcttttacttggaacctaggtttctaaaaatattagcacagtaaaacctgtcataatttcaaggaatttgagaaacagtctcccatttttttcctgccacattatatacctctatgatttggttaatatgttcattgcaccaactatcacatgctgtttctgcctttaattctatttttgtttggctcttaaggcaatgtatctccaaacaattaaataggactctaattcaataggtagagctggtcaatataggaagagctggtcaatataaccaatgagaactccatggaagagaaaatccataatggtgattactacagaaaagctttgaatcagactcacctattttggacatcagagaattcacaagagaaattttcaaatgcttccatgtgtaaaaaagtatattttaaaagggataaaatctaatgtttgtaagggatttaaaaccatataaatatgtcccttaagggaaagctttgtttgggctcagatattaatgtttgtcagagagtctgaaggacagatactctagaaatgtaatattttgaaactgctctgagattttctcttagatctaggaaggaaattctctttctttattaggtgcctactgtgtgttccaggcacggagctgagcatggggaacaaggttctacaacacagactcagcccttgccctcctggagctaacattctgtagtaaaaacagaagacataacagcaaagtttggaaaggctgtgctgtaataaatacagtgccttgtggaaacaagtactagggatatccagcccaggtgaagagggggtagaggagaatgagccagagagtgaagaacatttgcaaaggcccagaggcacagataccacatggcaggacttgaaaagttgagtgtggtgggactgggaagctggggaatgaagagaaatcaggatggagggatacacaagggtcagattatgaagggccctccaggtcatgcttggagtttgggcttctataactactaacacctactttactttgttttcacaattactcctgccagcattcttgatgatttcagcatccatgtgattaatcttcagtttcttgaatgcttattttcaatattcttgtattttcacaccactttgttcaccccttgtcatggacatgctcgagactttgtcatcaccaataagcatgctttttctataatctccatgtcaagaatcctgctctttgaccatctccccttgcacccttcatgttagtttattccctctactactcaacttcaggaataattctccatggttcttggctcccccttctgggtgccaggttctggcctgagtaaccctctcttcttcatgaaaagcagcccatatgcgcatctaagttgttttcacagcctgctttcctaccagcacaatttttaatggttgaaaggctttttttttttttccattttgttctgtctctgtctctttctgtctctatattagcactatttctgctaatacacttctctcacaaaactacctggacctccagtggatctctctggtgttcactccattagatatgataaaagcctgcaaatctcctagagatcttttctctgtcttctctttgatctttgctcagaaggcatttcttaattttaacagtgtttgctatctggagaggctagacacttcaagactatgaagtcctctttccttttgtttaagggccctttcttcaatgtatatctctcctcttacagcaagaagaaaccaagagacatccgcaacacttgctggaaatctccttaaatatatcattcagttcaataggcacattctatactttccacataactacagatggtaatgttaatgagctctctgctactacacaagaaggaccactgttctccagtttccaataaattatctctcacttccttttgtgccctcactggcagagtctttgaagtccgccagatttctactaacagcctgttcgaggcaatttaggttttcttcaccatgcttctccaaatccttctagcctctgtctgtccgctggttccaaagccactcacacattttcaggttttcattatggcagcaccccactttcaagttccagtatctgcattagtgatctaatgtcatataataaattaacccaaaacttagtggcttaaaacagtaatcatttattatctcacaatttctgtttttaaggaattcagctgcagcttagtgtggggtggaatgggaaaggagtatctgcttcagggtctcttacaaatactgcactgaaggtgtcagccaccaggactgcagtcatttcaaggttcaacttcaggaggagctagttttgagataaattcttggggttccaagttcttcatgggatgttggactgagggcctcagttcctccctggctgtcggctggagacctccttcagttccttgttatgtggatctccccataggacagcctgcaccattgcagctggctttcctgagagtgagccagagagactcactgatgatcttgctttttattttcactgagacaacagaagcaggtggagtttctctaatgattgcttttctcacccaaatctaccaggctgcctgtatcagtgcccatgcacttttcctctcttcttttattgtgaataaattctttgagttctgatctaaggcgaaccctttgttacgtgttctgagtcccgtctcttattgtcaactcaaggactttcttgccattatcctctattttctgcaccatcatgtttctctctcagctaatagacacgatataataactcccatttaaaaaaataaattttctctgttacacatttctgtcaagtaaccaccccatttcactacttcttttaaagaaaacaaagttttgaattgtatgaatacattatatcttcaaaagttaataaaaaagtcaacaagtgactctggccacgagggaataagagggtctggattactctcctgtgataaacaactagaaaactggaaaaaaatgtaggaaataattattttcagacattggacaaagacagacagaactgtgattcctaagagaaggaaacaaaatgagtactcctagtacttaggctttctgaactgtagaaaattcccagaacatggcacagagctgaggaactcaagctgagcccaacaatcttgcagagataagagttcagagagggtaaggggctcaagttcatggggcagagtactttgaaagcaggagcatacagaaaaacttacagtggggccactttaactctttggctgaatatcaatctggccacaatgttgggtaagaaaaacttctagtaagagaacagttatcagggagctataagctaaacaattcacagaattcatagaggtctgggaatcgttcaagttcccacaaaagagattggagagaccttaatgggtatcagtgacatttcgtaggaactccagaagagctatactttaaaggtggggccaaattagccttagagtcaaggctacactatactattccccaaaatgcttaaaggatgccctaaaagattcaaattagtgctcaagtaacttaactgactttcagaacaaaatccaacactcttcaaggcaaaataaaacaatgtaatattcaaaaatgaaataatcacagtgtctggcagccagtaaacacatgctagatatatgaaaagataggaaaatgtgacccataaccaagagaaaaagaaaaaatagtcaatagaaacagacccggaaatgacagaggtgatagaattggtagacaaagacagctatcattaatatgctctacatgttcaagaatgtaaaggaaaatatgaatataatgagacaggaaattgaagatgtaaaaaagaacccagtgacatttttaaagatgcaaaatgcattttttgtaaacaaaaatgctaaatattaatttgggcatttagaataatgttattcaatacaatagtatttatggtgtgcagcccatagtgctaggctctgtaagggatgcacttttcattctccttcccttctttcctttctatcaggatggactcatggattcttattttagtttgtgggctacaaaagttacatcatttattttattactgaaatcgtctttctttctagcagtataagatgtaccaggttgatcttatacttttcctgatataacactggaattagccatttctccaaggagccatcgttccttttgttgaagaatggtatttacaaaccagtgtctggaggatagttgttcgttgttattgtttctagccctctctgtgtgcagagctagttagtgcacacaatatatacacaatgtgtgtacataatatacacaaatctatatatctatatatctctgtatgtacatgtattaaagggtgtgtgttcatactaatatgtcccattctaggccaaaactgcacagtccgttctaaacttcttttctttctgttttgtaactttcttctccagcagtgagaaagaaacctggcttccctttcccacagtgtgttacttatttgctcagtgctagaatacacacaaagcagttttagcattgctatcccatactgctgtgaaaaatgaaaacaagcgtactaactgaagtgcaatattgtttacactcattttgcctttactaaggctaatgggtacatggtcaaatattatgttccaaagttaaataggataggtcttccctctcccttcaggtggttatattattaacttgatagacattaagttctgtttgtttcagtttgcattcttctttttttcccactttctcttctctttgttgattttccatttatttggtgatatcttacatctgaagagtactttgcattttacaaaatgcttcttaaactttcctccttgataagatttatctaggtcagcactacttacttggcattcaataggtctgggtggaactagattgcttgcatttattcagaacatagattgcttagctctggaccttctgaattcctcatggggtctaggaatctattttttcacaagttctccaggtgatttttatgatgagtctagtctgggacaataactcagtctcaaattattttggattggcaagagaaaattttgaggtaatgtttttatagattaccaatctgaaatttaaaataagtgacttgattaaatgatttacaaaactaatactaaattttctaattccacttcattggtttgttcactattttgctgtcagtttacattacaatcagaaaattaggtggcaccaatttggtgttattcctgtaataatttagcatagaatttgcttggagaagctttaatatattcacattttctgggaagaaaaattggaccaaaagtcagaggacagaatgtgctttctttctaaaccatgtatggctaccaaaaatgaaattccaatactaaagaattatatctctaccttttgtgtaaaaatattaccaaaaaggcaaaaatggtaaagagacaaaattttaagttcatttgacaactgttttcatactattttcactttcaagtaaagtttatttacatgtagaggtattaaataaatagtggcactgagtttgtatatgcgtatatatactggtaaggcataaaatattttgttgcatataaaattttcaagaattccagaaattcttaatgtttgcttgttttaagccaagtatatctcctgttacttttaaaatttgatgatccttttattctcatactttaaaattatcaaatttgttagagtatgttttgatattagtaaaaacagagttcttaacttcttatactgactttggcatgtaacaaggttggtggattccaggtttcacacaaacttgggaaactcctctcacaaatacaggaaatagctaatgtttttccttaaagaaaagaatcatttgaagtaattatataattctctaattttccatttataaaaatattgacatgattcaggttataattattttttagtcatggttactatggtctttattgatctctaaataaaatggtgatgataacagtgaaatttatcttgtgacaataaggcacgttgggtgtaatgaaatgaatattgaacatgatgcacaagacttcagttgagttccaggtctaccttctctccaaatctcagttttcttacctgtaaagtagatgatgttagttccctcaaagggtgctttgaaaaactggattagataatattactaaaggtgtttcatgtaaattgtaataatgaaatttgatgatatatttaatgtgctttctctatttttgtgtcctttgcccatcaaatacccaccagtagggagtacaaaatacttttggcttatacctggggagggaaaattttcttttttcttaaagggccaaatagtaaacattttggggtttgtggaccatcctgtcttggtcacagctattcaactctgtgcttgtagaaaaacaattatagttggtatgtaaattgaattaatgttactacatttatgggcactgaaatttgaatttcatgtatcatgaaacagtcttttttttttttaattgaaaatgtaagtaaccattcttagctcacaggctgtacaaaaacaggcagatggctggatttggcctgtgggccagagtttgctgatcccaagcttagaacattttgaaattagttttagattgatgctgatagtgtcatgatggggttagctgttggcatggttacagaaagcttttttaaaaaccaacaaacaatgaattactataatgcatattttataatgtagatactatatagtcattattaaggatatatactctatatgatgttttgcatgtgtattacaattattaacaaaatgaaaaagagattgaataaatagaaaatacatcagtgaagggatgaggaaaccatagagttaatctgattttaaattcgccctttttttacaaatattcagtgtatttagaaaaggatggctttggcaagaccatctaaagtaagatgatgtgattctaacttttctttttgtcttaaaatatgactaaaattttctatcatttaaaatgttagcagagaatatatttgttgttttgtgctcaacttaggcaaatattcttgctttaaaattctgaagtttttcagccaaagcataataccttgcaagaatgtttccgacataaaacaccacaatttattcaatttgttcacagactttttgtaaaagcttttattttaatatttgaaaaacacctaaaaggtctggcttgatatttttaaaaattacattttgtttgctttgcttaaagatttagataaaatcaaaagtgctaaatcaggctacctctaattcaaaacaatattttatgggtggatagcattttacagttttcaaaaatacttttatgtgattattgtctttgatattcacaccgttgtaaacatagatggttcggggattgtcttggttttattgattcaggaacctgaggctcacaaatataaacttacttgtccatgatcctatggctaataagcaaacagaagtacttgattttagatctcaatgttaatttagtgtgcttttgacactaatatcccctatacagttcccagtagattccttggcacattaaagccatgcaaatgttgtttcagggttgattttttttagtagtaaagtaataataaattctattacttgaaaatatatcataattcaaaacatttagtattagtggggtatgcagagaaagactagggtctatttttcatgttttttatatctggatgctcatgtatatgctagtttattatagcttctaaagcaacacttttccatactgatttttaaattattacgtttgttaattacagtgttttccctctacaaggactgcaagatttctgaaggcagtgatcatgcactatctccctatccccaggttctttgaaaaacagtgtggtttcgatatgaggtagcagatattaatggatagaatggggcagcacaggtgagatgggtagacagaggcactgctactcctcacccttctccccactgctcttattctatagtcacttcatttacaccaagacttagactccctaaaggatgaggcagatttataaaaaatctagtaagtaagaaataacaactgtctgttcttggttgcatgctattattttttatgccctgtatttggtaaccctacccagctaattataattttttttttaagattgacctacttatttgaaggtttaaaatgataggcaaggtattgcttaacaaaaatttcctggattttctttctttttgtaaatagttttattgaggtatagttgatatataataagctgtacatatttaaattataaatttgacaaatattgatctgagaaatcactcataaaaccatcagtataataaagaaagtgaatatatcatcaattagaaaatttcttcctgctcctttgtaatcccaccctcatgctcctaccattggtacttcctcctcccaccccacctctgtccccagggaatggctgatctgatttctagcacatagcctactattactctagcattttttagaactttatataaatgcaatcatacagtactttgttgtgctttcatatacatgattatcttgagattcattaatgttgtttatatcagtatttcattcgttttgattgctgaatagcattccactaaatggttatattgcaatttgttcatccattcacctgttgataggcatttaaattgtttatagtttttgactgttacaaatgaagttgtcacaagtgttagaattgaaatatgttttcatgtctcttggataaatgcctgggcatggaatgggtacatcatatggtaggtgtgtgtttaacaacttaagaaagtgccaaactgttttccaaaattgtatcattttacattcccaccagcagtgtaagagttccagttcctccacatcttcaccaatacttggtgtagtcagtctttttttaaaattttaaccattctagtatgtggatagtgatatctcattgtgattttagtttgtgtttcttgagtgactaatgatgttgagcatcctttcatatgcttatttgccataactatgatttatatggtgaagtgactgtgtaacattttgcctatctttttaactgggttgtttgtattattattatttagttttgagtattgtagataccttatgtatacaaatcttttatcagatagataattggcaaatatgttctctgtgtatggtttgtctttttgttatctttcatagtgcttctcagaaaacaacttttcaattttgataaagtctaatttatcagtttgttcttttatggatcatgctttttgtgtcatatgtaagaaatttttaattaacacaaggtcacaaaattttttacttatgttttcttctagaagtttcatagctttaggttttacatttagatttatgattcatttggaattaatttttgtatctgatgtgaggtatggattaaagttcttttcttttattgcatatagatattccattgttccagcacaatttatcagaaagattatcatttttccacagaatttcttttgtgcctttgtagaaaatcagttgtccatgtaagtgttagtctattctagactctattctggtccattcatttacttttttttgtttttacatgaatacttcattggcctgattattgcagctttataatacattttgaagttaggtattgttattcttcaaaatatgttcttcagtttcaaagttgttttggctattctagattctttgcatttccatatgaatttttagattcatcttgtcaatttgtgtaaaatagcctgttgagattgtgagtagcattgcattaaatctgtagataaatttgaggagagctggcatattaaccatattgagtcttctgacccataagcacagtacatctctcattttagttaggtcttaataatttccgtcaacagcatttcatagttttcaatgtgcagatcctaaacatcttttgtcaaatacattacaaagtatttctatttttgatgttattgtaaatgatattttaaaataatttctgtttcatcagttatccaatataaattcagtatcataaaattattcatattggccgggcgcggtggctcacgcctgtaatcccagcactttgggaggccgagacgggcggatcacgaggtcaggagatcgagaccatcctggctaacacggtgaaaccctgtctctactaaaaatacaaaaattagccgggcatggtggcgcgcgcctgtagtcccagctacacgggaggctgaggcaggagaatggcgtgaacccgggaggcggagcttgcagtgagtcgagatcgcgccactgcactccagcctgggcgacagagcgaaactccgtctcaaaaaaaaaaaaaaaaaaaaaaaaaaaattattcatatttccttattatccttttaatatctgtagactgtgtagcaatatcgtgctttcagtttttatattcttaatttgtgacttctgtggtttttcctggtcagtctgtgatatggcttggccatgttcccacctaaatctcatcttgtagttcccataatccccaagtgtcatgggaggaacccagtgggaggtaatcatgggggtggttacctccatgctgttcttcactattatggcggttacctccatgataatgagtgagttctcatgagagctgatggttttataaggggcttttccccacattcactctgtacttcttgctgccaccatgtttgcatgtccttccaccatgatattctaagtttcctgaggcctcctcagccctgaggaactgtgaatcaattaaacctcttccctttataaattacccagtcttgggtatttcttcctagcagcataagaatggactaatacagtctggttaaagcttctttcatgttttaaaatcttttaaccagcttttggctttcttgatctttgtgtattatttttctgtattctatttcattatattctgatttgatatttatgatttctcatctatnnnnnnnnnnnnnnnnnnnnttaaatctgtagataaatttgaggagagctggcatattaaccatattgagtcttctgacccataagcacagtacatctctcattttagttaggtcttaataatttccgtcaacagcatttcatagttttcaatgtgcagatcctaaacatcttttgtcaaatacattacaaagtatttctatttttgatgttattgtaaatgatattttaaaataatttctgtttcatcagttatccaatataaattcagtatcataaaattattcatatttccttattatccttttaatatctgtagactgtgtagcaatatcgtgctttcagtttttatattcttaatttgtgacttctgtggtttttcctggtcagtctgtgatatggtttggccatgttcccacctaaatctcatcttgtagttcccataatccccaagtgtcatgggaggaacccagtgggaggtaatcatgggggtggttacctccatgctgttcttcactattatggcggttacctccatgataatgagtgagttctcatgagagctgatggttttataaggggcttttccccacattcactctgtacttcttgctgccaccatgtttgcatgtccttccaccatgattctaagtttcctgaggcctcctcagccctgaggaactgtgaatcaattaaacctcttccctttataaattacccagtcttgggtatttcttcctagcagcataagaatggactaatacagtctggttaaagcttctttcatgttttaaaatcttttaaccagcttttggctttcttgatctttgtgtattatttttctgtattctatttcattatattctgatttgatatttatgatttctcatctgttttaaagtttggttgaatttgctcttttttttttttcctagtttgttaagacggaagctgaggtcattgatctgagacttttctttttttctcatataggcagttagtgcctatatttagtgttaaacacatttccctggaattattgctgtaagcaatatcctaccttaaagaatatgttgtattttaattttcatgtacttaaaaaatccttctaattttttttgatatgttttttgacccaggaattatttagttgtgttcagtttccaactatttagggcctttccaaatatctttctgttattgatttctgttattaatcctatttttgtgtgactggaatcctttaaaatttattgagacttgttttatggcccagaatatggtcttccttggtaaatgcttttgcaaagaatgtgcattctgctattgttgcatggagtgttcttgaaatgtctattaggtcaagtcagttgatgcgttgttcacgtttttatccttaccaatttctgtctatttgttatatcaatggagaagaatgttacatcaatgatgaaatgaaattaatcagtaattgtggattagtctatttctccttaaggttctctcaatcttttgcttcatgtattttgaaactctgttattgggtgcataaatgttttggattgttatgttctcttggtaaattgatccctttttcattatgaaatgatcatctttatcccatggaatattcactgctttgaaatctactttctctgatgttaatataaccattacaactttcttttgactaatcttataatggtatatcttttcccgttcatttccttttatttgtgtttatagttaaaattgatttcttgtaggttgtttataattgggtctttttaacccagcatgataatctttgccttctaaatgggatgttaaggctgtttgcacttagtgtgaaaattgatatgtttaggtttaaatctttttatttcttttcttatcctattttattatttgtttccctttcctctttttatgccttctttttgattttttaaatgattctacttaatatcctttgttgcttattaattatattttcttgttttattattttagtggttgctttagcatttataatatttgtcttcaatttattatagtccaagagatagtatacctctaagtgatatcataccacttcgtgtaagaacattacaaatttctcccctcccaagcttggtactaatgccatacattttacttttacctacgttgtaaactccacaccacggatctattatttttgctttaaacaatcaataaatatttatcattttagttaaatttaatttctttgtgtgaaaccacatttctatctgctgtcatttttttttttttttgcctgatggattgcctttagcattttttatagtgcaagtctgatggtgatgaattatttttgctttggtatgtctgaaaaaaaaagcctttatttcatcattattttgaaagctgttttcgctgggtataggattttagaattgcagtttttcttttattttagtacttcacttttacgtcattatctttttgcttatgttattcctgatgattaacctgctgtaatctttatctttgtttttctaatgtagggttttttttttttcagataccctttaagctgggtgtcccaaatagtttacttcaattagtatttagtatcctgctttaaaagcctatccagtattttcatatctgttttaatatttagctcttatttttcaatataggcctgaagtgttagaagattcacctctggttccccaaaaaggcagttttcagatggttcactgcaattgcagtgttcatgaatgttgtgaatgtcttgtgcctgtgccaacagccaaactcaacgacactctccttatgtgtttgaaaatcacatctggtggagtaattttccggtcacctctaatgtcagttcagcccataaatatgggtaagttatgcactaaaatgatgataataggtctaaacatcagtcatatataaaggttaaaaattgcttacaaaaatatttgctagcttatctcactttgcttaacactgtaatgatggtagatgtagtactgggggtattaagagtggcttctagaatgatttaacaatggtatgtatatctctgccattgtcacttaaattctgttttgaaaactgttttctttcaatcctggatctatgtaatggatgtgtattgattggatatcactttttcacatctcagataactatttttgaaaataattagaagcatgtttcttgcctgaatttattccttcaataaatatttcttagaggctcatgtttgtcagagactgctccaggagctggaaaaagagtgggacattagacatagttcccacctcagagagcagggacaaacaatagtaggcagagacaatgataaaagagtaaatgagtaatttactgtacaaacatgattacaaaaaacttcaaataatagacaacactctgttttctttgtgcaaagatcccccaaatctctttttatcaatttaaatatacaattacaaatgtgaataatacaggaaaatgttagcgctatgtatttaatttattaatttcatttaattatgtataatttagcagtttttctccacttatatttcctgaaacaattatatgcaaactctttatgtctgattttgcatcattggttttgacatcactagagctgcttttccaagtatctgatacaattttccatacaactcaagctttacttctttctaagttactcgagatatagcactttttgaaactgtgtatgacatcatattttaacatgaagactttcaaataatttgtcctgtagggacatagttgtgatctctacaacataattacaatggcatacaagcaattcaatcgtgaagttataccatagagaaaaaagttacaaaatctttattcaatatcattttcttttcttttcaaaactaattctacctgatgattttttagtagcatttagagtcaacattgagtgcattgtttttcaaaatgaagtaggtaagggaaagtgctgtggaatttttaagaacttgaaagctttcttaattttgtctttatgcagagataattttggggaaaagtatttccttctatttgaatatatattataatatccccaaattatatgttccatgaaaaaaataaaactggtgtgatggagtgtcagggactattatttctactatgtagatcaaagaagatctcctttaggacatagcatttgagctgaatgaagaagagatatccatgcaaaaatccagagcaaaaggtgctccaagcaggaagaacaatattcacaaaatccctaagatacaatgaacttggtaatttgaggaacaaaacagaagacctttgtgctaggagtgaaagagatatgagagtattaagggatgaggtcagagttacctggtccagagcatattgtaggccagggtggagaagtaaagaactgttttggtttggatctgtttgtgagatggtgctgactggactgtctagtggatggagttgtagagtgtgaaggacagaggggtatcaaggataacctttaaatttagacctgagcatctaggtgaacagagacaccagatactgagatacggaaactcagggaagattaggtgtgtgtacagaaatcaagagctctattttggacacattgtatttgagatgtctattggaaacctaagagacgttgaataagaggttggacatatgagtctaaagtttaggggagatatatatatttgggagttgttagcgtatcaaggtttatagtattgtatgagatcacctatttagagttcaggaagagaaagactgaggggttatcagtaagaatgaaggagtaaaagagtatgttgttgtagaagccaagtgaaaaaaatatttcaagaaggagggaataagcatctatggagtgctgctgaaaggccgagtaaggtgaacaggaaattgacattgggtttatttttgtatttctaatattaatgcatattaatattgtcaacctaaaatgtatgacagataccaactctataaagcaaaaagttgatttgggagtagtaggggattgcagttctagacatgcatgctatggaatgactatgacacatccacaggggattggagtaaaggggaagcttgaaaagacatataggagacctccatgtaagctgttttgaacaaagattattggttacaagagcttgctgcaggggttggcattagctcattggtggagacagccgtagttaggcaagtgtctctgtgcaagcggcttttatggaatactgtggttttgaggaattctttacgttgttccaatgtaggcatacatacataaggggactccttcatggcctcccaactccattgtgttagggtttcacactagtaactccagtttgatactgataacttttacagtacgcagataggaaatgtacaatagcttgtaatattgtaattttacttttctttggtatatattgttttctctttggtcatggaaacacagtaaatttcacctgctgtttccagacttttgtgtttagctgtctctgctttaaagtaactgaaatttataatatgtctcataaagtaaaacctcattgattttgactaaaagaggaaaattgtgaccaaattcttgaaaatatagaatgtgaaaattatcttatgctctttatttattgaaaataaaattcaaatcagtgtttcaatttaatgataatttctatatatatgaataattcctgttaattgtaaaaaccttgctaatatagagatgaacaaacaagaaaatgcatcgattttctatcactttggcgatctttatattttaactatatcaggaatccaagtataaatgtgtattaaactttcaaaatttaaacattaaacatttttaatattctgagaaacttcatccctacttctgatgacaagccagggactgctgatgctgcatttattgcatgggaatatttatgctgtcagttatttgagtaggtttgtctagattatagtgatctaaaattaatagacaagctgaattttgggtagttttgtgtatttccaaatagtgttctgcaaaatgcttttttcctttttaaccactaaaataattgaagtgggtgaggttcaggggagacttcagataagttttaggatgctgggtttaataaagttaagtgggattcttacaaggggaaatcacatttagcaaaataatctcatttactgattcatagtctttaccacttaaggggagggtaatgaatatacatggattgctatgataaggtacaaggacgagacccagtattcaagcttgtttcggttctataattagtccttggataaagtcaccttttaagtacttgaaaggcaagatatgatgaaaatttatcttgactttattttattcagctataattgtcatgaaaattacttgacttaaaagtattctcttttttttccttaagtgaagcctgatccaccattaggtttgcatatggaaatcacagatgatggtaatttaaagatttcttggtccagcccaccattggtaccatttccacttcaatatcaagtgaaatattcagagaattctacaacagttatcagagaagtaagtatattttagtaagtaaaaggaaaagttgagaagtaaataaagaccctcttaagtcccatagcaattaccctctgcatactaaatatatacatttcttctaaagcagaatgaattataattcaacatttcatattatatatcatatatagatagatatacgtatgtatatatatggctataggaaatctagttacagaaacttgaattcataattacaattattttccaccaacagaccactgatttcatcttttttttaattgctcaatctatttgaatgtttttctgaatgtggcaacagaaagatttttgcttggctaatcattagtcgagcttctgaatcttctgctagcccgatctgtgcacattcctgtaaaatccagttttagcaaagaactctgctaggtcattttagcaggaacacccccaccctggatatctgatgaatatttgatcagatttctcatcctccaccattccccaaatgatgtttgatcaccatggcctgtcttcagcaagaattctgttaggtcagtttagccagaatccctcttaccatgatgtttttgcttagtaattttctatctactccctccttcttggctataaattccctgttgtccatgctgtgtttggacttagcccacataccccgacccaccacaagaccccattgcagtgctccatatacctattgtgatgattccaaataaagtcttccttacttcctttctctttttctttaacagttcgttccgtaagtatttattgaacacctgctacatgcctggaactgttctgcttgcatcaggatacactgagatagcaggacagtataagaggaatctgggggtgctggtagggaatggaaggttgcaataataaatggaggttggggagggtgacatttgagcaaggatgtgaaggagatggtaatgtagatatctgggtagttgggttctaaacagggagaacagcagtgcaaaggatggtgtggctgagggcagtgaaggtgacagcagtagtggttgaattcagaggccagcaggggaagagaacgtggagctcaatgaaaggcctcttgggccatgtgaatactttggcactttactttgtgaaactaagtttcatataatttagaagtaaaaatcagtctttttagaactggcaaaaaaatttaaaacattttattttcacaaagagaatgatgggaatcctcagtgtcacatatggagaaaacagagttaaggcttctgtgggtttcagctttcttatctgtaaactggagataatttgtaaacttgaggattttaaataggagttattaatatctgatgttttatgcattcctgatgcttttcataatttttagtctgtgacatgctccccttaccccaagagcagtcattagagccagagaatttattaactttggagtacatttttgggaagctgaattttgatctcctaggctcaagtgatcctcctgcctcttttttttttttttttttttaagagatgaggtatcactatgttgctcaggctggtcttgaactcctgggctcaagtggtctacccacttcggtctcccaaagtgttgggattacaggcatgagccaccatgcctgaccaggctcaggttcttaagacttttcatgctcttctgtacagggacacttgtagttctttgtctacccctgcacagcattttctaccaggtgtgtgttataggtgtcagtagtggcttaaagcttcccacagattttagctgcatttcttaaaattctaaaggtcatatattcatcatgattcaattaacagtatttgttaattatcattatgattttttcttggacccatgggctatttaaaattttattgactaatgtgcaaactttttttttggttattgatgtttgttttaattccgctgtggccagataactactgtgtaagatattaattctttgaaatttgatgagattagcttatcctcacttttagtaaaggttccacatcaacttgatgttctgatgttttaatataatatttaacaggctgacaagattgtctcagctacatccctgctagtagacagtatacttcctgggtcttcgtatgaggttcaggtgaggggcaagagactggatggcccaggaatctggagtgactggagtactcctcgtgtctttaccacacaaggtaggttatgtaatagccacttctactgggagggaaatatatttcctgaacttgcctttgtatagtataagcatcttacattttgaggccttaaaatgaaaggaggaacacagtatcaacttccttgtttaaactttgaacaggccaatttgtgaattaaaattctgtcagagcctctaggcttgtgtgtttctattgcagtatattgtaggatcacttttcctattaaaaagaaaaaattaatataacagctccaaattaacaaactcagaaagccatttgtattgataattccttaatttacattttaaaaccaagcatatttatttgacataaaattcaaatattaacattttactttatattatataataaatgaattatttttactccagatgcttgcttttgagagttttcagtgccaatgttcatattttaaaggttatttttagcatcggaacatctacagttcattcacagcttcttcatgcagctgatgcgcaaagttttgcatagaggctccagaggcttggaatggtcctagacctgttgcatgcaaagttgggactatagaaagacaatagtcctttggctggttgtccgatctgtcaaaagggcaaaatttttcttgttcagacttactgagattgattatggcctgtacagagataacaggtaccatgcaaatatcaatccatttaacaagtttacttgttgattgcttactattttaaaagcattgattcgtcaaaaggcaagtagcaatagtagtttaagacattgacttcggagtccaacagaagtttataggagttctggctccaccacttatttggaaagtttcttaacctttctatgccttaatttccttatctgtaaaatagggatgttttacatggatatgaaatatccatataaaattaaataatgaaatgaaataattaacattggtcatgtgaagaaaaccattattgttttcttattctgcaaattaaaaattgcatagtatgtcatatgcagataaaatgtgtatctatattattaaaattttgcaaattaaatattcaatatctcatatcaatttcaataaatttatccagtgtaaatttcacaaattgtcaggtttttattaacttagttttcttattttaagctaatattttagcatctaatcatgtaaaaatactatgactttaatcttatttctcagttaagccttactatatgtatttgatttcaaagtgaaatgctttgaattttcttgtcatctttaaaatgaaaaacttcagcttaatccatgaaaactcaattatattttttatttttaaataagaattattctgagacttttgaggcagttgagtaaggaggttgtggcgcatactgaaggtaggttaagataggttaatgtactaggtacttgtccacagtaagtaatgtacaagtgaagcttgagtgccacctcggctaggattatactcagtcacgctcataaatctaatggtctggctcctgtgcagtaattttatgctactaagttttttcctgtttctatttgattatggacatacaaaacacaaatgttttgtatgaattgtaaatatatagacattgacgtttaccatgctattacagaataaagaaaacttaataaaaaccaattaaagtatttttgtttctgtttttaagggtaatcccaagatatgtgtgaaaacaaattttcatagtctatcaacagaaaatggtttaccttaactttacaactgaaatgtactgacgtttttgcagtgcactgtggtggaaataatttcttcctatgtaaaccatcatttacttgtatctcgcatgtctttgaaaatgataggcaaatgaaatttacaacaacagaggactttaaaaatagtatagaatcatgtgtaggcattaaaaaaatcatgttttaggaaaatatcgcttccctttaccctcatccataggatattggcattaaataactcaaaatgatagtacaaaccagtatttcccattttctctgctttgtatattgctgcattatcattcatacgacattcctattttttaatttatatctcgtatctttacctacttacttgaaatttttatgtatccaaacaagacaatagcggcaatcatttttacttcaggatttggcttcatagtgatttgctttaagaacttgtcctagtttcactgattcccaaagcagggtctgttggaaaatatgtcattgttgaattaagctatattttgttttagtcactttcctgcctatcagttagcaagtgacaattactggctaaaacatattttatgatgaataagcctctgtgtttagaagatagtaaagacattcatggaagctcaactcactttagaatgagagcactcgggacactagataactgtacacaaacaggtaatttcagcattatccagtttttaaattacactcattttatttttggcagtgtaactctggaatgtgttgtgaatatttttcgatgtggtacaaattacttacagaatgttttgtcttcatctgatatcctttcttccctcattacagatgtcatatactttccacctaaaattctgacaagtgttgggtctaatgtttcttttcactgcatctataagaaggaaaacaagattgttccctcaaaagagattgtttggtggatgaatttagctgagaaaattcctcaaagccagtatgatgttgtgagtgatcatgttagcaaagttacttttttcaatctgaatgaaaccaaacctcgaggaaagtttacctatgatgcagtgtactgctgcaatgaacatgaatgccatcatcgctatgctgaattatatgtgattggtaagaaaacagaggttttgttcattttgttccacaacttgaattttcattatggaccctccttatattagagtcctgttaaagatgtaagaaaaaatttttttcattgaattttttggagtttttgctttatattaatattttaatatgtttcaaatagatgtcaatatcaatatctcatgtgaaactgatgggtacttaactaaaatgacttgcagatggtcaaccagtacaatccagtcacttgcggaaagcactttgcaattgaggtatcataggtacgtattatttttgctgttttgtttttctgtgggcacagtgagataaaaattttctttagaaatattacaacagtagtcttacagattatttgcttcctgaaagaggaaagtataatataatgaatcaggaaatttttgagggattatataaattggtgattcttgaaaaatattcacacctgagattaaaaaattgtaatttgtttttacttcaaattatcttttctgaaaatcaatcaattctgaaaaatttgtattttaactcttgaatgaaatgcaagaaaatgtagtttatatatattttaatttgacttagttgactagaggagaatgtgaaagattataaaagtttcgtatcatttggctaaagattaatgttttggaaaaaagaggtaaaaacagattataagagataatatgaatggtttttagaactgagtgagattacttaggaaataaatacttatggttaataaagggtaatgtgttctaatgagaagtaatttgtgcttgtttatttttactcttctatgttttaaaaagaattcaaggcatcgtcttatagtggtccctttctttctaaaatcattttatctaaaatgatacaacccttgattatataatagatttttatttttaaaaatatcccatagtagtagtcaagtaaatatatactgctgttaaacactgtgtcccaatttatatttttatttgtagtggagactttcaatttgtataacatgctcatttattcttaaaatataaattttcaactagaaaaataaatcccttctctcaaatactgtgatctgaagtctattcctaatgctgccagtctcttcttatgtagcgttaggaaaaaaatgtggcaattcgtacatttctcaaatagctgccttcatcctacctaatatgagtattttaaaatcagtagaattgttcatgatatgaaattttacttttataatctgtctttacattcttttcatggcattttcacattagaaaaggtgtttatggaaaactattatgttaagccccatgccttgtttctcttattaacatttacagaataactatgaaactacatttacttgggtgagtttcttaacttccctaagcctcaatttccttgtctgtaaaacagagagaataataggacttacagtgtttctgcgagagttaatgacatatttcatctaattataatcacatggtataatttctccttgtaaatattcaatatatggtttttgctgtcatgataatgatgccaacttttcgatttcaagtgtactagtactgtgcttctactttgttcttattttctacccccagatgacccctcactcctcattttcatttttgcccacgcaccaccatttattcacacacacacacacacacacattcatgattgtaattttgagaagacaagaaaaagaagtggtatagaaaatagaaaatgacagaagaatatagattttttagcttcttctaacttcctcactcccatctctttggaaagagtaattgctacttcagctatttaaatatagtattcagagcaaacattggcccaagaggttatttcaaagaagaggaaaaagactttatgtcaagtttgtccaacccatggcctggggcccccatgtggactaggatagctttgaatgcagcccaacacaaatttataaactgtctgaaaacattaggagattttttttgcaactggtttttttttttttttttgattcatcagctatcgttagtatattttatgtgtggcccaagacagttcttcttccagtgtggcctagggaagccaaaagattggacacccctgctttatgggttctgaggtggagtgttggctaggactcacttataaaattttttttaaattttcttttctgagaaaatgaggaatatacatggttatataattcacatacatatctgaaattggtattatattaacttatattaatttgaactagaaaattatattcaccactcatttgtggtgaaatttaattctttcttcaaagtgtgaggaatttgccttccttgccatctcaggaatgctccatgactactttcatctatattttaaatattctatcactaatacataatgtttgtttaattttcaaattattgtaggttctgtctctaactggatcattttcttctttttagagtatttatttcatttgcatccctgcttagtgtctaatgaaatatttaataagagttactgtcagtttctgtggaaagatatagaattgggaaaaattaaaaaatgcctttctaataagaatgtctttttttagatggagtgaaattgtctgtattttatttattttaatttaatttaatttaattttattttgtttttgagacagtctccctctgtcgcccaggctgcagtgcagtggtaccatctccgttcactgcaacctccgcctccccagttcaagcgattctcctgcctcagcctccctagtagccaggactacagatgtgcatttgtagagacagggtttccccatgttgcccaggctggtctggaactcctgggctcaagtgatcagcccgcctcagcctcccaaagtgctgggattacaggcatgagccaccgcaccgggccttctgcctgtcttttaaacttggggtccccagtccctgggccacggaccggtacctgtctgtggcctcttaggaacccggccacaaagcgggaggtgagagagcagcattaccacctgcgctccacctcctgtcagatcagcgcagcattagattcttagaggagcagaaccctattgtgaactgggcatgcgctcctcatgagaatctaatgcctggtgatctgaagtggaacagtttcatcccgaaatcctgaaccatctcccatcccccattagtggaaaaattgtcttccatgaaaccggtccctggtgccaaaaaggttggggactgctgttttaaacaacaaatcagaattctcagatatcttcttgttgcttttattaatgtatactaattgactatttttgtatcttttaaaggagcagcctttactgttctgatattccatctattcatcccatatctgagcccaaagattgctatttgcagagtgatggtttttatgaatgcattttccagccaatcttcctattatctggctacacaatgtggattaggatcaatcactctctaggttcacttgactctccaccaacatgtgtccttcctgattctgtgggtatgtcaagctgcgttgtgtcttcatttgtgttagcagatttgtatgcagattgatgcagatttaatgttatattttgccattttctgatcacattagattttgaaaaaaaaattgttcctgtttacagtggtattgagaaaatcagccttaggaagttttacagttttgaattcatttcaaattatttatagcagactttttttagcaataggaatattttctgcacactattagatgaaatacatgggtcattatgaatgaattttagtagtgtttttctaaataaggcattattttatgtttttgttccaatgtagttatgaaaacatgtaatatttgtaatccaaacgtttaatttgaatattctgaggttctcaataatctgagtactcataactcaagcctttaatttgtgaggctatgtagggcacagaagcatttaaaatagctaaattgaagtggaggaaatagacaacaatgacatacattatattttaaacattcttttcaaaaaacttttgatttcaaagatattaagagagcccttggaaaatgtgatatattctttccggttcattgtgaaatctctgagaaatgattgtgcaacaggaatgcaaaaatatcttttggtgctgttacatatgtataactaaggaagcttttgtagatcttttctaaatgtttgttttcaagataagatgtctaaaaacaaaacaaaaatgggattttcagtgaattttcccctcaaataaaatattcctcagtaggaaacatgttagaataatgttccataaaaatattaatatatactattttgttgggggattatgtcaaaaatcaatatttgagtcattatttttcaattaattaatacacatttgaattaaaacctataaccaaaaaatacacgataagattgtcttaattataagatttctttttcaatgtaaagtcccaatgaattctctccccactgtttaattccattttaagtgatttttactgcagtgatacttaatatcccaggatagcaaggaaccctcctacactcccccaaacatgcacagataataacacactcacttataagatatgacaaatgaagcctggattcagtaacatatgttacttgaataacctatggtgttatccttttcaaaactaaaataacgagtttaggttgggcttatattgcctacttagtactagaaagtaactcaacgttgggatccaaataccatctccacttattactagcctttaaatccggactagccacacaggcactatgtgtctgttttgtcatccataaaatgtagacagctcctcataccttcccagcatgggtattgagggaatcacgtaaactattgaacttcaagcatatcctttctgcagactggatattcactgccagtctgcagaaaggatatgattcatatgattcagttaattgcaaacacagatttaacctcttacagtctcttgaatattgatacttcctttcctgacaagaaattatcaagaggtgaaatacagtatatatcatcttcctgggttggtggagaatgtctttttgttctatgaagaattgaataatcatgataaactttacatgacggaaaaagtttaggtatttttgttatcaacagtcaaaagtattattgttgattgcttaaaaatgattttaaaataccatatgaaagggagactatacctttacacagtgttggtttttggcaagtgagacttggagcaagagaataataaacacccatattgtgccaatccaggtattaagttttccctgtgaatcataacagtagcatgatttataagacatggggaaataaatcaagaaggtaaaccctggaactctatcgtcagttctctcttaatttttcttacacagagtgtctacatttggccttagttatggtttgggttatttaggtttctttttgttggtggtggtttgttggttggatggtttcatacattagcccttcagcttccctttttgctactgcagttgtttcctgcatattccagccaagggccatctctcactttagattgtccactggcaggggtgactgtcaaaataatgaccaagaggagggccattccagctgcaatcccagaggcctctgctgtaccaggcattgaccttttaggttctgagccgtgggcaggtgtggagggcatccaacctgagcagttctggaggagatattcctcaggagagcacctctttaccagttggtatggatgtacttaatatttttaacaactgttttgacataccaactgaatatatgtcctctaaatggaatcttctagtcttagtgcagataatcaagacatgactatgtaaatgtagtgtgtatcataaagttgatgcttggagtcataacagagttagggcttcagagacgcactgttatgcttgggctttcaggcttttagtttaaaatatgccacatttccatattgcctgttattgtcaggaagattggccctcaaagttaaaaattaagaacttgggggaaaacttatgtagtgaatctaagcctaaggtagtttttactttagctctgaaagcagcatcataaaaaggtgataggaaaacagggaagataacctttttctttgcatttctatgatttttacattacacctttaaacatgtcttgttatgtacatatacgtatctattttaaaaatcacttgctattcagaccatctttgcctctattactgcccattaaaagcctgttttcctcagattatagaaaaccaaggctttgctctgagagactatctctgaccttgacctagaaatatttaatgatacacagcagcataagagtttcacactcacacatattgaaattgatgcagtccatgggttttttttttttttgcctttaattaaagttcaatggagaacagtttgttattgatatttagcatgtgttcagcatggtatctttttttttttttttgagacggagtctggctctgtcgcccaggctggagtgcagtggcgcaatctcggctcactgcaagcttcacctcccgggttcatgccattctcctgcctcagcctcctgagtagctgggactacaggcgcccgccaccacgcgtggctaattttttgtattttttagtagagacggggtttcaccgtgttagccaggatcggcatgttatcttttgcttgcagagccaatggttcaatttctaatcaggtactactactagctttcagagtaacatgaataatgtattgacttttttcagtcaagtctatatttgcgaaaaagagataaatccctcttttaatatatcacataaagtaatagggaaacaaatgagataatgagtgagaaagttatgaagaagatattgcttgatgaatacagatgtatgaaaatataacacaatgtttttaggcattattactatttaaattaccatcacttaatactattgtaaaaatttctagtgaagccactgcctccatccagtgtgaaagcagaaattactataaacattggattattgaaaatatcttgggaaaagccagtctttccagagaataaccttcaattccagattcgctatggtttaagtggaaaagaagtacaatggaaggtaccttttacttagaacttcagctttcctcattaaatgctatttttataatatgtaagagtttaattgcattagattaattttattggcataaaagtacattctcctgtattgtgtagctattttcattaaatagatttatctaagtctaacttttttaaagaacaaagtttcctgaaatccatcattccctgaagtgtgttttatagaacgttggttgcatattatgttccttggaaaaagattaaatggctaaatcagtttaggaaaccctgtatcactgtatcttccttgtgtagtcacggtatacatattacatattcaaggtttggagaggtccttcattaaagaaaaatttgtgaccttatttcatctcatgttccccaaactaatttttccaaggaactgttgtttctctaacatctgttgatatcttttagtacatacatgtttagtggaatgcattttggaagaagctgcttttcaaacaaacagagtcattcccgtagtggcaagtgtgcctatcatggcattccacatcagctttgtgacggcagcctgcaaagacctagaaatatcagaaacccttattgtatcattagatcacaatgatatcaactaaaacaaatgtgacagtttagctgctattgaagaatactgaatatcagcgatttgctacagtaggtcctatctaaccaatacgtttaaattctttttaaattcttaaaacatctttgtgggtagaggattagtggacagggattagtaggagggtaagagagtgtttgggaaacaaggttgcaagtaaaccagttcaaaatcttgtcatcatcagcaagggagtgacaagataaataagaaaatccttgacttgaaggagtttacaatccaagcctaattgtgactatttctgaaggcagagaacacagaatcagttctcttaattttggaatagtgttaaggtttaaaataaaatgtacttcagggccctttagatacatatgtgttggtaatgatcaatctaatgctttgacttattttacagatgtatgaggtttatgatgcaaaatcaaaatctgtcagtctcccagttccagacttgtgtgcagtctatgctgttcaggtgcgctgtaagaggctagatggactgggatattggagtaattggagcaatccagcctacacagttgtcatggatataaaaggtctgcagagattttgtaaatgtgttttgaaagtgcataagtgtgtgcttcaaatatggctgaaaagtatttcttcaaaaacatatacacaacttgtcattttgcagttcctatgagaggacctgaattttggagaataattaatggagatactatgaaaaaggagaaaaatgtcactttactttggaaggtattcccaattttaatattaatcttaaattgtatttttatactcttaaaaatttacttcatggtccataatcctgttattaatcttcggaaagctcaacaatcctgtattttcattgcatttatgagatgtatttaaagagagctaagatgtacagtggctgaagcactggcatagtgttaggagactttcattctcttcttagcttcacatattatagttaccgtcagtactatttgggcaaagttacttagactctttgggcctcagttttctcatctgtgtaaatgtaatattgaactagatgataggcagtgtttcttggagtctaaaaattgtattcatatttaatcctgaacaatgtaaatgtcaccttccccgcacaccccaagggcatctaacacatgacagagtattccatttatgtgatggcataaaaacagtggatagtcccatatatgatggctgtttagcctagtaattttcaaagcatcctctcccaaatgaactgatttctatttcaagtgaatagtttatttggtcagtaaatgccaaatttaagattgacttgggaatacaacacatgaagtcaaagagtatttctgtcactccaaatgtgaattgtaagtttaatacccaaggttgaatgagcacatgtttgaaaatggtttcctgatgtaagaccaaagcctctgtaaaagttgtggtatataagaatttatgttcatttggtttctaaatccagttactctataatttcatttggtgaataatcaatgcaatttctaaagtcttccatttcaatatttcttaaaataattttttattcttttatttcatttcttttatcattgctctccttaaaaaatttagtttcttttgttattgctctcttttctttttctagcaaaccattccttcaacacattttaatatttccaacttaaagttagcattagaactgacagacatttatgagccatttattgtattctgaacacttcatacagatctccacctcccggggaattcaggacctgtattctgagagattgagtgggcggttgaacccaccgcggaagggggcactgctgaataagaaacaagagtcttgcccgacagattatttttctcatatttttggttttatctccatgggcactgttccagatacctgcaaacttctacagtgaaggacaggcagtgatgttcccatgtttgtggtagggccagctatgagcagaatttaagtagcttttctttttctttgatttgtcctctcagagctgtagtcaacagccctttggcctaggctacagctaccctctcccattgcaatatactctagaacaaaacagttgtctttctccagacagttcttatgttttcctcatatcatggattccacatttcctcagcaatgctgccaatagaagtttctgtaatgatgaaaatggtttatatctgcattgtccaatatggtagcaaccagccacatgtggttattaagcacttgaaatgtgcctagtgtgactcagcaactgaattttaaattgtatttaattttgattaatttaaatttaaatggctgcaagtggccagtggctatctttttggacaacaaagctctatgggttctttaggggtgatttgtgggagggagacaggacccttgctaatctaccatctttgcagaaccttgaatgccttttattagtcaatttgcctttcattaattttgttttgtgctgttttgttgtgttttcctaaactgagataatagttcaatgattacggttctccaagcctatgcctcttaaaccgggataagatttgcttaaggagtaagccacaaggccacaggataagtatggcactttttaaaaaatatcatttctctggcatttttaaaataataaactttacgttaaggcagttttagagttacaaaaagacggcaaagatagtacagagaattcctatgtattcccacaccaagttttctctagtattaacatcttaggctagtatgatacatttgttacaatgaattaaacaatattgatatgtcatcattaactcatctgtaatttatttcaaatccaaatttccttagcttttacccaatgttctttttctggttcaggattccatccaggatagcagatttcatttagtagtcatacctccttatgcttctcttggttgcaaaagtttcttagatcttctttgtttttatgaacttgacacaattgagaagtactggtcgggtattttgtagaatctccatcaaatgggttttgtctaatgttttctcatgattaatttagggttatgtgtcatacctccttatgcttctcttggttgcaaaagtttcttagatcttctttgtttttatgaacttgacacaattgagaagtactggttgggtattttgtagaatctccatcaaatgggttttgtctaatgttttctcatgattaatttagggttatgggtttgggggaggaagatcacagatgtaaaatgccattccatcacatcatattaaggatacattctaccaatgtgacttaccatagttgatgttaaccttgctcgtctggctgaggtagtgttgtctggctgaggtagtgttgtctggcttcccactggaaagttactcttttttctcctttctccattttagttttaaaaatgaagtccccatgcttaaggagtaggagtcatgttccacctacttgaaggtagaggacctacatatattatttagtgttcttctgcatgggagatttgtctgttctcccacattaactattttatttattcaatcatttatttatattagtatggacaatgaacatttattttagacttggtttgtaatccaatactactttattttgttgctgaaaatattcctgcttcagtcattgggagctcttttaattgactcatgttcctttgacatgcccccgtcattgtggggttttttattttaatttttgagtactggtaagttcgactttattaaaattaaaaacttctgatctgggaaagactgtcaagaggatgaaaagttaaggcacagactgggtgaaaatatttgcaaaaacacacatctgataaaggacttataaccaaattacacaaagaaatctttaagattcaacaggggccgggcgcggtggctcacgcctgtaatcccagcactttgggaggccgaggcgggtggatcacgaggtcaggagatcgagaccatcctggctaacaaggtgaaaccccgtctctactaaaaatacaaaaaattagccgggcgcggtggcgggcgcctgtagtcccagctactcgggaggctgaggcaggagaatggcgtgaacccaggaagcggagcttgcagtgagccgagattgcgccattgcagtccgcagtccggcctgggcaacagagcgagactccgtctcaaaaaaaaaaaaaaaaaaaaaaaccaagtatctgaacaaaaacctagccaaagtagatatacagatgacaaatatgaatattaaaagatgttcaacatcattcatcactaaagagttgcaaattaaaacaagataccactccacatctattagaatggctaaaatccaaaaaaaaaacctgacaatacaaattgctggtgaggatgcagggcagcaagaacttttattcattgctgtggaaatgcaaaatggtacagccactttggaagccagtttggtaatttcttacaaatttaaacatagccttaccaaccacatgatgcaacattgcatcctaggtatttactcagctgatttgaaaacttaagtctacatagaaacttgcacatgaatgtttaagcagctttagttatattcaccccaaactagaggcaactaagatatccttcaaaaatgaaacgattctgtatacttctgaaatggtgggtatatagcactatgcatttgccaaaactcctcgaacttcatagcacaaagagtgaatcttaatgcatgtagattaaaaagaaaatcatttaggaggttgaaggatcccaggattgactgtaaactgtgacaaaggaatctacctgtattacaagtgtatgaagcaacttcactgaaggtggtgggagaaaaggccactttggaacttgagtggagttgttggaaatgtgtggaatcttaagactaaaggcaaaagaaactgtacataagcactgtactctagttgatacagttctcacagggctatgggctaacaattatggtactgctctacatgtactctggaaggggacaagcaagtaaatggatggtggatggtgggacccagatttctcactgttggattgggaggttacacacaagcacaggatgatccatgtggcaatgaattagagttggggatataggtatgaacttatatctagcttaatatagatatagctagattctggtttaggatacatgtacattttcttgatttgtaaggtaagagggcctaaaagtaatgacatccagtagtaagacatgtgcccagacttgtttctaattaccatcgttcaataatagaaacaagggctattggaagaaatggctaattttagggttggggcagaaaatatacgagattagcctggaggatcttgtagtaccagaaagtaaggaagcttaacattctcttacttgatggttaccaaaaaagtattcattaaaactgacatgtttttttttcaaataaaatgcaacatttgcatgactttgaaacatttctttcttgcggtggctgctaaaatcttactttcaacctatccagatgattccaagttttgcagggatacatgtatatgtgtttatttttctctgccatttctaacttagaggcatctcaccggcaagaaattgagatgtactgttctagtctatgatatacagtccagccttctctgtctttataagggattgccagcatttaatcttacctgccataggtgaagttgattggggaaatggggtacactgttaacctctgtggaatataagaatagaattgaactagacacttattttacattcggatctttaatgacctgatattattatttttaattatatgacagaaattctggggtgccatagacactgttttgatggcctctgttactcattaacctttgcagacattcttacattctagataatcttccaagagtatcagaggaaaggaaaatgaatgacaaatcttactatgatcaatatatgatgattaacaccttcacagctcttgttgttgcttttcattttctgagggttattccttgtttgctttttagatgaggaaactctctactccttatgtctttcatttctctaaaattagagtgaaacttcttggtagaaaagtgtcttgatcatatccctactttattatcttcaagtgatttattctctgggccttaagaaaaaaacctcaaaaaggggaaaataagtttgctatgctccataacgatccagacaccttcatggagactgtggcagaggcaaactctatcccacccatctccccagcctctcagccttgtaatagtacctgccctgatctggcccctgcctcctaataagaaatgtagaatgagagttatgtgagctcagttagtataaaaagcactgcagcccttaaactaatcaatttctatatttactacagcccctgatgaaaaatgactcattgtgcagtgttcagagatatgtgataaaccatcatacttcctgcaatggaacatggtcagaagatgtgggaaatcacacgaaattcactttcctgtggacagagcaagcacatactgttacggttctggccatcaattcaattggtgcttctgttgcaaattttaatttaaccttttcatggcctatgagcaaaggtaagaagaggtacagagtggtaatccattgcctcttttaatatttaacttttgcaaactctcctattttaaattatctttcaagcagcctgcaattctctgcatctgaaagtctctctttcacctttcatttcctttgtctggaaaaataacaaagtacattgtacaatgatcacataatacagtccttgagctttcatttgggagaacattgttgtaatggtgttataatatatgagaatgttttagtgaatctaatacttaaatcttttggaccaatggagatctttaggtcaataattctctctccctatgtacatatacatgtatatatttatattcatacatacacacatataaatatgtaaaaataagtatatatcatattaaatatatatttaacactatgtaaaatagtaatagcatgacatgttatatggatgcaggttaattgctgagacttaaaattactatggacttcattgaatgtgagtagcaaaccttcttgcattaattttgatatatctgattaatcggagaattgagacccactttcaataggaatttctagtctagattacatattcaaagtgtaaatttttaatggaaaatacaaattttctgtgtctctaccaatctataaaggcctttccaactgttacctcctttatgaaatctttgcttattgctttaattgaatatgccctatctcttctttaaatctcagagtgcttcctgtctttcttattttatgtcctgtttacattatgattacctttgtatttatagtgttaagcatcgagttccatagcacccagctcagtgttttatgcttaacatttcctaagtatatatattctagaaatatctgtagaatgcgtcagtggggtaggtagtgggaattgtaatgtgagaaaaactataatggttggagtgtccagagcctaataggtaagacaggtattaatgaaataatcatacaagtgaatgtctatttgcaaactgagagataagggcctgcaggaaaggaatataattttatgaaaggaatgaaaaaaaggaacctgacctggcattgagattcagagaagccaccttgaggaagtggtactgaactgaaatctgaaatgtgagtaggaattaaacttccccaaaagatgtaggggagggcaggaaaagcattggctcctaacaagagcagccagatcaaaagtctatggcacaggatagaaaatgaagaaagaccagggtggctttggtgtgggaaatcatggaaggcagagaggtgcgttgagacttggccctcagggccttgcaggcatgataggaattttaccctcaaatgtagaaatccgctggaggcttttaagtgggatgctgtgcagatggtgttaaaatgaacagatttgtgctttgagagtatcactccatcagtgggagaggatggttaataggcttgtgcagtattccatatgagaatgcctttttgaatatatcaaaaaattgctttttaaggttttagggagtatcatgtttctcttcaatgtcatctattcccatatctctctgtttaaatgactctcatgatgcaaaagtaattgtcatgtatcatatttatttgtgtaaattgtctgtcttctcttccttattccctttagtaggttataagttcctcaagagtattagtagatttttattaatttttaatttaaaaattaatttccttcttttcccctcagtaaatatcgtgcagtcactcagtgcttatcctttaaacagcagttgtgtgattgtttcctggatactatcacccagtgattacaagctaatgtattttattattgagtggaaaaatcttaatgaagatggtgaaataaaatggcttagaatctcttcatctgttaagaagtattatatccatggtaagtttactatactttagtaagttgctctcatggattaatatgacactacagattattaattctattaatatagccagttaatgaaaacttcaaaaatatagaggatactaccatcctaatacatataatcctataacctttatcaaaacatttaattctcttcctcttctcttctcttctcttttcttttcttttcggcagggtctctctgtgttgcccaggctaaagtgcagtggaacaaacatggctcactgcagcctcaaccttctgggctcaagctatctttccacctcagcttcctgagtagctgagactatagacacacaccatcacacccagctaattaaaattttttttttttggtagagacaaggtctcactatgttgctcaggctggtcttgaactcctaagctcaagtgatcctcctgccttggcctcccaaagtgttgggattacaggcatgggccaccacacccagcctaattctgtttcctttgacattttctcattttaacattttatacaggggttatcatatcatatcatatcatatatcctatcctatcatatcatatcaattttctcctcatttctttctaccattatttttaatgatatagcattttattccaaagtccacttaaactgtttgagattctttatgttgcttccagctttatcttttcttaaatcattttttaacagcttctgatatcttctgccaaattgtttcctcaaactgtgtaccaacttataatgccactaacaatgagtgggaatgctagcctgaaggtctgaggagctaggactgggtgacctagaccagggtattctcccaaagttagaccagttattccaggaggtgagtcaagcacaaagtataagtgcacaagacagcatttctaagtctgagtaaggattgaggaaagttaactagggaagctaaggattgctatgatcttattatacaatatcattctaaggactcataccattattttattccagggacctagaatttagcatcagggtaaatttatttacaaattgttgaactgaatttagttcatcaccactgatgcgcaggtagtttctctctgtgcttttctttaaaccatgaggatataaaatttaggcttcacagagatctctcttcttctggatatattcttctagaagaatattcatatattattagcatttgtgaaaatcatgatggatccatctggagctttgctatagggttggtcattttccatggatcaaaatcccagatcttgcaaggggtctcgtggtctccaccaccattttgtttgcataggatttcacaagactttagtctcccagctaccttgaatggaatggggaaactaagtaagctgaattcctattaaaaaaaggagtattgcccactttgggggtaagggagaggtagtagaacatattgctctggaaaaggaaatgaaggaaagaaaaagctcatacaccctgcacttgaacaaattggctatcactggaacatgcctttgaaaaattgcaatcttctgtctctggctaagatttttagaaaaatatttggaaaactattgtcatgactagataattagaagtgcttaagtttgttttgaaactcccttgataatttaatccacaaataataagtaatttctatgtttggaaatatatgatagtcactttaattcttttttaaaatgtatgttccactcattactattaattttgtataaatgagccttttacgtatttttctcctcagatcattttatccccattgagaagtaccagttcagtctttacccaatatttatggaaggagtgggaaaaccaaagataattaatagtttcactcaaggtaaaaattataattttagtttccttttacaccaatgtgtgtgcctaatttgtttgcagtaatattgccatctgattattctttttctgatagaatcatggaagagtccaaagtcttctgtagatttttcatggtgaggttccaaaggaaatatttttttcctctaaaaataaaactggagctatagaaatagagtcactgggcctcttatatttctgattcatcttactgtacttggaataccaacattttgattttgttattactttttaaattgtcttcaaatctaagcaacctagcaatgatatttcaagagataaacatttcatttgttgttagaataaaaatcattaaaaaaattcatacatgtattatccaacagatattaattgagcattgttctaagcactgtggattgaatagtgaacataagtttctgcccttatggatcttaaataccagtgctctaattgagagtgatgggcaaaaaataattatataatgtcagatagaaataagtgccatgaaggaaaacaaaagcaagataaagggatggcattaaatgtggcactttagttgatagccagaaatggtctttctatggaggtggatgatattcgagtaaaaccttgcaagtacagtaagaccctacttgatatagtcaatagattcttggaaactgcaactttatgcaacatgaactacaggaggtccttgaataacatcattttgttcaaggtagtttcattataatgttgatgagaaaaaaaaggttttgttatacattgccatttcacttaacattgcagtttccaagagcctatcaatgatgttcagtgaagacataactgtacaaatagcaaaagcattccaggcaaagggacagtgtgtgaagagcccctaaagagtggggatgcttggtggttcaagaaacagcaaggaaatcagtgtgtgtggagtgaacaagatagagattggcaggtgtggaaggttgggtcctccaggagtagatactgagacagtcatcataacaagtttgacactttggcccattataatgtaaaaatgatcaggtagagaggaatggcaaataaataaatttgaaaaaatattttgctaatttacagtagatatgatgctgaacaaaataataagtattttattaatgtgatcacaacatatttttatcttcattttttatttttatatttttgaaggtaataagagatttgtgatgaattcagaaaatgtctactataatttttgatacagaaagaaattaatatttcctcaagtttctgagttgtgtaaattgtatttctttttcagatgatattgaaaaacaccagagtgatgcaggtttatatgtaattgtgccagtaattatttcctcttccatcttattgcttggaacattattaatatcacaccaaaggtattgtacttgaggttaagaatctttacggcaaaagtccttacgcgtattcaaaccctgatttaaaaccttctaaattaggaatattaaagtcttctaagtgcttttatatgtagtctgtatacaattaagatagcataaaaaggaaaggcctgttgtgaggaaatggcattccattttgctaggactgtaagagttaaagaatgaggaaagaaacacgaaacacagcttaacagttaaagacaggttttctttagataaaacctgaggggcttctggccaattttgttcaggagcccctttctcttacagactaagagtatgtattggttttagggtgagggggcttatcacaagcttggaatgtttatgtgtgagggagaagtttatggcggggttggaatgtctctgggaggaggggaggttatcttggggctgacatctttccagctggatggggagggttatcttggggctggcatgtgcctggtcagggaggatggaatgtttctggttggagatgttatttgtggtttatggtaatgctgaccttagccattaggctgatgccctttggatttaggtggtttttgattaaggggaattttaatatgaggtgcttgtccatgatggtgatgctcctgctctgtcaaggacaacataacttcaaggaagaatttagttttttaaaaaaaatgtacatacattcaggaaacaacaagcttataacaggaaatcctaagcagtatgttcttggaggtggcaaaaatggctttcagagttctgcagtttgggttaaggacgttttgtggtgaagtgggtggtaaaagtagccttttagtggtgacctggagcagtcagttcatttatgatcagcaggcactctgctttttagagatcagcactgtgtggctccagtctgcttggcttgtcaggcaaatgcctgagttccgtggatggtggcatgggtgccatgatactctctgtgctgagaagtccagtgtggttattttacacatgccaaatctctgtagaaaccatcgtcttcaggcaaaaaagagagagaggagattttagaatctgaatttatcttgtagttaagtgagttgatggggccacatcaaatggaattttttctggtacccactttgtgaccatttttaatatttcaatttctttgagagaaatctatccagtgtttagcatggtgcttggcacacagctttcaataagtattggctatttctattattacagtgattttcagcttgggtctagataaaagtttggtagaaatcttcatgggctagcatgtgaaaatgcatctgaccctacggaggcatagttgatctggtggactaatttctagcttgtctgttcactaactgttcacattttcaatatggatgtttttctctaattttgatgccctgtttatcctttgtagaatgaaaaagctattttgggaagatgttccgaaccccaagaattgttcctgggcacaaggacttaattttcagaaggttgctttttcaattttttttaacccagaatatatacgattgcaatctagacgccatatgacttatagagcattaagcatttttaagatttaaaaggtcatattttattcaattcatcttaatatatctgttattatatactttcaagaatagcaggatgcagggatttgaaatcaggaagaaacaaatttcagcgcatagtttatcgtatgagagttcacaatatacatatgttgcttctgtgtcacagtacataataaaataaatattagaaagttaagggtcaatctgatggagaacagatatttggatacactttttttggtataaactgtatttaggcaaaaggctggaatcaatatttttaatgtctataattatctccataattatttaaataaattagaaaattatataatcctcaaacattacaatctgaaaaatgcagtgatcataataaaacttatatttatgcagaagttccattcaagtacaagtactttatgagagttagtcaactataataaaataatttgtatttacttctatagtaggatttttcagaaagctctaaatttagtgactgttttattaattctcataatgtcccttgaagcaaagctagctttccactcataaaactggaaaaatagaattcagtcaagtcaaaatatacagatttttaaacaatacttatttggaggttattatccaggtttggtgattgcatctttatcattagtcacttgttaaaagttttcaatggtttccttttgaatacaagatataaactaaagccccctgaagctattaatagtactcaaggacctctttctacaatctgttatcaacctacctatacgactttttctatccctgggccttgatgatacctttactgttcccatccaccttcacagagccttccttgtacatgaagatcttgctctaggcccttctttcctcaagccttcctttaaccagtgtaattcaaaagaatttctaccccctttaagttcctagatcattgtactgtttttttaattgtggatagtgctctgaattcaaagactgtattttatccatcacaaatatttgtagtactcctcctgctgttttttatgtgcaaagcactgagatacatattcttacatttattaagatttttacttacattctcaatgtttcagtttcctcttctgtgaaataggctgcttaccttattaggttgtttgcgggactaaagaagatggtacttgtgacatagtaaggtctcaacaaatattaattattattgtacatatttatgtattttatattactattattattctttcagttaccctatgggacaagtgttattctctctattttgcaaaagagaaagctgaagctcatagtggttcggtaacttgttttagaggcaagattagcttaccagtttgtctggctttggagcctgttctaatagcagctgttctctatagcagtggcttctttttctttctttcttcttcgccatgacccacagtgaaaaaaacttaggttggtgcaaaagtaattgcagttttggcatttttaatgtataaatacgttttaccttccaacctagtacaccatagatacagatatgcaagaccgaaatgaaagatacgcaaagcagctttacttcttgcttgaaatagaatgttttaaaattctattttatttgttaaaaatgctggttgcaagacactaaattgatttcacaacattcgaatggcctatgatttgcagttagaaaaacactgttctacagcttatcaatgaataagtaaacaactaatattgtagacataatgaacaaagaaaaagattgaattgtaatttttcagcaggagaaagaatgccctgtcttcagaagcagcagtagtgttgttttatatacgaacaattctttttatagaaacttcgctttgcctgagtctaatcagccacactcctatatactcctcacctgtgctgttgctcactaagccagagtcttctttcattaaaacagtgttgccgagtttttcaagtaaatattttttctctcatttatcttttactaagaatttatacagtgacattttgtgtagttgtgatgatatttcagagagagatatatatatgtcgttcattcatttgttcaacaagcacatggtgagtatttatatgtaaggcttggctgttgctagggtctgggagaacagatttttcttaccatatgagaaataagacagtgaggtcagagaagagtggctgggttgaaagtagaataggaagagcttgtctccttttgcctctctaaaatagttcttttctattcatttcatccatatattcaatatgattgaatacttaccctataccagtcactatagtatgccctggcattataaggataagaaaaacactatgtgctcctgagtatacagtttaatggggatgataatcattaatacatttatcatggaaatagcattactttttttttgtacaaatttatggggcacatgagaaattttgttacatgtatataacatataatgatccaatcacaaccttatagttgtaaactacatgttgtgaaagaaggggttccattgtgctgagcgcttataatgtgggaacctggcttagtgtatccgtgggggtgagtggataaagttaagcaaattacatttgggccaagatctggtagatgaacaatcattaactaggttttgaggcagagatgtggtgtccagctaagtacctgcaaacactaagtcatgtggaaggcagtacctagcatattcacaaactggaaataggaagactataagactttttcttaaatatgagggttttatgtcaaaaaacctatatacttatctaagtaaaattgccaaattttcagtatataggtatatattaattcagggaatgatcatcttactttttaatgtcacttaaaaagaggctgaaacactctctcttcagcatttaagctctgaaatcttacctatggaccaccatgaagtggtttctcagtgttcaggagggccatgaaatgatcaggcccacatcagcaaaatgcagtttaaacctgcagcaaattatttttcccttttccagaaaatgcctggcacaaaggaactactgggtggaggttggttgacttaggaaatgcttgtagactacgtcctacctcgctgccgcacctgctctccctgaggtgtgcacaatgctgccacaggtcatctgacagaccttatatacaagtagattgaaatattgccacattttttcaagttctggtaaattaaagaaatgtgaagaatttttataatacagtgggtgtgaatgttcttatttgtaggactgattttttaaaaatctctggaaatatttgactttctaatcttataaattattttttaagcacagctaacccacaagatgcttagtttattactagggctgaccaggcgcataaataacactattaggaataaattaggttttggaatataatagaacatttaaagagtaaaggagaatataacttcaaagattttattaatgataaaaatcttctaaaattcattaacttttttctctttagcctgttgttttaatctcctaaacaattaaaatgtacccttttctttttgagacagggtctcgctctgtcacccaggctggagcgcagcggtgagatctcagctcactgcagcctcgacgtccttgggctcaactgatcctcccacctcatcccctttagtagctgggaccataggcgcgtgccaccacgcccggctaatttttgtagatatggggttttgtcatgttgcccaggctggtctcgaactcccaggctcaagtgatccacccacctcagcctcccaaaatgctggacttaacagatgtgagccaccacaccctgcctaaaatatgctttttaaaggaaaaataatatagtgtaactcactttatattactaaacaggaaaaggcaaatttaccatccaccctatgtttcatattcatgttatttaaattatttcatagggctaatagccttatattttctgatgataaaactgaggcccagagtggttcagtagcttgtcttgctcacccagcctgtccatgtaacatctgtggttcaaatccagatctatctgactcaaattgatacccgtgccatcagttccatattaacaatgtatttcttaatatgcttaatgccactaaattatacacttaaaaatagttcaaatggtaaatattgttacgtatattttaacatcataaaaatgggcaaatgatgtgaataggcatttctccaaagaagatacacaaatagccaagaagcacaaatgaaaatatcctcagtgtcattagataatagggaaacacaaataaaaaccacaagatgcccagtaggatggctataataagagacagatagtaagtgttggtgagaatagagagaaattagaattatcatatactgacagtgggaatggaatagcaactctttcggtaaatagtctgacaattcttcaaaaggttaaacatagaattattatatgatccagtaattccattcctaggtatgtactcaatagaaatgaaatagcaaatccacatgggaagttttataagaatactcatagcagtattattcataatagccaaaatgtgaaagtaacccaaatgatgaataaataagcaaacaaacaaaaaactcacactatattgcaaagaaagcagaccagaggagcctattgtttttaaaaataattcaaatacaaatatagtattttttaaaggaagtaataatttctatatcaagtgtttcctttaatttgttctccaaattcagatattttgaatattgattattatgaaagtactcttaacctgaaatttctagacatctaacatgattttcaaaatcttccctaaaattaatctattccacttttgaagctgtcattttccttccccttggtttatattaaatctaaatcctgaacctataattatgttaatcaaatgtgtttttaaaaatccaatattttgaatgtatttctaaaagaaaaatgaaaagaaaacatttatttaaaaccactatatgccagacattgctaacaataggataataccatatgtgattaaaaataattttgccaatataatttcctgccagatcttttttcttttgtatgttccacttccttttctcttttaaaattagtttttctggataatataaagatgaaaatataggacaatatgaaaacagctctatattaacacaatattttaaaactttctgcattttcttcatttttaaaataaataaaaactacaggtaaagtttgtcctgcttgttccactatttccggtccctcctcttcctggaggaacccatgatttcaagaatgctgtagcctgtgtttgtctagtttgtgcatttatactttcctactttcacatgtgtgtatccatgaccaatgaagagtaatcctttgaagtactgaaaatgttaatgtacctttcatattattccaaaaatatctctgaacattgtgttttgagctctctccaagttgatgtagttaatttagttcacacatttggactggtctgtagtattccattatacaaacatagcacaattcatttattcctctactggtggatgtttaaggtgtttgaacacttttttatatttattacaaaaagtgctgcaggaagtatggttgtatatgtctctttgttctctcatgtatatgatatttctcaatatttaaaattttttgaaaaaatatatgtgaatgacttaataatgaaatgttacagttaaatatttgagtttggaagaccacttcatgaaaaggacagtccccttttccacccctccgtacccttagtcttgctctccaaatgcctctttagttaactgtctgacttttggtttttctggtatgtcacctttttatttctaaaaaccatatgcttatgccactatgaaatgtagacggtatctattgatttctggctacaacgaggatttactcccacacattattccctccttgtgtttctacccatattgtcttgtcacttttttcaattccttaagtaatcatttctccaacctcagaaaaatctacttaaacttccatttcttgttcttttaaacagaagactatttcttggagctcccctgctatttttttttttaaataaaaacattagcactcttacgcttccctccatttctccctctactttccaatctctaaatctaagtttatgtttttccttaagtcagggttgatatgatgttctgtgttgtaatttgtctgtggtttatttttaaaaatagaaaaactaataaactgaatttgcattgttatgattatgtaaatattgtgacttactgaaccaagtatttaataatatgtgattacacttctcagtggttccgatgtcaaaggggaattttttaaaaaatatattagatatattccacctgttgatcaaaattgtgccgaattttagttagcttcatttttagtttttatcttttttcttttccttaagtttctaattgtcccttccttcctcttcctccctccattctttcatccattcatccctctctccctccctctctttctttcttttcatgctgtctttctttctccttccccttctcttccctcccctcccattatataatctatgctgttatgttacctattttatccactaccccatctttactggaggtgttgttctagtggactctccaggaactcctctatcctcctacttcaatcaggactaggctttctctaaaattactataagccatcactctaaactttcccttaactggtttctggttagtactgtttcctggattcctttccttcatctttcttaactacacccttaagtaacctcctaagaagtatgcgataagtctccatctctccatgcctgaactgccttttattctgccctcctcgattgttagtttggtggagtatcaattcttagaaatagcctttccaagagaacattgagataattcctgccttaacatatagtatccagtgttgcttctgagcagtcagatactattgtgatttttactcctcactgtttacttataatttcctttttaaacagatgcttgaaggcagcatgttcgttaagagtcatcaccactccctaatctcaagtacccagggacacaaacactgcggaaggccacagggtcctctgcataggaaaaccagagacctttgttcacttgtttatctgctgaccctccctccactattgtcctatgaccctgccaaatccccctctgtgagaaacacccaagaatgatcaataaaaaaaaaaaagaaagaaaaaaaaattctcctcatttttgttgttttgaattttcagtgatgaatctggagtggttctttttttatttaatgtggttattttttgaagagactttcaattccatgtctcctgtcaattctaagaaattatattatttctttgataatttcctctcctcttgtttctttgtttctctttctagaatctgtatgttggatgatggaccctctgcgtagatcttccacatctcttaccttttatctcatattttcggtttctttgttttgtgtgtgtgtgtgtgtgtgttatattctgagaccttgccataccctcttcttccagtgcttctgttggatttttatatactattatttttgtaaatttccaagtattctttctcagagtattctgttctggttttatgcatattttcttaaatgttgctagaaataccaattcgaggatttttgttcttttattttaaaaattcttttttcttctattccctgaattctgtgttccttctaggtcgtgtgttcctgttgtttatcttggcctctcttttattatctcagactttcctcctaatatctggtaatcctttgttttcctttcatgtttaggaatgaaacagtagacaggctgactgggagcccagtgtatataggcagggattgttgccctgggtgagtaggcagggttctggccagatgaggaaagatgtgctctcagctagcaatattccatggctgctgtcttcctccccagacagttccttagttgcttttgagaacaaaccctcagtctggttgtgaagggtagttcttacatggaggctcttccatgttcagcagaggagtagaagagccctattccatatacagaacttccattaggccccagtttccagccacagttctcttgtcttcatgtgtttttacgtgccatttcttcacgcactgtctccgctgtatacggcagggctaattttctttctcctgagctgcagctggatatattctggtcttcagctttctttgctcaccttctttgatctatactcttccaattgttttctatcttttagcaatgaatgaaaattacccacttctcattagccctctcagatcatcttctttgtggtgggtctgtatttgactcatttacatactgccattccaacagaatctctatagagacaagagagaaacctgttcagtcagccatcttgaatcagaataccatttctgtttataccttaaaaatcagaatcttaaacatatattgaatttttgttgtaagaaaatgtgttatgataactcattagccttgcttttcttccaattcaaattttagagtgtaaaagaactattacctttcttactttgttttgcacctttttaccttagcatttctgcctaatttgttaaatttcttctaaatccaaatcacctgggtttttcccttaaagatattttaagcctctttaattcattttcaatttgttccactcctttttattctttattttacaatatttttctcattctctgttttttgtttgtttttatccagccatgctcctgtgtctacatttatgccagctttcacaagagtttactccatttaacaacttcctttagcggggctaaagctagaaacaaatagatttttccttgggatctaaaaactatcttagattccccagtcagccctaggcctccaaataaagcagctcaataacccgtggcctcccagaacaccatcctcacagatctgaatcagaagcatccctaaagttgctagatggccttccaaatgtgtggaagagctggtgcattttcgagttagaagttctgtttagaagtagccatctcccctatgcccagaaatgcacattactgggcctagaagtgtgtatttcactcccctaaaaatgtaacctcagttttgtttattttcttgttccttatagccctcaggttatgaggaaccaggagagagtataaattaatcagctgaactttgtcacagcgagtagtaaaagggaaacaaagaacatgttcttctgcctatttgtgtttgggacaacctttcatcttctgttgtgttatagaaagattgttggactagaaaaaaagaactaagtcagggtcctccctctactctaattagccatgtaacctttagcaaataatcttggcagcctcaattgctttgtcagaaaaaagggagacacttggaccatataatttctgagatcttatttctagattttaaaaacccatggtaatgaatggttctgtgattctattctttaccatttttagcacttctttctctttattttttttaaatttttcttttcactgctctcctcttttattttttcttgttccaaactatcctatattgctgttggttctccctctttaaatttttccagctcgttgttcttctctccttttacctattctgttatttccctatagtttttcccttcctggggtaattaaagctgtccttagagtgtgatattaaaacattcattaagaaaatgggagaagccaccttagttcaaaattttgccctttcccaaaaggatgcattattgtaacctaacacaaaaatttatagtccagaacccatgcttgacaatgttttttgaaatcttttatctttttctttgtgagtgattttttattttgctttcttattttgttttattttatctaaacagagaacggacattctttgaagtctaatcatgatcactacagatgaacccaatgtgccaacttcccaacagtctatagagtattagaagatttttacattttgaagaaggggagcaaatctaaaaaaaattcagttgaacttctgagagttaacatatggtggattatgttgatttagaacttaaaatagatgtgtaaatttgggttcaaaatgtagatttgagtccagtttggatgtgtgattaattttcaaatcatctaaagtttaaaagtagtattcatgatttctggcttttgatttgtcatattcctggtcataaaacattaagaaaattatggctgttgctgtcattacatatctattaaatgtcatcaaatatgtagtagacaatgctgtaattaggtgaactctaaaactgcaacatctgacaaatagctttaaaaatacaatgattataagtatggaatcagtgaaaatatttagtttgtatttttatgtccaaacttttccattttagattcctttatagacacgtcagcctaaaaatcagcctattcgggtgttcttttgaatatctcctggcatttttgtatctaactttgttcaatctgggaatttcagttttcaatatccttgaaaatggcttaagtgataacttccgtttcagttaaaaggaagcccgaagttgtgtttgtgctgcccacaggacagtgggagttacagttcatatcaggatgaccctacatacccaggtcagattgacgggaccagaagggaacatcgacttctaatccagctttcttgtttaattatgacctaaatctaatttacttccactgaaccatccaagacctctggcaggcagggaaatgggcagtgatgcaaaaaagggagactctttggagcttttatgaatagttcatggtgaggacagaacttttctactttcagacagactgcttgctagttttatgaattcagcacacgaattatgctgcgttgctcacattcaaaccaaaccaacgactatgtttaatgaactcagtattcaaatttattatatatgcgtatatatgtatatatggatcccttatatttagatttaactcgtagttttatttgaaagtagaaaagaactctacaaaaacgggaagaatgtgtctttcttcccttcttgacttctaataggtgtcattgaaatgtaaaatctaagtatgaaattatgaaaggacattctttaattactgcccactcaacacatatttaatatgtgcccagattattctaaaatcttaaaaaaagatgcatatagtgaaattttttaaatggatatacttttaataaagttttataactcactgacaaaacatatttcaatagtatatgagtatgagatttcttatcaattatgagtgaaatattctatctgaatgcattggaaggcatttacagtatttgctttcaacagttactgagtatgacattttagcatgaaatatatcaaacacatcatttgaaggacatatgtaatcttgactatggttatggtttttttgtatgtattccttgttttcatattgatagcatctaattcttttgacaatcttaatatgtaggttcatttaaattttaagacagttcagtgcatatatagtagaagccttaagaaaaaagaaaatgagcaagcaaatatttgaagaaatgtataaaaccatagatttctttcagaaaaaaaaaacaggcataggaacagttttctcttcatatattatgattatgaataataggaaagttgtattaattcagtatttgtcattatgcagtattttaatacctacataagtctattccattattatattttgcgcttggcatatttattcctttatgcttttaatcactaacatattttacttaagagtataaaactatgctaaataaattgtattgtatatggaatatgcttgccattatgaagaacagctgggtataccattatttcaagtaataaatctgaattctattagtttaaaaattgtaaaattcaagttaaatgacgtgtatgatatataagctgaacacattttctatagcccttaatttagttgtgttaatttttcaaggtgatgtatcaacagctttttttattttgcatttgttttttcaatgtgtttacattgtatgaattgagctttttgcccacagattcttgatttgtagttgtttggcaggatttttctttgtgatataatcacttctataaaaaatatgatgtacatttgtcttgtgtatttgtcttcatttcacatgtccatagtaaatatttttacgtgaagttatttataaggaatagtaatttaccagtttgtgatcatctctttcatcatcattgttctctacatatgatattattagctcttattttcagatagtctcaagcagattctcagtatacagcagataagtttttaatagtcaacacaattattttactttcataccatatcttatttcacaacatagttattttaactgtttttagacaagttattttggtcatttcatttcaatccacttttttctattttgggctaacatttttagtttatgggaatgtaatttgctacaaaatattaggaaggaaatatcttcagaagatagcattttccaatgacagtaaccaatctttcctgagagctaagcacttgcagacactaatttatttctagccacaataccatgaagcacatttttagagatgatgaaattgaaaggcagagaggttagtgtacttgttcatggttgtagaattggaagaactcaagtctaagtctgtcttgtcccactttcaaatgctatcatcttaaacgggctcttccttatgctttttgatatatgtattttagtcaaaaactagttaatttgtggttgacttatgttctttattattaacttaacacacttccatttctgccagtatgacataatgaagcaaaattttttaacataattgagccttaaaatgtgtcttttcttttagccagaaacgtttgagcatctttttatcaagcatacagcatcagtgacatgtggtcctcttcttttggagcctgaaacaatttcagaagatatcagtgttgatacatcatggaaaaataaagatgagatgatgccaacaactgtggtctctctactttcaacaacagatcttgaaaagggttctgtttgtattagtgaccagttcaacagtgttaacttctctgaggctgagggtactgaggtaacctatgaggacgaaagccagagacaaccctttgttaaatacgccacgctgatcagcaactctaaaccaagtgaaactggtgaagaacaagggcttataaatagttcagtcaccaagtgcttctctagcaaaaattctccgttgaaggattctttctctaatagctcatgggagatagaggcccaggcattttttatattatcagatcagcatcccaacataatttcaccacacctcacattctcagaaggattggatgaacttttgaaattggagggaaatttccctgaagaaaataatgataaaaagtctatctattatttaggggtcacctcaatcaaaaagagagagagtggtgtgcttttgactgacaagtcaagggtatcgtgcccattcccagccccctgtttattcacggacatcagagttctccaggacagttgctcacactttgtagaaaataatatcaacttaggaacttctagtaagaagacttttgcatcttacatgcctcaattccaaacttgttctactcagactcataagatcatggaaaacaagatgtgtgacctaactgtgtaatttcactgaagaaaccttcagatttgtgttataatgggtaatataaagtgtaatagattatagttgtgggtgggagagagaaaagaaaccagagtcaaatttgaaaataattgttccaaatgaatgttgtctgtttgttctctcttagtaacatagacaaaaaatttgagaaagccttcataagcctaccaatgtagacacgctcttctattttattcccaagctctagtgggaaggtcccttgtttccagctagaaataagcccaacagacaccatcttttgtgagatgtaattgttttttcagagggcgtgttgttttacctcaagtttttgttttgtaccaacacacacacacacacacattcttaacacatgtccttgtgtgttttgagagtatattatgtatttatattttgtgctatcagactgtaggatttgaagtaggactttcctaaatgtttaagataaacagaattcagccctggcctaaggggttatacttgtgaagactaatgagccaattgttatgtaccaaatctaagatatgtaccatagaatgaaataacctgcaagaatggtgatgcccacaatcagtattttgatgacaacacaagcacttttgaaaacataatgtcagttttaattcttctctctgaaagatgttgaagtggtcactttctgataaagttagattgccaaatgtcactgtatatctctccggaataattgtcttcccccatccccacctggacatatcctattttttcccctcactgagcattctgtctacataaaccaaccactgtgcagtactttacataccttaacccagttaattattgaaataattgtatgagacatctgttactatgatactccttaaagatgaagacagtaaataatttgcccacagttacagtcagtgggtgatggaatcagagttcagatttaaatccagattttttaatgctaatgattatgtttttaacctataccctacatagccatcaatttaaaaaaactgacttgtaatcaaaatttattaagtagaggctggcacagtggtgcatgcctgtaatcccagcactttgggaggctgaggcgggtggatcgcttgagctcagaagtcttgaaactagccggggcaacatagtgaggcctcgtctctacaaaaaacacaaaaattagctgagtgtgacagaaaaaataaagattataaaatgtattaagtagaagtataatgctggatgagaaattaagtgagaattgcacagatctcatgtttgcctttaacaacttaagattaatacataagtttattatttattcaacttttggtacggtaaaaaaattcaaagacagcatattgggcaacaaactaaattaagaaacctgcacatttggatgttcagtggcaagaagaccttcaagaatatcagtatcatcaaaataagtactttagtgttcaaaaatatgcctatgggtttttaaaaattatcagaatttcatatttagaccgagacaagagactcccaattttactgttatcctaaataaatctctacattccatctctagtccagttgtggctatgaagtgagcagttctaaacaatgacaaagattccagaccccacttgatagatatttttcacactttataatcaatttccactcaggaatcaataaagttattccatgtcataagtatttttaagatgtctcaggatctcacatactcaactaatgacccccttacaagaaataggtaaagggctgatagcaactcattacttgatgtggtacgagagccttagttctatgcaaagataaatggagaagcgtttttttcatggataattttacatggctttagagacacagaaacagataaattattacatgtataaaaattttagtaaaattgacattttaaatacatgcttatagattattggtatttaattgaaggtacagtacagaagagatagaaaaataaattttgccccactctgaaattgaagactgacctctgagcatgtccgctgagacacagtattctcctgtgatctgggacccagaataacaggaaa

SEQ ID NO: 149 - DNA, 7929 bp, Human
ataaaccattggcagcagagggaatgttattgaatatttgtaatatctgggggacaacccaaaccaatttctttttctcttaaattatagcatcaaaaaggagccatttattcaaatacgtgtgttctgtttctaacagagcaaattcttaagagggcagaaatatggtttatttttatgatatacatattgcctagtttactgttggattttataaatagtaccctttgccatatcaaccctagagcaagggtgaactgacattccattctttcagagagaaatgctgtatttctctcctcctctccctccattcctctttgcaaacctggtcactcctttgataattcacgacccatctccaccattaagagtctaaaatcctagtcaagtaataactggggtggtgggggagagagggagagggagagggaaagggagaaggagagggagagagagagagagacttgaggaggttgcacttacactccggcagtttttccagaaatgagggaggcagtagttcttacttttgtgatgtcaacttgtagactgaaatgcatcaaagctcctcttcttcttcttgttgacgcgagggatgtgaaatgtgctctagaatatgcattcagcgtggtcctttgttctaggtatgagcttttctttttctaaagtttttcggtctcgctcaaggaaaggaaagcaatattttgagattcttttaaaggcaccttccaaagcatttcccacagaaaaataccttcacagcccaacactggttatttcagtaagaatcgagtccaattttttccaatatggctgtatacattgcaggcccccaaatttgtgctttcatagtcatcgttaatcaaataggcagaaacactgtatttagggaacctgtgtttcgtgggctagaagtgcattctgattaataaagatcatgttcattttgaatgcatcgctgttattcgtgtgcctcagagtcgcgggcttctgtcaggggtgcagcgggctcgggagtgcctgcagagcggtgggaagcagttctgagcgccctggtcgtcaacccgttttcagggggtgccgacactttctcccaagaagctcgatccgccgccttgtgcggctggaaagaatgaaccagactgtgacaggaacagagaatttatgtgattgacagggagtaccagggcacccgactccatcccgggtcaccacggctctgggatttgcacgagtttaccaccaccattaacagctatttgcgtaaggttgtttaccgcctgagagcgccacaagccgacagcgaagccactttgggaccccagccacgccccctctcccctctcccctctcacccctccctcccgccaaactaatgatttcggggctgccttcttgccggaccctcccattggctcctatcccaaccaatcagagccttgcaacagtttcacctggctcccgcttcccaaataaacaaacaaactgtcccgcgactgtgcccgctctgcaccctggcgccgcaggcaggcactgcttgcgctacgccccctcccaccacctcccaccaatggggccccgactgtggcgccctctcccgaccctgatagccggccgctttctcctccgcccctccaggccttctcccgccccctcatgccttcctggactccctgttagaatcagcttggccagagagcccgcctcctcctctcggtcctcccttggcccacaggcctggagattgaccgggaggatttggcacagccggaggtggctccgcctcccgagcccgccgtctcctcccttgctcacctctactggtggccgctcgcgcccctccattgcgccggtagcaggatccgcagcggccgccgcgtgaggctgtggtcacgtgttgttttgcccgctgtcgtgcgctcagagtggagtgggcgggggcgcgggccaaggcaggagggggctggggcgggcagacgagggtagacagcctcttcccccaaccctccctttcctgaattccccctcctcctcgctcaccttaaaaccatcgtgcatcaccatggcgagttgctccttcactcgcgaccaagcgacaagaagactaagaggtgcagcagcggcggcagcggcagctctagcagcagtggtgaccaccccgcttctttcctcgggaaccccgaccgcactcattgggaccgggtcgtcttgtccgggagccatgtggctctccacggccactggctcccggtcagactccgagtccgaagaggaggacctgcccgtcggggaggaagtctgcaaacgcggctacctgcggaaacagaagcatgggcacaggcgctacttcgtgctcaaactcgagactgctgacgccccagctcggctggaatactacgaaaatgccaggaagttccggcacagtgtccgcgccgcggcggctgcagcagcggcggccgcctctggcgccgcgatccccccgctcattccaccgcggcgcgtgatcaccctataccagtgcttttccgtgagccagcgagcagatgcaaggtaccgacacctcattgctcttttcacccaagacgaatacttcgcgatggtggccgagaacgagtcggagcaggaaagctggtacttgctgctcagccgcctcatcctcgagagcaagcgccgccgctgcggcacgctcggcgcgcagccggacggagagccggccgcgctggcggcggcagcggcggcggagccacccttctataaagatgtgtggcaggtaatagtcaaacccagggggctggggcacagaaaagagctgagcggcgtgttccggctgtgtctaaccgacgaggaggtcgtgtttgtgaggctgaacaccgaagtggccagcgtggtcgtccagctcctgagcatccgtcgctgtggacactcggagcagtatttcttcttggaagtaggcaggtccactgtcatcggtccgggagagctctggatgcaggtcgatgactgtgtggttgcccaaaacatgcatgagctgtttttggagaagatgagagccttgtgtgcagacgaatacagagcccgctgccgcagctacagcatcagcatcggcgcccacctgttaaccctgctgtccgctaggaggcacctgggcttggtgccgctcgagccgggaggctggctcagaaggtcccgctttgagcagttttgccacctcagggccatcggcgacggggaagacgagatgcttttcaccaggcgcttcgtaacacccagcgagcctgtggcccactccaggcgaggaagactgcacctgcccagagggcgcaggtcaaggagagcggtttcagtgccggccagcttttttcgccgcttagcacccagcccagcacgtccccggcaccctgcagaagccccgaacaatggagctcgcctgtcttctgaagtgtctggttctggctctggcaactttggggaggaaggcaatccccagggcaaagaagatcaggaaggaagcggaggtgactacatgcctatgaacaattggggctcaggaaatggccggggctcaggaggtggccagggctcaaatggccaaggctccagtagccatagctcgggaggaaaccagtgttcaggcgagggacagggatcccgaggtggtcagggctcaaatggccagggctcaggaggaaaccagtgctctagagatggccagggcaccgcaggtgggcacggttcaggtggtggccagagacctggaggtgggcatggctcaggtggtggccagggacctggagatggccatggctcaggtggtggcaagaactctggggggggcaaaggctcaggaagtgggaaaggatccgatggtgatggtgaacgtggaaaatctctgaagaaaagatcctattttggcaaattaactcaaagcaagcaacagcaaatgccaccacctccaccacctcctcctccacccccaccagctggaggaactggtggaaaagggaagtctgggggaagattcagactttatttttgtgttgacagaggagccacgaaagaatgcaaagaagccaaagaagtgaaagatgcagagatcccagaaggtgcagctcgaggtccccacagagccagagcttttgatgaagatgaggatgacccatacgtgccaatgaggccaggggtggccacccctcttgtaagctccagtgattatatgccaatggctcctcaaaatgtctctgcttcaaaaaagcgccactctcgatccccttttgaagattcaagagggtacatgatgatgtttcccagagtgagcccaccacctgctccgagtcctccaaaagcacctgatactaataaagaggatgactcaaaggacaatgacagtgagagtgactacatgtttatggctcctggagccggtgcaattccaaaaaaccccagaaatcctcagggtggctcttcctccaaaagttggagctcctacttctctctaccaaacccttttcggagctcacctttgggacagaatgacaacagtgagtatgtgccaatgttacctggaaagttcctggggaggggcctagacaaagaagtctcctataactgggaccccaaagatgcagcttcaaagccttcaggtgagggatcattctcaaagcctggagatgggggatcaccttcaaagccttcagatcatgagcccccaaagaataaagctaagagacctaaccgactttcttttattacaaaaggatataaaatcaagccaaaaccacaaaagcccacacatgagcagagagaagctgacagctctagtgactacgtcaacatggacttcactaaaagagagagcaatacaccagctccctctactcaaggactaccagattcgtggggcataattgctgaacccagacagtcagccttttctaattatgtgaatgttgagtttggagtgccatttccaaatccagcaaacgacctctcagatcttttaagagctataccacgtgccaaccccttatctctggacagtgctaggtggccacttcctccccttcccctcagtgctacaggtagcaatgctattgaggaagagggtgactacattgaagtaattttcaactcagcaatgacaccagccatggctcttgctgacagtgccattcgctatgatgctgaaacaggtcgaatctatgtggtcgacccattttctgagtgctgtatggatatttctctctcccccagccgatgttctgaaccaccacctgtagctaggctgctgcaggaagaagagcaggagagaagacgcccacaaagccgttctcaaagtttctttgcagcagccagagccgctgtctctgcttttccaacagacagcctcgagagagacctttccccatcctcagccccggctgtcgcttcggctgcagagccgactttagccctcagccaagttgtagctgcggcctccgcgctcgccgcagccccgggcatcggcgcagcagccgcagctgctggatttgactccgcctctgcccgctggtttcaacctgttgctaatgctgctgatgccgaagcagtaaggggagcccaagacgttgccggtggctcgaaccctggagcccacaacccatctgcaaaccttgccagaggtgataaccaggctggcggggctgccgctgcagctgccgctccggaaccaccacctcgcagtcgccgggtgccaagacccccggagagagaagattctgacaacgacgacgacactcacgtgagaatggattttgccagacgtgataatcagttcgactctcccaaaagaggtcggtaattttagaattaatttccctaaagtgaatggtcattgtctaatgattcgatgcgctacagtctacagtgttagggatactatttcattaactggtgctattcgacatggagtatagaattcagttttaattattcacaaatgcctttttgatctttgcaaaaatttgtttttatctaatcaatttctttatctggacagaactgattatcatttaaacactggttctacttttttaggagtagttaaaacgcagacataaaaagcataaggatacttttaaacatccttccccatcatttaatgataatgtaaagcaggatatcgtaaattgggttccaccaactaattttcaaatcaacaattaaaagctgcttttctgcaaatgcccatatttaagtgtaggaatttaataagagcacagactattaagcagtaataatcaactatttatgtttagggaggataattttctcctctgaaagttactttttaaagagcagtcgttgttgtgctagtttgctgtgatttaccaagaaagttaaatctcaattgttaacgtgaatgtctggggggaacaaaacataaataatccaaaacaggaggtgattaaaagaagacagtatttggctctggaatgtgtttgtgtgttgattttctttttgtttttacacaggataaattccagaaaccttgagtgttccttttctctgtcactagtaatgacaggcaagtcacatttgctgtgcctcattttcttcttttaaccccccacccttctaaaagagggtgtggtgacaacttgagaatggatatgaatattatttcaaaggtttaaaaagcagttaaaacatttaattcatatatcttatgggaaatcaaggaaagcaagataaggctggaggaagacctgactccaggggcagcttaccctggaatggtggaagtttttaaagggctacttttccaaaggaagaagtaaggaagagtaggagctgtcagacttggaaacaagacttagagtaattctactgtgtacaacattgtggaatgttgtcatcagtgtgtcttgaaacattttcaagagatgattgcagaggatgatgtctccatagtctcaactaccttgcctcttaagtagaatatgcttctttcccagtgaagggaagggatggaccccagcagttttcattccagtagtcagtttagtgaagatttttgctttgcttgctttgtggaatgcttttgtgattggatctctgcccactgtgcttgatcaggcagaacaagtcgggcactgatcacaacagtcacctaacaagctccctatttaatgcaggtgtagcccccccacatcccctttttctccctgctatagaaaacttgccatacacaaactcacatttgcagcgtggacacattaaagagtgatcattaaaacaacaaaaggatgctttggcttgccaaaggattcaattcagacctcttttaaactgtgagttccctccccaacacacacacatacacacacacacaaacacacatgatcaccactgctaccataatcatacgtttaaaatatataatttcatttccaagtctttaatccataataagattttcaagagtagatctactttattctgtagaatatacctgaaaattgatctcaatctattgtttgagtctaactattgaagacaccatttataattttgatgtagatgatacacagttgcctgtgtccctgtagtactttcaaaaggaccagttttcatagaggtttattttaagaagtttaagatttaaatagtgaaatcttactgttccttgaataaattctgacttcccaaggaatacctagacacaatgatcattattttagcataaattcctgatttatgactttgtagctattttggagatttaacattctgtaaatgcattgtttattgaggaaattcctagctttattgagtgactttagcaaggaagctctatctcacagggaggcaggcgcttaggttgaaataagagaatcaacgtggaagcactttggaatgttaaagcactttacaaatgtaagatatttt

SEQ ID NO: 150 - DNA, 30725 bp, Human
  misc_feature (1)...(30725): n = A,T,C or G
gggcggccccagagtgcggtccgccctgcccacacccacctccgccggtcctcgcggttggtcaggcctcggggggctgctcggtgcccagagggcggcccatcgcccgactcggtggcgctgcccctaccccatcccggcgcgggcccggcgacgcgggcagcgcggggccgagctgcgggcggagcgggcgcgggtctgcggagcccccagggctcgagcgggccacggagtctgtccgggagcagggggcgttgcccggacgctggcctgggtccccggtgcgggaggcagtgcggcggcctccgcccgcccctgcagcgggatgtgaccgtcccggagagccagccgccgccttctgcagcgctggccccgctcgctccgccgcagcccggccgggacgcgcgggcccgccccgcccagccggggttctcgccgccgtcattcccctcccgccccctcactcccgtcctctcggggctcctcccacgaccctcccaatggcgcctccggagcccccatcccttatcccttctctctcccagctgaagcggacgagtcggcgggggcgtggggggtgagacgcgggtgctagggtctccggcacctgggagatccccttcctccccgcgtggaagagccaagttgggaagaggaattccacctccagtgcccgaggggctaacaggagaggggagagagtgagggagataataattgctttaacaatcccttacttgtagactgcgtcagcttttaagtctctttcccattcataatctcatttaattccgttcgctttctcattcattctttcatttattcaccaaatatttattgagcatctcctatgtgtctggcattatattaaaacctggagatacagtgattgttaagagtgttgggcttctcgggagaatcaaagcgcaaagacctatggcttttttaaaaaaattattattcctttcttttctttttttgtttttctaaagctctaccacttacggtgtggttttggagaaactggtttatctgtgcttcaggtttcccacctgtaaagcaaagcgtgtgaaatctcacagggttgttgtgaggctcaaatgagacgggaaagatctttataaatctcacaacactatgtgactggatgatggagattaatttgcaccaatctgttagttacttctttgttcaataacatgtaagcccttacattatatcatgctttggttgagcttgaaatctgaattgagaacctgggtgtgagtcccaatttgtccagctgtgtgatcttaagcaaccaactaaactactctgagcctgtttcatcatctgaaaaatgagggtgtcaatattgaccaacatcttagtgttggtgtatccaatgagatactgtctgtgaaaagtgtgttgttcagtgtaaataaatgttggctaacattgtatttagggcagattctttggtttctaattctcaatgcagtatttctgtttctgtgggatttttcccgctgtaatatccagtacagtgtgtgcacacttggggctcagaagcttctactgccttcctttctgagaggagaggataaaatgggaccagtgggactgactgtgtgtgctgagcatgtgatcaagccatgggccaggtcctctgacttgtgctgacttggtgaccctgatctctggcctcggaggacacttgcccagggattctcactgccgtgggtgttgtcctgcactcccaggctccaggtcctctgtagaagagggcattgtcccggtagggcaagagtcccgagcctcaggtcttcctcttcaggggccaaagcagaggctggcgagtcagggtgcttgcaaagaggaagcccaggagtttccctggggttaccagagggctgggggcctagtgaccaggaaagggtggtgctctgagagcccagggtgcttgggttaatcatcactggggctcagataaggccctgccaactggaagcagagtcattgtgaccagaggggtttgtgtggctgaagaggcaggaggaacagtgtatccacagcgtgggaccatgccaggcacaaaacggtttcaacatgtcattgagaccccggagcctggcaagtgggaggtgagaccccttcttcatgttggctttctgtgctgattcctagaattatttttcatccagtcttccctccccgctggtttctgctcacctcttcttccttcctgatgttctttccctaatatgcccagagcaccaagtgcaggctgagtttctggtgtggtatgtgtgtgcgtgtgtgtaagtccaaactctgtgcctgctgccactcccacctccagctcagcaggcatgaatgaggctttggcttcctgctccatccttgtcccctcttccttctagttgtctgggtacgaggcagctgtgccaatcacggagaagtcaaacccactgacccaggatctagacaaagcagatgctgagaacattgttcgactgctagggcaatgtgatgctgagatcttccaggaggaggggcaagccctgtccacataccaggtaaccaagacccaagacctggaccctggaaataaacatgccaaccccaaccccacctctgctctccctcaccatggctcctaatatcggaaaccctgagaccccctcccccattcatcgtcctccttttcttggcttctcattcctgcatattccctacagagactctacagcgaatccattctgaccaccatggtacaggtggctgggaaagttcaggaagtgctgaaggtactaaccttccttctgttccctgcctaaacttttctgtttccctctttctctttttactgtctctatttctcactttgatagatctcattctcctttctcccttttggagatcctcccttttggatccttattttcatcttattaataaataataatgataacttctctgcttaatactttataattgacaatctactttcacacctattaccctcacaaaagcctgtgaagttgatatgacttctgtttgttttcctcagatgaaaaaacaaagatttagaaaggataatcactgtagcttgctcaaatacactgagctaataattgctggataatgctgcttttattatttacttttatttagatgacaaagctgctttcagttctttctgggagaagtaaggatttgaacaagtagtggagcaagacatgggagtcaaactggtttctctaatccaatgttctttttgctacactacattgcatgtatttgttcaattttgtgatgagaggagggataaggagtctttccaattcctcttgcattactgacaaagaaaagaatattcttctcccaacctgagccaggccctggtaatatatgcctctttccttcttcaggagccagatggggggctggttgtgctgagtggagggggcacctctggccggatggcattcctcatgtcggtgagcaccctggtctccagttttcttccccctccacttctggaggtgaccctcaggaccataaagatcatcataactaagctcccaggtggccccctcactagacctggactccaagcctggctctttctctcttccaaaagctagatgtcaccatgaagtcccatttcttctgagcccatctgagtcccgccagtatgttgccaatgtctctacatcccatgcaccaccgactaatcatctccaagtagcagctttaagtgcgagattccatgtaggactgggttaagcactggtctaagagaatcattatatagtctctgccctctaggagttgaaaatccaagataattgtttcttctctgtcattacctctttacatcctctccctgcttgacaggtgtcctttaatcagctgatgaaaggtctgggacagaaacctctttacacctacctcattgcaggtggtgacaggtaagccaagttagcctatgaatattttgtttgacctaaatagtatttcttagaaattgagttggaatacctttagacagagattgtgtctggcttgtcttagtcctcaccattccttattccctcacacttggcccacttcacatacttatgtcgcctgactggctgttgtaggtatttgagtttttcaactctatggagtgtctatcatgcaccaacaaactgtgggtgctcattcaatgatagttttccctttatgcgcatctcttaatgtagcctgccctaatacgccataggcttctgcttcccagccactgccactgaccttgagtctgtcctcttaggtctgtggtggcctctagggaggggacagaagatagtgccttgcacgggattgaggaactgaagaaggtctgtgcttttcactgacattgaccagagacctctatctgttccttctcatggggacataaaagccccagcattcagccaaagcctatttcctccctcccctgttcctggccctgatatcctcacacagtagatttgtgccctggaatcctcccagttacactaccttgtccatcctcctctcctaggtggctgccgggaagaagagagtgattgtcattggcatttctgtgggactctctgtgagtaaaaagatgggttgagtggatcaattttagagagaggaagtgagtgggaatggaatagcatggaagatagatcaatgagatcggtgctagaaggcaggaagtttgctcaaggaattttggttttagtttcactaacttggatcaagttgtgtgaatgtgggaagatggggaagggattctatttcagaataactgtgtatcaatcaatcaacaaccaagataggtggactagtccaggggtaagcaaaatatactggctggccaatgcagccagctgcctgtttttaaagttttttgttgttgttgtttgtttgtttttgagatggagtctcgctctgtcacccaggctggagtgcaatggcatgatttcggctcactgtaaactccacctcccaggttcaagcgattctcctgcctcagcctcccgaaaagctgggatcacaagcgcccaccacaatgcccggctaatttttgcatttttagtagagacagagtttcaccatgttggccaggctggtctcgaactcctgacatcaggtgctccacctgcctcgctcagcctctcaaagtgctgggattacaggagtgagccactgcacctggccctaaaataaaggttagtttttgtttttgttttggttgtcgttgttgtttttgagagtctccctctgtctcccaggctggagtgcagtggcataatcttggctaactgcagcctcctcctcccaggttcaagcgattctcctgcctcagcctcccgagtaactggaattataggcacatgccaccatgcctggctgattttgtattttcagtagagacagggtttctactaaaaaagaaaactggggaccaggatgctcaccgacatgaggaatgccatgttggccaggctagtcttgaactcctgacctcaagtgatctgcccaccttggcctcccaaattgctgggattacaggcatgagtcaccatgtccagcccctaaaataaagttattggaacacagccatttttgtttacatatggtctaaggcctcttttatgctatagccatagggttgagtagttggacagagaccatagggcccacaaaccctaaagtatttagtatctggccttttacagaaaaatatggcccctggactagtctcttgctacttaaaatgtggtgcctgcaccagcaacatcagtgtcacctgggacttgttagaaatgcaaaatctcaggccccactctggacctactgagcattttaacaagatttccaggtagtttgagaagcactgagccagatgactccaagtttcctctcaattctgcagctctctggctctaagaattcacttcgcagaaactagatcccaccagtgttatatatggaaggaagcacacaaagagaagaggatattgacttcaaagagtttacgattttagttcagtagtattccaactttaccgtgcagaagatttccttggagaacttgttaaaaatgtagtgcccttgaggtacttgttaaaaacgtgctcccccttcaaatttggatccagtagattgtaactgtacctgggaatctgcattttgaacaagcattctgaagggttctgatgcacttgagccttgggcaccactcagagtaatgaccccctcatcatgcccttctctctcttcaccatcaggctccctttgtggcaggccagatggactgctgcatgaacaacacagctgtcttcttgccagtcctggttggcttcaatccagtgagcatggccaggtgagccttctggaatgactgggcagccctggggcaggctggaggggaacatgtcaaagtctacagtacaaccacaagggagagaacagatagtcttgttcaccaaatctcagaatattaaagtaaatatggggtgcccctaagcttataaggttttttgtttgttggttggttgaattattctcttcttgtttcagaaagcattaaaggcagcttataaaggatgcataaaatataagatagcatacattcaaaacagggattgaagaggcaagagaaacaaggaataaaatggaggataaaatggggtcaggaagatgcataccataaagatttgtgctttcatatgggggtgagccccaagcaccttttcaaagtagtagtagtgggtgccagatggcctcctactcctctttgtccagttcccttatttagtgcccattctctctcatcattccaggcacccctttcctcccccgaggatcctcagatctctcactgtcttcccttccctgagagcccctcattaccaaatcacctccctcttattctctatgtcagtggtcactcttatttcagaataaatcaacatattaaaccagtagtgctcagatgtggttctgtgcatgagctgcctggggaatgttacaaaaaaataaagaagattcttagttccttgtgtaagaggtctgattttgtaggtttggagtaaggccctgaaatatctattttttgaaagcaaccctggagattctgatgcacagccaggtttggggaactctgctaaataaaccattggagtgggccacctgacaaagctgagggcttcctgacaccagagggatgcggcaaaggcttgttgattattttagagcagctttttgtatttagcggtggtcttgggaagggggacaagtgggtttttccaaggtgctttttcaccttccagattctaggcggtagtataatttatgcgaaggtgtaaatgaatctgaaatactcctaaccctgatccttttcatggagggctctccttcaccaaaaatgtatctgctgcagtggatgctaatttcaggccctatgactaagtgaaatgaagaatttcaaacaacgtaggcgtggagatcttccagttgttccttaaatcagtggctcccaaacttggctgattttcagagtcatctgggaagcttttttaaaatacagatttttgggctccactccagaactactgaatctgaatcttagggtggacttggtacccagaaatgggtagttattaaaaaacaaaactccccagatgatttggatgcccagctgtgtttaggaatctcgacgttaaaccatacgatatgaaccctctctgctttagtctcctctttcttaggactctaggaagtttcagaaatagtttgaggaagaatgacaggagacattttatacaacgggcatgaaatatgtgaaacttgtctgccctagaagtaatacagaagaaaaaaaatacaaaaatagttcaagaagggagggaacctttgcaggatgggatgataaggtgaaattaggggtgccatgtacagaagtaactaactctttgaggtcctgccacagtgggcgattcacaaattatcccctagcaaagccattagaaatcaactaaagaagatcgtcattctttgagattccgtgatttgtaactaagcagataacaagtctgtagctctcttgcctcatgaacacatttatttgttcccaattaatttactcaaggaatgttcaacaactgtgaggtgctaccttgaagcttggttccctcactgttatccctccctctggtactgagggttcactctttggagggatttccagaatgtattcccacaaatgggaagggcttctgatggaccctaagatggaaaataaggtgacaattttgacatttgaataacaggccttccctaaaggacctgcagagagtgacattagtatagccatggcattggggcttatgcaaggagcaggacacaagatagtttgggtctcaggctgggactttaaacttgagtgttggctttgctctgggcttgaggtgctgcatgttttattaacccctgtccttggggttcggggacacagtgcctctaaaagttccaaagcatatgtctgtatgaagttgttgacctctgacctcaatcccaatgcagtctttgatcatgactcccagctgaggcccttctttgagatcctcatagacaatctccccaccttgtgtctctctggacctcagaaatgaccccattgaagactggagttcaacattccgacaagtagcagagcggatgcagaaaatgcaggagaaacagaaagcttttgtgctcaatcctgccatcggggtagggcctctcctttttctatgttctccacccctccaacacctgggaactgcttgccacttccttggggcctctgattttaggttctattatatcttgtttaaattcctgaggtattgtgagtcagctaaaatgttataaaccaaatcctattttcccatttacattttcaccttaagatatttcgtcttcattccaaccctctctctcaaattggtaagccttaaacacttcagcggtctgggacagtttctatttaaagaagctctttgccatctatgtatagagagcgttgaatagccattgttatgtttcagtctgtctctctcacatatttacattttaaatatgggctttaaaaaatggggtgcagttttgtttcattcttctgcctttctaaatcctctccaaaattgggtggcccttcttaggttgaaagctgttttctcttgttcctttttttctcatctggattgcagatacatttcactagcaccatttctccttacttgggccttacgagggccttagccaaattccagcccgtgcctccctctaccagtggtgggcacaccatctgcgacattctcctccatcttccttttgtgagataagaaggtagaattccatatgacataagaattccacggctttcacctcctaaatgctcatctgtctttcctcctccctgcaaatgttgactttcaatggctttcaatcttcttttctcagtcactacttttttttttttttttgagacgaaatcttgctcttgtcacccaggctggaatgcaatggcctgatcttggctcactgcaacctctgctcccctagttcaagcgattttcctgcctcagtctgcggagtagctgggattacaggtgcctgccaccacatctggctaatttttgtatttttaatagacagcctgttggccaggctggtctcgaactcctgacctcaggtgatccgcccgcctcggcctcccaaagtgctgggattacaggcgtgagccaccgcacccagcctcagtcactactgttatcattctgtttgctgtagcctctttgtctgtctggtgtgctgtgtgccacatctggactgctgcaatcacttcttcattggtctgtccaaagcatatgacatgtggtatttggattgataaactaccacagaaaatggtggaagtgggggagaaatttcttggaaagaaacacactctctggtctgggtgtagtggctcacgcctgtaatcccagcatttgggaggccaaggcgggcagatgacttgaggtcaggagttcaagaccagcttggctaacatggtgaaaccacgtctctaccaaaaatacaaaaattagccgggcgtggtggcaggtgcctgtaatcccagctacttgggaggctgaggcaggagaatcgcttgaatttgggaggtagaggttgcagtgatccaagatcgtgccactgcactccagcctgggtggcagagtgagactccatctcaaaaaaaaaaaaaaaaaaaaaagcactttgggaggccgaggtgggcgaatcacgaggtcaggagatcgagaccatcctggctaacacggtgaaaccccatctctactaaagatacaaaaaattagccgggcatggtggcgggcgcctgtagtcccagctatttgggaggctgaggcaggagaatggcgtgaacccaggaggcagagcttgcagtgagccgagatcctgccactgcactccagcctgggtgacagggtgacagagcaagactccatctcaaaaaaaaaaaaaaaagaaaaaaaaagaaaacaaagaaaagaaaagcactctgaaaaacccttgacccagctgacaagagacccaatcactctgacttcctctccagaaagtcctgagtatacctaggagtgatcagaggaggcccttcccctctttctaatcttcctctcggtcaagcccaccccagcacccttcctcacaagcacactgggggccactggtactatcacatgcatgcccgggggttactaacaagtggtctacggggtcttcatcctctcccaattcctcttgggtgtcttcacctcttcagcccgagggtctcagcggctcctcccggatgaaaggtggaagtgccaccaagattctgctggaaaccctgttattagcagcccataagactgtggaccagggcattgcagcatctcaaaggtagggaggatctggataagagagagctcagagtcaggcgagtgtgagatggtgtggatggagattggcaggtctagatccaaggactgggctggtggcagtaagactgcagcccaccacgcctcccctgggaagggagctgggtagtacatgctgttgctcccacctcatagttgcagagtccgaattgtttccagtggatcctggattcctcaggcccagacctaatccctgagcctgcctggggcctccaaagctagcctggctccctagggtcctttgatttgggggtggtccaggccatgcaggtagagcttatcctactctggacctgcctccctctccagggtctctagcctcactcctaggctgctcatgccccttcccagtggctctcagatcctgctcctcctggtgctttcctgctgcactcgtccctctttctgctcttttgttttctgcccattgaagaagcccttgctgccccttcggaacgcagtctgggcctactctctgcacctctccagggaccagcagaatttagttctaagggagctgtgccttcacctccccgctcagggaggcacctaagctttctgagggggaattgggcccttcttgagagctggtggcttttctcccagatgcctcctggaaatcttgcggacatttgagcgagctcatcaggtgacctacagccaaagccccaagattgccaccctgatgaagagtgtcagcaccaggtgtgtggatatgtgtttagaggtgaggatgtggcccggatggagaatactgagagcagggagactctgtgagacatgttaacacggtatgggcgataggattgcatgttgaagggtcatggtttgttgactcctgtgttcttctgtggacatctctggcctctttgcacggtgatctctcatgtcctgacctctgacccattctcagtctggagaagaaaggccacgtgtacctggttggctggcagaccctgggcatcattgccatcatggatggagtagagtgcatccacacctttggtgctggtgggaccccagtccagatgttcttcctgcttcctcctgatcccaaccattcgggctgctctccaaacactgtcctactcccaacccatgggtgttcctcagtgtcccaccttccctatctaaataggcacttcagtcaaattcttcttccttagaaccccaactcagtccttgatcccttctcagctcccacccctgtgcttaactatggcctcccacaagggctactcctcactctacgccccacttgccacttttcctcccagtcccattttctccccctgaagcctagaaccttcctttcctatatagccaatcactcctctctccttgttcttaaacttcccagatttccgagatgtccgtggctttctcattggtgatcacagtgacatgtttaaccagaaggctgagctcaccaaccaggtcggagaagaacaggacttggggaagctggggagaccactagtgtgctgagggtggaagaaaaggggaaggcggagctaggtgggaagttcattggaatagacggtccagagaagagaatatgggtcagaagtcatgaggctttggcttagcatgggcagtgtggaaagctctagatccagtccccaaacttggccctagtccactgacttgttacataatcttgggcaaaacactgtaccttttgaacttcagctctttcacctgtgcacaaaagtgttagatctcctccacggccccctttagtcctcaagtctgtgctttagagtgttttcatgggagggaccctcccatcttcttctgccccagggtccccagttcaccttctcccaggaggacttcctgacttccatccttccctctctcacggaaatcgatactgtggtcttcattttcaccctggatggtgagagggaagatgggagtggtgaggggtggggagggggaaatagaatggttcagaggagctgttgtttttctgggtcttagggtacctgctcagagggagggacggggtgaatatcctgactggaccccagccaggggagcaggaggaacagctgcacagccagcctttcgactctgatgccctccccttctcctagacaacctcacggaggtgcagactatagtggagcaggtgaaagagaagaccaaccacatccaggccctggcacacagcaccgtgggtcagaccttgctggtgagagtccagccgtgacaaagggacccaggtggcagttgcagccaggccttcctggagatgcctctcctgctcctctttctctctctccagatccctctgaagaagctctttccctccatcatcagcatcacatggccactgcttttctttgaatatgaagggaacttcatccaggtatggggaatgagaaggtcctatctgcagtaaggggctcagagggtgagggattccaagaatcaaaaaacccaaggctgtagggcagaaagtttggagacctctctgaccctcacaaagccagctgggcaaggtcatgggttaccaggttactagtcagaattcccaaggcaatgaactactgggctcagctgtctctaggaatatgcaaaaagttgcgggataggcctccagtcacctgacagatgttcatttgtcctttgggacaggttaattatttttactttgagacagagtctcactctgtcgcccaggctggagtgcagtggtgcaatcttggctcactgcaacctctgcctcttgggttcaagtgattctcgtgcctcaagtagctgggactacaggtgtgcaccaccatgcccggctactgtttgtatttttagtagagatagggtttcctcatgttggccaggctggtctcgaactcctgacctcaagtgatctgcctgcctcgacctcccaaagtactgggattacaggtgtaagccgctgcgcctggctgggacaggttaattcttgataccaaagtcatcatcattatccaaaagcttttaccacaccttttttttttttgcaagtttactatgctgaattcattgcagataactttatgtgcatatagtccctgcttgccaatgaattataatccagcacaaatactgataataattacagaaataataatcagtgtgtgtgctctttgcaatttagagctttgtgtgggcattgggagctctggatgccggtctagctctacagtgtggcccaagaaagcaagcaattttacatctctggttctcagttttctcatacaccacctgcccaccctccatgggcagaatcagggccctgaagggttgctctggagagatgtggtctcttattcgttattcaaaccatgtctgtcagaagtttcctggcttgaccagacacagctgaaacactgacttacctggactcagaactcgtatagaagcggaagtttctctgcccctgaacagggaatccactctccttccaatgtctttcattctttttattttttaaagacaaagtctcactctgtggcccagactaaagtgcagtggtgccatctcagctcactgcaacctccgcctcccctgctcaactgatcctcccacctcagcttctcaagtaggtaggaccacaggcactcaccaccatgactggctaatttttgtattttttttgtagagatcgggtttctccacattgcccaggctgtttgccaactcctagactcaagtgatccacccgccttagcctcccaaagtgctgagattgcaggcgtgagccactacgcctagccaaaacactgtatttttaaagaaaaatgttcattttaacagccatacattttttatagatacattttttatagtaaagacgttacaaattacagaaatgcaaaaaagaaaaaatcactccaaatctaccatcttcaaaaaaaaaaaaaaaacactctaacaaattttggagaatgtccttttaaatttctattatatgcatatataaatatatttgtacaaaagtaagaccatacttgatatgctgttttaaagttgctttatgaacatctttctgtactaatagatcaccatcattttcaaaaattattattattattatttatttttatcatgccgggacatgttctcatctgatagatcactactatcattttttttttttttaagatggagtctcgctctgtcacccagactggagtgcagtggcgcgatctccgctcactgcaagctctgtctcccaggttcacgccattctcctgcctcagcctcctgagcagctgggactacaggtgcccgccaccacgcctggctaattttttgtattttttagtagagacggggtttcaccgtgttagccaggatggtctcgatcttctgaacttgtgatccacccgcctcagcctcccaaagtgctgcgattacaggcgtgagccaccacgcccggccactactatcatttttagtgtcaatgtaatattccactgtatagatgtaccataaattgtttaactccgattatcagacacagagacaacttcaatattatggtttttattaaagtgctgcactgaacatccttataaacacatcttttaggcatttgacttgtttcaccaggataaaccccaaaagcgaaatcactgggtcaaaggggatgtaaaattttgaagctttttgatacatacagccaaactgccctccaaagaggtttataaataaagcgtgaagttgcttgttcccttacacccttatacatactggatagcatccttataaaaaaatctttgctaatcagtaaagcaacaaaagggcattttagtgttattttaatttatatttctttaattattgtgtaggtggactacttaaaaatatatattggccatttgatactttttttttgtctttcatgtactgcttcttgtcttttgggtctatttacccattctttctttggggggtatttttttttcttatttgtaagaaggggtgtgtatagcaaaaacagtagccctttttttcttttctatatttttcccagcttaatattttcttttgtttttacgttttttatgtagagacattttatttaaaatgttacatagtcaaatctatcaatcttttcctttgtgttttttgccttttggttgatgttggttttatttatttgtttatttatttgtgagacagagtctcgctctgtggcccaggctggagtacagtggtgtgatcttggctcattgcaacctctgcctcccgggttcgagcgattctcctgcctcagcctcctgagtagctgggattacaggcacacgcctctatgccctgctacttttttcattttttgtagagacagggtttcaccatgttggccgggctggtctcgaacttcggacctcaggtaatacacctgccttggcctctcgaagtgctgggattacaggagtgagccactgcactcagcctggttttatctttactaaatgaattggaattgtttgaaataaagaggctttgtttgggctggtcaatctttagctatagaaatatttttgacagacgcnnnnnnnnnnnnnnnnnnnnnnnnnnnnnnnnnnnnnnnnnnnnnnnnnnnnnnnnnnnnnnnnnnnnnnnnnnnnnnnnnnnnnnnnnnnnnnnnnnnnnnnnnnnnnnnnnnnnnnnnnnnnnnnnnnnnnnnnnnnnnnnnnnnnnnnnnnnnnnnnnnnnnnnnnnnnnnnnnnnnnnnnnnnnnnnnnnnnnnnnnnnnnnnnnnnnnnnnnnnnnnnnnnnnnnnnnnnnnnnnnnnnnnnnnnnnnnnnnnnnnnnnnnnnnnnnnnnnnnnnnnnnnnnnnnnnnnnnnnnnnnnnnnnnnnnnnnnnnnnnnnnnnnnnnnnnnnnnnnnnnnnnnnnnnnnnnnnnnnnnnnnnnnnnnnnnnnnnnnnnnnnnnnnnnnnnnnnnnnnnnnnnnnnnnnnnnnnnnnnnnnnnnnnnnnnnnnnnnnnnnnnnnnnnnnnnnnnnnnnnnnnnnnnnnnnnnnnnnnnnnnnnnnnnnnnnnnnnnnnnnnncatggtgaaacctggatctctactaaaaatacaaaaattagccaggcgtggtagcttggacctgtaatcacaactactcaggtaggctgaggcagaagaatcgcttgaaacctgggaggcagaggttgcagtgagctgagatcataccactgcactgcagcctgggcgacacaagactccatctcaaaaaaaaaaaaaaaaaaaaaagccgggcgtggtggctcacgcctacaatcccagtactttgggaggctgaggtgggtggatcacaaggtcaagagttcaagaccagcctggccaacatggtgaaacccatctctactaaaaatacaaaaattagccgggcatggtggcacatgctcatagtcccagctactcgggaggctgaggcaggaggatcacttgaacctgggaggtggaggttgcagtgaaccgagatcatgccactgcactccagcctgggtgacagagtgagactccatctcaaaaaaaaaaaaaaaagaagataattggagatgcctgatatgttatactaattactttggtatgtgtcctctaagaacaagggcattcacctacataattacaatatacttttccactcaggaaaatgacaattaatatactattatctattatctagaccatattcaaatttccccaaatattcctgtattgtttttatttcccagatccaggatccaatcaaggataatgcactgcattcagttatcaggtcttttgggttttcctttactccagatgagtttctcagttgttctttatctctttgatgacattgatatcttagaagtaagtccaggtcagttgttttccagaatatgcctcactttggatttgcctgattgtttcgtcatgatattcaggttaaattttttggcaggagtactgcataggggaagttgtgcccttatcagtgtatcacatcgggaggtacctgatgtcagtttgcccctttattggtgatgctacattccatcgtttagctaggatggtgtctgttagatttctctgtatcctattcctcagcaatctttcacccaatggttttagcatccactgatgattcttggttgaattaattattactatggtagtttttcaatggtgattttctatttctatcccttccatctatattcagtagttggcattcttctgtaaagaaaatctctctcatccaggtgcggtggctcacatctgtaatcccagcactttgggaggctgaggcaggtggatcacttgaggccagcagtttgagaccagcctggccagcatagcaaaaccccatctctactaaaatacaaaaattagccgggtgtggtggtgtgcacctgtagtcccagatactcaggaggctgagtcggagaattgtttgaaccaggaggtagaggttgcagtgagctgagatcgtgccattgcactccagcctgggtgatagagcgagactccgtcacaaaaaaaaaaaaaagaaagaaagaaaatctttttcttctctccccgtcctatctaccctatctatctttgtttttttagtgtcaatatggactcatgaattttttgttgttgttaaatgtgttttaatccattcttattattcattatttattttaatgctcaaaatgagagttcattcaagctggttcctgtgtccttgtgacatatccacatcagtatttgaacactctttgttgtgtttctttttgtaaaataataataaccttcttatgcaaaaggtagcatcttttttatatcttgcattttttgcttaagatattctgaaaatcactgcagtgcagtttatagatctcttcctcattattacttattatttgcatttgtgtgtgtgtgtgtgtgtgtgtgtgtgtgtgtgtgtgtaacaatagtttgccctgtcaatctcctatgcaggaacacaaaaccactgacccaggctcacctatactttccctgatccagccctggagtcagtcatttttctgaggagacctgatcttgttagtgggttctagtatttagaaacccaaatgctaggtatgttcactgctactggtgtgtctttgcctctaagccctatcagtagaaagaataagggtgtgtgtatgtgtgtgtttatgtatatatacatgcatacatacatatacatatgtatgtttgtttacatacagatgaatgtgtctgcgtatatatatatatacacacacatacatctatatatacatctatataaatactgtatatatattcccactcttcttcctctttcccttagtgataatgttgatttccaacatcatcaatatatctgccgtctcattccatttccattcatgcctgtagggaattagtttaattagttactggcttatcctcctatgtttctttttggagaaaagtgtgtgtgtacatataagtttgcacttcctatacaaaaggcagtctactatactcttttgtgctttaagaagatattctgaaaatcactccatattggatcatagagctcttcctcattaatttttacctttgtgtgtttccacatatgtaatagtttactcaggcaatctcctatgtaggacatataggtttcccatattttgctatgatcaatcatgatgtaatgaatgtacatgtatttttataatgtcagaagagtatctttgggataaattcctagaagtattagagctgggtcaaacggtacatacatatgccattttgttagatattgcaaaatttccttccatagggtttactattttgctttccataccagcaatatacaagaatgctgctctcctacagcctcttggagagttttgtgaagtttttggattttgtcaacctgatagattagaaatgccacttctgtgtagttttcatttatttattattattttattactattattattattgttttttgagatggagtcttgctctgtcacccaggctggagtgcagtgatgtgatctcagctcactgcaacctctgcctcccaggttcaagcaattcttctgcctcagcctcccaagtagctgggattacaggtgcccagcaccatgcacagttaatttttgcatttatagtggagacagggtttcaccatgttggccaggctggtctcgaactcctgacctcaggtgatctgcccatgtcggcctcccaaagtgctgattacaggcgtgagccaccacgcccagccttattttattatttttttgagacagggtctcattctgtcacctaggctggagtgctgtggtgtgatcatggctcactgcagcctcaacttcctgggctctggtgatcatcccacctcagcctcccgagtgactgggactacaggcgcttgccaccatgcctagctaattttgtttcaccatgttggccaggggtgtcaccatgttggccaggctggtcttaaactcctgacctcaagtgatccactcgcctctgcctcccaaagcactgggattataggcgtggtccagaaagctttttctaacatctaaattgtaaaggaattccatccatgttttctgctagtagagatggtttctttttttcttttttaaacacttagatctttaatttattgggagtttattcttgtgtatggggtaaggcatgaatccaattatttatttttccaagtgattatccaattgttcgtatatatatatatatatatattttttttttttttttgagacagaatctcactctgtcacccacgctggtgtgcagtgatgtgatcagatttcactgcaacctcaaactcctgggctgaagcaatcatcccacctcagcctcccaagtagctgggactacaggcacatgccaccatgcctggctaattaaacaaaatttttttttttttttttgtagagacaggttcttgctatgttgcacacgctggtctcaaatccctggcctcaagcaatcctcctgtcccagcctcccaaagagctggggttactggggtgagccaccgtgcctggctccaatataatttttttaagttcatcttttcctgagtgatttaggatgctatctgtgtcacatactcaatttctatgtgcattggtctatttatggactttctattctgttccactggtttgtctattgatgtgctggtaccatatgttttaattatggaggcgttatggtatgtttggtatccaatagggtttgttcttcattcttggtttttttttttttttttttttttttgagatggagtctcattctgttgcccaagttggagttcaatggtatgatctcggctcactgcaacctccgccccccaggttcaagtgattctcttgcctcagcctcccaagtagctgggattacaggcacgcgccactacaccaggcaaattttcttttgtatttttagtagagatcaggtttcaccctgttggccaggctggtctcaaactcctgacttcaagtgatccactcacctcagcctcccaaagtgctgggattataggcgtgagccactgtgcccagcctattcttctttttaaggattttcctggctatatccaggccgatttttccatgtgtactttaaaatgaatgtgtcgcactccaaattttgtaaaatttaaaatatttttgtgttaatggtgttaatgttaatggtatcaatggttagtggtataacctagatctaattgacctctctcccaaagtgcagtctgacacgcaccctatagcatcagtactgcatacttactggccagtttcatgctgaaatttcatgctgttcttatatttagtgtcgtggacattcacttattaaaatgttttcaatataccctcttccagggttttgtgtgaacagctatttctagagttccagaataaagaggtaaaagtagcagtagcctgtttcctcagcctggctaggaccacgtgtattagtaccttttttttttttttttttaatatggagtctcattctgtcgccaggctggagtgcagtggcgtgatctaggctcactgcaacctctgcctcctgggttcaagtgattctcctgcctcagcctcctaagtagctctgacttacaggtgcttgctaccatgcctggctaatttttgtatttttagtagagacggggtttcaccatgttagccaggatggtctcaatctcctgacctcatgatccgcccaccttggccagtacattttcatactgctctaaagaactgcccgagactgggtgatttataaaggaaagaggtttaattgacccacagttcagcatggctggggaggcctcaggaaacttacaatcatggtggaaggtgaaggggaagtaaggcatcttcttcccaaggtggcagaaaggagaagtgccaagtgaagggggaacagcccccttataaaaccatcagatctcatgagaactcactatcccaagaacagcatgggggaacgccccctgccccccatgattcaattacctccacctggtctctctcttgacacatggggattatggggattacaattcaagatgagatttgggtgaggacacaaagcctaaccatatcaccagttaattaatcccctcaacacctttactgggccccagtttccctgctaatgtgccaataggtgttataagtgccccaaggtggacaagatataagggccaaaaacaaggggcagttttatactcgcgataccacatgtttgaacaattttttagttttcaacatgcctttacataggttctctcattcatccaggagatatttgtggcaaagtaggaaatgccctcatcattgaatcagaagaccgggatttaggtcctcattctccatctcgttatcatatgagcttctccaagttaatttacttctgacctctagtttcctcatatgtagaaatgaggataggtaaacttattctgtagggctgttagaaaaattaaatagaattcatttttcaacaaacatttttttttcccctgagacatagtctcactctgttgcccaggctggagtgcagtggcacaatctaggctcactgcaacctccacctcccgggttcaagtgattcttgtgcctcagccccccgagtagctgggattacaggtgtatgccaccactcctagctaatttttgtgtatttagtagagacagcatttcatcatgttggctaggcttgttgagaactcctgacctcaggtgatcccccaaccttggcctcccaaagtggtgggattacaggagtgagccactgtgcccggcctcaacaaatgtattgatcagcaaatatgtgtcagtcatggtctaaaaaactggggccctggagcagaataagtcaccatctctgccctttcaagaagcctgtggtttagtggaatgaatcccactcctcctgtctgatacccggggagaaaaaggaacaattcagcaggatcaaaattctaatatggaaggactcagagaacatgtctgtctacctaggggtcaaaaacacaaatgggtgaagctaccaggtttgcctgagacaatcctggtttacatctattgccctaacatttaaacgctgggctgctcaaacaaatcatgtttgcattttggtccctggttcttgacagttggtttcctgtctgataacagggccctgttcactctgctgcttttctgtcctctaatttttgacacccccatgtgtctgcccttttcagaagttccagcgtgagctaagcaccaaatgggtgctgaatacagtgagtacaggtgctcatgtgcttcttggtaagatcctacaaaaccacatgttggaccttcggattagcaactccaagctcttctggcgggcgctggccatgctgcaggtagggatatgatggggcagggttgggtgggacctggcctcaatgcttaggctgccagaggagggcattttgtagagatatggaaatgtgcaagggtacaggctgccttttctgtgtgcttctgctcctcctattaggtgcatcttccccttaaggagtgtgtgtgcacacatgggtgtgtttgtgaaattgtaattattaggcaagactctttcagttacaaacgtgatggaaaacgagtttatactggtttaagctaaacaaagaaaatggtggctgatataactgaacaatcttagggcagctgaatctaatgtgttccagaactttccacccttaactctgttttcccctgtgttgctctcattctttttttttttttgagatggggtcttgctctatcgcccaggctggagtatagcggtgctatttcagctcagtgcaacctccgcctctgaggttccattgattctcctgcctcagcctcccgagtagctgggattacaggcaccccccaccatgcccagctaattttatattttttagcagagacagggttttgccatgttggccaggctggtctcgaactcctgacctcaggtgatccacctgcctcagcctcctaaagtgctgggattacaggcgtgagtcactgcacccggccgttgctctcattcttaggcaagttttttccattaggtggcaaactggccaccagtagtgccagcctgacaatttacgtagcaacactagtgggcaaagagcttgcctgtcctgtggttcttgcaaatgcctggttgggggctcttgcttgggacacatgcatgtccctgaagcaatcactgttctccagagcaagggatgctctgcccagtctggatcatgtgctttcccttcaggatggtggtggaagaagggctgggaggtgagcctcaatccaacctcattacctgagcatggggaagcgatagatcctcagaggaaaaccaaggtgctgataccagaaggagtggatgttgagcagacggcacaacagatggtcatgaaaatggggtcgccagattcggcaaataaaaatacaggacgcccagttaaatttgaatttcagataaatatggaataatttttccatcaagtatgccctatgcaatatttgagatatttttgatttttttcattatatatttggatgtcctgtatttttattcacaaaatctggcaaccctatgtgaaaggaatcaatcaatgaacatttagtgagcacccaccaggtccccaaaataaactatggtccttactgaagtccagtggaggtataaagaaggtgggggtcagaatgcattatagcaaaaagaaggcctcatggaaggggtggtattttgagctaggcctggtggttatggcttggataggtggacagaagagcattcctgttaggtcattcaccaagtcccagaagggggactgggcatgatatgtgagggacacaggtctaaccagagtggcaagtcactttagagcgcagtgagggattgtgaagaagtaggaaggggagggatgtgggaggttaaagccaggcaggaatttggactttgccaaatgcagctagacctgcgctgtccaaaacattggccaccagccacatgtggctattgagcacttgaaatgtggctaatgtgactgaggaactgaatttttaattttatgtaaaaaccaaagctgtatactttttaaattaaatgtaactttaatattttggtaggactacatttctctttttagcattgcaaatctagcacccaaattgaggtgggctggctgggcatggtggctcacgcctgtaatcccagcattctgggaggccgaagcaggcagatcacttgaggtcaggagttcgagaccagcctggccaacatggtgaaaccccgtctctactaaaaataaaaaaaataaaaaaatagccgggcatgttggcacaggcctatagtcctgtctactagggaggctgaggcaggagaatagcttgaatctgggaggtggaggtttcagtgagccaagatagtgccactgcactccagcctaggtgacagagtgagactatctctcaaaaaataaaattaaaattaaaaaaagccacaaaaaaacaaattgaggtgtgctctagttgcaaaatacacactggatttcaaaatacaaaatccgaatatagaaaaatattgcaaaatatctgactaataatgtttaatattgtttacattgggttatatattgggttaaataaaatatattattaaaattgatttcaggccaggtgtggtggcttacacctgtaatcccagcactttgggaggccaaagcgggcagatcacaaggtcaggagaaataggtgaaatcacattttttttttttttgagatggagtctcactctgtcacccaggctggagtgcagtggcatgatctcggctcactgcaacctccacctcctgggttcaagtgatcctcctgcctcagcctcctgagtagctgggattacaggcatgcgccaccacacccagctaatttttttttttttttttgtatttttagtagagacgggatttcaccatattggccaggctggtctccaactcctgaccttgtgatccacctgcctcagcctctcaaagtgctgggattacaggtgtgagctgctgtgcctggccaatttcacctatttctttttttaatgcagctactgaaaacttaaacttacatatgtggtttgcattatatttttttctttatttttattttttttagagacagggtctcacgctgttacccaggctggagggcagtgcattggcaccatccggctcactacagcctcaaactcctgagctcaggcaatcctcccacctcagcctcctgagtagctgggacgataggcaggtgccaccatgcccagctaatttgttttattttttgtagagatggggtcttgctgtgttgcctaggctggtctcgaactcctgggctcaagtaatcctcctgttttgacctcccaaagtgctgggattacaggtgtgacccactgtgcccagccttgcattatatttctactggacaatgctgagctagacagagaggagggtagtgacaaaatggaagcagtgtttgcagatgaacagtcttacattagtgtgcaagatggatttggttacagaggaaactagagagagggagtccagattaccaacctacaggattggtgggacacacatgcaaatttgagcaatttgccattaatcctccagtttaacccagccagtcaagcccaccaccaacccctttaacctagtttttctttacacctgggaattacaatttaggattgccaacatggacaaatcatctacagcctctatagccaggcctcgggatcccagcctctcactctcatagtttattcttctcccttgactccattcttagttcctctggcctttagcctgacactgatcttaccacttcttccttagcggttctctggacagtccaaggctcgatgcatcgagagcctcctccgagcgatccactttccccagccactgtcagatgatattcgggctgctcccatctcctgccatgtccaggttgcacatgagaaggaacaggtatcctgcccactgctggtcattcaacaaatactttttgagtactttcagtgtgtcaggaagtttgttcggcactgggtttacaaagctcagtggcactctgctcacaaggacctccacattcatggggtctttggactgggttttgaaggatgaataggagttttcctggtcaaagtgaaggtttctttctgctcttaatccaccttgttaccaccttctaatcttaataacatcctatttgcatctaacctagtggctcctgattcctgtatcaaatgctttaactcctccagggttctgttttttttttttttttgagagagagtcttgctctgtcacccaggctgctggagtgcagtggcgcgatctcggctcactgcaacctctgcccccgggttcaagagattctcttgcttcagcctcccaaatagctgggattacaggtgccagccaccaatgcctggctaatttttgtatttttagtagagatggggtttcgccatattggccaggcttgtctcaaactcctgaacttaagtgatctgcccacctcggcctcccaaagtgctgggattacaggcgtgagccactgcgcccgaccttcctccggggttctttctctgatgacctcattccctcaggcttcagtgcccactgcctcttccccacaggtgatacccatcgccttgctgagcctcctattccggtgctcgatcactgaggctcaggcacacctggctgcagctccttctgtctgtgaggctgtcaggagtgctcttgctgggccaggtcagaagcgcactgcggaccccctcgagatcctagagcctgacgttcagtgaacccatgtttctgggtgggtgaaaggggcccaaccctgcccacttcagcccagcccgcccaaggggacttgtgccagcagaacatgtgggaggaagaagccccgtttccagggcatccgcagcccagggtagggagaaatattctctccactttgggggagagttcttgctctcgacctagtggtttctactctcaccgacttattctgatttcagaaataaaatgaaatgtcttattttggaaagttaacctttcaaagtcagtaaatcaaacagtagatcagaggtgggataggatgggtggcatgggttggtcttaacagcagatttgtttctttaattctgtccccaactccatttcattggtccctaacacaagccttatactggcatccctatattttcattaccaacatgcagccacgtgtgcatgcgtgcacacacactccaatcccacacagacacacaatgagaggtgggaacttttagataattccaggggaagagggaagaagttgtgtacctaacataggaaacccagaaaaagggcagtcttaatcagacatgacaagatctagaatgactgctacatccacgcattagaccatgaaatgagggtcacatcccctgccccgtgtttgtaagaggaacataaggaactctggaggtgctgaaagcccttggtggtgggacccaacaaacactagaaaccccgggctgtacattttagacatcagctaccccatgttttgacaaatcaaagacacccttgttcatcctagattcatgccagctctttagggcctgtgatatatggccctgacagtagagagctggttcctccttgtgcctgagaaatatccaggtaatagatactcaggaacattcctctggggatgaaactctctggaaaggtccctggaacttttaggcaggagggtgactgcaaaggagccagattttggttttatgaggatagagtaatcaacctttttaaggtggccataggcccctctgtgcatctgagggcctgcagcctctatgtgagctctgttttcctgttccacatcttcacactgatgccttggatgatcagtaatccccctttccccagccactactctcacgatgcttcctgagtaccacccctttcatcttccacaaacacctctcccaaattcaagatggctaaagttaggaaaggctcctgcaaagtccctctgcttctcttcacccacaactctctaccacgttctttcatcgggtcagttcatctctcagcatggtgtcatgaacagtgtcaagtctgagaagatacctagcattctgggaccccaaagggcagagcaccccttgatcctgttgatgatgccaactgtacagtagctcccctcccacatttggaggggatagggcacagggttagatttctccagggctggatgcagaagaactctagaagccctgagttcttttagttgccaagtacgtggatggcatgaagacatcaagtgaattcaattcttatgtagttggacacaatattcaggtattatgaatattgtgggacattattgtgggacattatgaatattgtgggatagccttgggggacattagaagctagacacactctggcattgtggcagagatgaagatgactaagatctgatgcctaccccctagaaactcacaagcacatagcaattagaatacaagacagagttgaagtggattaaacagcgggataagtacagagagctgctgaaattacagggtaggccaagagtcaaggaaagttttggaagaaaggaggctggggtggggtaaaggaacagccaaagaaaacgcaagaaggtttgaagattcacactgggatatggatctgatagcagagaatctggtcattgtcaatgggatttgtgctccaggcagagctaaagaagttcaaagatttttttagaactatccagacacaaatgatagggtgacaacttttgcagttatttggagaaagtaaacatctgagggcaaaaacagcaagagaataatccattattaatacaaggcagtaattatgtagaaaggactaaagggcctgggcctgaagactggattagattgtggaagatgaagaaaacaatttcccagcacatatatttgctggatcaaaagcaaaagggggctaggtgtgccatcctagctacttgagaggctgagatgggaggatcacttgagtccagg

SEQ ID NO: 151 - DNA, 160300 bp, Human
ctctgctgagaacaagagatgtcaggtgtcattaaagcttctgtgaatgaggatgaagaacttgtctccagactttgtgttttatggaaactatacattcatattttggcatagaatagaccttcattctccaagtatctggaaatatttttaaagaaaatgtccacaggtgatctgtaaacaacacacctatgaaagatttgcataataaatataacccgttaattgtaactcttttgcctctgccgtgtctggatggtttcccatgagcgacatgaacagaggccactttcttgacacggtttgcaaaccgcgtgggcaatgaggaaccaaagaatatgttttgttcaaaaaggtcgattttaagaaaaatagtatatgatctctctcctttgtcctcatttctaaaacagccaacaacttgtttttcaaagaacctttcagcaagatattcagaaggagaaaactgagaaagtttagtaaatccgatctaaaaagaaaaagaaaaaaacacctagccctttgatctccctggcattgttattacagccttaaaatatcagccaaccctctggtaggaaaagaaaaatcttacggattaagtaactatttatctcacgatgataattacttgtttgacctgaagtcactcattcctgaaaccacgagttaaattgttgagatgtttttaaaagccggcgctctggctatatttctggtgaacaaatgcctgaccaagaagatcagcgcatctgggacgggtctgagacccacttctgcaagtcgaaagctaaagggtatgggagggagaaagggaagttttccatcaaatacatatctaaagaggtacttaaagactaaaaccacaggtagctggcacggatgggaacggaaaaccattccccctcctcttcccagaactcttgctgagctaggtggtcaggagcgtcatggtagaatataaccccagaggcccaaggtgcagtttgaagaaacggtggcggcttcccctagtggtgtggcttcagagctgctcctaggaagccatttaattccctttaatgatatttccagccgttttctggacctcatgagctcaggatgaaatcagcattctagggtcagcaggcttctccctgctaccacgtgtccagaagcacttccacaagccagggttgacatcgcccaagacgaggcgtgacccggggcgggggaggggacttcgcccgcgtcgcgtgaaggatgccctggccttgggctgcaggcgcggacccccgggggctccccagggtgtaggaggcggagactgatccgctctagccccgagcggtccagcgcggggcgactcgcccgcatagtggagattccggcatgaggcggcggcagtcaccgcctggctgccccgcggaggcccgggagagccgctgcggtctcgggaggccgggctttgggacttgctggcccgaccgccagtcgccctggggccttgggaacagggaaatgcgcgcgccgaggcggtggcggcctcgctgctttcagttttcattgagtctgctggttactgtttaacgtccccacccacgtttcagtttgtttagtaaatcgatcggactgtgagagtcaggccgctgccctgtcgccattgagcaaagctaatattctcccagcatatggtctaaaatctttgctagagatcgggaaaaagaaacaaacaaacaaacaaacaacaacaaaatccttaagcttcctctcccaagtccccccatccccacccccacttcccacctcctcgctttcagcaaacttcccagcctgggaaaagtgcggcgcgggacagcgcggcggggtgggtgggggacctgctgccgggagatgcggcggcggccgcgcggctgactgcgactcgggagctccgggagcggcccgcgcaggtaagtttctccgccgccgcccggggcccgggctggccgcagcgcaccgccccggcggctgccgggcaggaggagcctcggttcccctcgggcggctgaaggaggggctgagcctcaggacccctaggccaggccgtgttgaaagcagataccccgaggcctcgcccagcctgcgctggagggaagaaggcgctggaggtgcggcagcgggcagtggggggaccggggaattgaaaggtgccagtcctctaccttagaaaagaaagaaagagagaaggagagagagagagagagaggagagagagagagagagttgtatttgtttgggtgcagagaaagctttggtggctgtagcgggtcatgtgattcccaggtctctggggggtcttccgtgtaagtacttctgtggcctggggcaaggccaggacaaatggatgttcgtggaccctggaggtctgtgggtaggtgcttggtcctgcagcatcaccccatgcatggcctttgctcaagtctcagcttccatccatctctcatggacacatcttgggagtgggcatctgccggtgatgccgttgggggatattttaaatatagtattgagatcttcctagttaactttgggatgaaatgtcctttggaagcttagttaacaacgtgccagttaagcaataaccgttctgtgtctaactgaaataagccagcacgtgataagatcttagaatggaatgaatatatgtgcttcatacctgatgatctgtgcttataaatcttgctcggaactgagtcaaagcactgtacaacaagcaaaacaatcagcatgagttttcacttgcgggcaagggcaagagaatacagaatccagaagctcaaaagtgaatgggatgtcccggaaactaaacactcattgagagcaccatttcctggttttgtttttgttagtttcttctgctttctcgttaattttacaggtttcccttctctctttagaagcggttatttgtcattaaacattcttcctgtctagctgtcaccgtttttccttaggagtcctcctgtccccacctcctcaccaccactccctctcttttcatgtcctgtggatactctcactcaagccacctgatctgctgtgtggtcgaagtaggtgaccaagtagtgttgggctctttcctggtatcacttgaaggtgtggcaaggagagggaggtggtggtgagtggtggtaaactgctcatttttcacttttcaaaatggagtggaaaattgagagccgtttgtcttcccatttctcctaagctccagttatgggcccacaaataaggacatttttccaaagtgctttatgaaggttcaactcttttagtaaagtgtgtttattaagatctcacaaatattgcatttttaatcacggttataggcatatgggatagcgcaaatttattttagggattgctaagattaaaaaaaaatactcctcatgcaaataataagtatttgtttttgagtgccctggtctttttttttttttttttttttttccgagatgaagtcttgctctgtcacccaggctagagtatagtggcacaatctcggctcactgcaacctctacctccccagttcaagcaattctccttcctcagcctccagagtagctgggattacaggcgcccaccaccacacccggctgatttttgtatttttattaaagatggggtttcaccatgttggtcaggctggtcttgaactcctgacctcgtgatctgcccgtcttgacatcccaaagtgctgggattgtaggagtgagccaccccacccggcctgtttttatttgttttaaattcttgttttttctataaattctgaaggtaatattttctcataaaacaacatcaaaatcgtagtaaaatagaaaaagagccccctccccattccactccatgtagtgtaacttctgttgatgtttgggtttgtgtttctctaatctctatgtgtataacacagacagttttattgttttaaaatttgaatggttcatatcatactagtattctgaaatttatttttctttaatatttttcaaatacttatctgtcaatatatacagatttttttttaaatgtgtctacccaatgtaaccagccagtgtccctcagaatattcgcttggatttttcaatttctaagtattacaaacaatgatatgaatatctatgtacattatctttgcatgggtactgctgaatatttattctgagaagagaattgttggcaccagggagatgtttgatagatattgccaagagcctttctaaacacccacagtatatttcttgtaccatgcttgccaacactatataataatgatttatttagaatgttgtcaatctactgttgaaaaattgattcctcattgttgggaattatataaaccagtcccagaacatctgacttggggagttcgggaatttttctttaaaaatataataaaatgggaatggaattaaatacacttgaatataccatcttattctgagcttgtaaaagaatctaccgcatttgttactaactatccatttactgaatggctggagatactgatacatgataatgagcatttctagattgcaaacatgtggaccatgtttgcaataacaacatgttgcagttgtgattttgtggtttgtaactacatgttttccttccaaagagaagattcacacccctagggcaaaagtatgattttaaatgaggtgttatagctctgggtcctttaaaaagttatccatgcaaatgaaactgggtatgttgttgaaacaaacacagtcttgcaattacttctctccaccatcctcaaaggtatttatacctattggtgtcagtcctgacactcatatagagacataaggaactctgcaaatatggcttactcttattcttatgttttaaagaatacgcacgcacacacacatatagatcaggtaattcttattgaatacttaatatgcactaggtactattgtaggcaatttatatgccttttgctttttagattcttataacaatcctgtgctgttcatattaacattcttcctactttacagacggaaaaagtgaaccagagagaaatgaaataacttgactaaggttacacgtttacatgggatagagctggggattcaaatgaaggcacgtcagctctaggtcgtgaacgtaactatggctgctccatgtcctcattgagttgcttgctgcacaaaggtgcctaactgagcagaggaacggttgaaacctttacactacccacaaaccaaaccatgtccctttgttcttggctgaatattccctggggaaggcacttttctaggccacagaatatctgtaagaggtatcagcacccttgctgctgttggataatttgtaggagctacacagacctattggtttccatatgtatctttgtaactcaatactatttacctactcattatgggtagaacttaaataacagatttgccttattgcctgttcttccctaccttatattttaaaacatgttgacagagtatgctctttacatgatagaattagctgataacatctgatgttcccctgaaaaccttttattttatcaagatggtttcctggaaaacgaatagggagttcactttttttctttttgtgtgacactcaacattttgaagaacatgaaggtctttaaggatgactagcttcatgggaagctgcgtggtgtataagtcacaagggcaggcctcgttgtcagatggcaaggtttacatcccagcccagttattcactaaatgggaagggaggggtgcttgggcaacctatcctctttgaggtccaatttcctcatttttgtaatgtttgcaattataatacctatgccatataattggtagggtaattacatatgctaatccatgggaaacatttagaacagtgcctggcacattgagtaccaggtatgtgttctgtgttgctgttcttatggtagagtgagataatgcatctacagcactgcttgacttgttgtaagttcttaataggtgttacttgtttttattgatcttctctctagagattattatatttatatacacaaagtacttataacttcagaaaattgtggaccgctggaaacctgtccaagccctctaataggccttggagatgtattgatgaataagaaagagagtctctaatttcttggagctttcagctaagcagtgtagagaaaaatcacaccaagtatagttccatggctggaacattggctttggagttattcctacctgtgtgcagatctcaattctgccgcctgtcagttgtatatcccagagcaagtcatttaatgtttcttcagattaaatagctatgaaatgagaaaatagttcttactttcaaagtacatatggataaattcttgcattatttaaattaagcattttgtctgttgaatgtttgacacttcctacactctatttcagtatagaagaatcatatttataaaggataacaaaaaaattgacaagaaatctaggcagcttttcccccatctcatttaaaagtatcattatttaatagtaggatatcatttaaaagtatgataacacctggatctgacaatttaatgttttaagtattttgaatctttgttcccgtgggcttatgcactgtcttgtgctttgcttatgctcttggctgactgaagattatggactgtgttttagaatttttttttttgcattttcttatttcagacatcatagttacaggttccaaataaagttaatatatattattttagcaggaattaagttatagggtctctacacggtacctggaatacaaatataagtatcactgcaaacagtgataatctaccttgaagacaaacataaggtgacactattatattaggataacagataattataattagtataataccgtggaaaacagaagcaaaaagggtacatttagcttgagtagcctggagatatttcagggaagtgttaatgacttctgatgagaacttgctgagtagagaagaattagaaaagtatttggggcagaggagatcagacttgcagtaggaatagtagcaagagatgaagtggggaaggaacactgggccagattctaacaatattgaatgtgggtaacaaggattggacaatgtctgcaaggcaccgggaagccatcacaatctttaagcaggttgagttaagattttttttcttaagattgactggcagcattttggaaaatgggttaaagacagaaagaaagggagaggagaggaggacaggagagggcaagggagggaaggggaggggaagggaggggaggggaggggtggggaggggaatagtgagaactacgatagtggccagtggcaatgaaggtgagaagagattagaatctgtaggtttcaaaggtatttaaactgaattgatcaattatagaatatgtaagatgaaggagtgagagagattgaaactgacctacatttttatatttctcagcaatgacttagaaacaactctttcctaaagttctcctgtctggctggggatacctataaaaaaaaattattggctgggtatggtggctcatgcctgtaatcctagcactttgggaggctgaggcgggtggatcacttgaggtcaggaatttgaaaccagcttggtcaacatgatgaaaccccacaaaaaaatgagcatgggcatggtggcgggcgcctgtaagctcagctacttgggaggctgaggcaggagaattgcttgaacctaggaggctgagattgcagtgagccgagattctagcattacactccagcctggacgacaaagagagactttgtctaaaagatttaaaaaaaaataaaaaaattattattcaccatgctaagtataattgttgagtcctggggaagtattattaaaacctagtgaaaagccaactcacttttcctggagtaggttaagaaattaaatataaattctttatttttaagtcaggtttattgagatataatttgcaatcagtaaaacccctttttatgcatgtgcttcagtgagttttgacaaatgtatgtagttttgtaaccattaccacaatgaagataaagaacatttctgcacccatccccctcaaactccctgtgcctttttgtaatttttccctccactacaccccaggcaaccaccgatctgatttccgtcattaatgttgccttttccaggataatatataaatggaatcatatactatgtacccttttatgtctttttttttaatttagcataattattttgagattcattcatcttactttgtgcatcaggagtttattcctttgggggagaaaaaaaaaccttggatttatgaggtgttattgacataccataaacagcgtatatttaaagtgtacaatttgagaagttttgatatatgtatatacccatgaaatcaccacagtaaagatagtgaatatagccaacacctccaaaggttttctaaagctcttttatacactctttctcctgttccttgcattcccttccttccctgtcccaaagcaaccattgatctactttctggacctgtaaattcatttgcattttctagaattttatatccatggggtcacacagtattattttgtgtctggcatatttcactcagtgtaattattttgatatgcatttatttggttgcatgtatcaatagttgtttttaaaaatattttttgctaaatagcataatgttgtatagatattctgcaatttgtttatccattcacttgatgaacatttggcttgtttccaggttttggctatcacaaataacgctgctatgaactttcttgtatcaagtcttggtgtgtacacttacatttgtcttatatgattacctaggaatagaatggttggatcataggcaaagaattaccaatctggtttccagagtagttgtcccattttacattcccaccagtagggcttgagagtttcagtttctttacagcctaaccaacacttggtatgatcagtcttctaattttagacattctaaaagatataagatatttcattgtgattttaatttgtatttccctaatgactaatgattctgaacatcttttcatgagcttatgtaacataaatgattatctttggtgaagttttgttcaaatcctatgcagtccccttcttttaaaaactgagttgtttgttttttttcattatcaagttagaagagttctatatatattatagatatcagtccttttcaagatatgggttttgaaaatatttctccccacatgaatttattcttatacaagggataggatttgatcaagagaaaaagggtaaagatattatattcataaatgggaatagcatgtacaaaaaaagaaataaaaaattggatttatgaggcctcaatatggagtaaaatagaaaaaggtgatagaaaatgagttttcaaaaataaagagtagcctgaatataaagacttatggaatttagactctttttgtgagcaccaatactaataaatatcaatacaacaacaatagttatactaagaattgagcattgcagtttatagagtgtttttatatacacggtctacagtgtttccccctggatcaatttgctttagtcctgtgacaactatgtgaaggcgcagagactcggggccatgtgaagtcaatatcaaatataggtttttggggtttaagccaatgccttttcaaccagtgtgtgcacgtgtgtgtgttggggggtggggggcatgtatatgtacatttaatggagtgtgaggaaagaatgacagctggattggtctacaaaggctcagaagggcactttcccaatagggcaggggagagtgtcctgctgagctctggcaggtggtacaataggttctgataaagtttgggttgtatacccgtactttaaaaatgacaattcacagttattatagaatggttcacaaaaatttcaaaatctcagaagatattttagattctgtgaattttttttagttgtcttttatttgtaacctgaccctagataaataaagtaaaattatatgttagttaatttgttaagacaaaaataatgtgatcaagttcttttctttatttttaattttgttgttttatttttaatgtctcatgggaattcaaagaacttactttttcaaacacagtccttttgttcagtatattctgatttcattgtcttgctcagggctctgccctgacttttttctgcatacggctgacatgcaattagaacatcagatcaacttcggaaacatgaataaaaattacctgctgaatagactcatgatttggacattttcttttttttcttcagtttttgaacttacttggaagctttgaaatgtcctgatttgctgtgttttcaaaattttcacccatttttaactcctataggttctttttatggtaaagtaccagtggcttataaccgagagaaactgaagtctacttgccagtgtgtggcttctccatattaaaatgctgtacccttaaaaggaaggtaaaaatgattttaatagtaattatgtttaatatgctcatacacattactgtatgttatttgtgcctcttttgtgtgatcagttcaaaatcactttaagaaaactgctgaagtattgtacagcatgtctatgtagacttcgcatgggacctgccattttctcacagataaacctagaaggcttgagcttcttttaaaataaatttgcataatcattctgtttatgttcatattacttaattagtttggggtgatgaaaaacacatgcaggttttggagttaaatacacgtgattcaagcctgcagctttgagcatgttagcaaacttcctgaagctctccctacccagtttactgtacattgtgagacataaataagatgacatttaaagtgctcagcatagagtctggcaaaaggtggatgtacttaataaatgtgtaattgcttgctatcttgactcttctttatattaatatttctatatatttattccgattactgtaggtttggtacacacacatacgagcatgtgcatggtcgcacgcgtgtgcgcacacacacacacacacacacacacgctgctgtgactagtcagcattctgttatttttattttttatagatgagggtcacccaggctgaagtgcagtggtatgattatagctcactgtagcctcaaactcctggcgacaagtcatccttctgcctcagccttctgaatagctgggattacagggagttaacatttattcagtttatgtgtgctagatactaaatgcttcacatatattaaattgtttaattctttcaataactctatacggtataagatattgttatctccactatgctactaaggaaactgagtcaaggagatgttatgaatacccagtgagactaaataattagtgtaagcattaaataggaaccaaggccattcgtctccagagcccagtttcttctgataataacttaaatactaataaggtcttatgctattaatctcatctcagtttttacagtatcttctaaagctaaaaatgaaataaggtaattttatttttctcctttgtgttctatcaattatttatatgaagcatatgaatgatttcactgaattcaatttgagcatctattaggtgaaaataatttaactgatatttcatgtgtaaataaacaatacggcagattgacttctgagacgtgttagaatagattttgtaaaaccctgaacatgaaattttaattgaaactaatttatgaaatcaggaataaaaatgataatagtcacatatttgatcaaatagaagctggtgcttatggtattaatttttatctagttttgcacgataaattttgaatacttagttaattataaatgtgtgtgtgtctacacacacacacacacacacacacacatatattttaggtaggagtgttagtttgctagggccgccataacataatgggccacgtactgggtggcttaaataacagaaatttatcttttcacagttctggaggctagaaatttaagattaaggtttcagcaggcttggtgtcttctgaagcccttctccttggcttgcagatggctgcttcctcctggtgtcctcatgtggccgcccctagattggtgtgctgtctgtgtcctgatctccttttataaggacaccagtcatattgtatgagggcccaccaacttgacttcatcttaccttagttatttctttctgaggtactactgggggttaagactttaacatatgattttgggagggacacacagttcagccaataataacagggcaaccataaaatggttttgtctcattagaagcttggatgttttaaatcttccttacagtctatgcatatatttgttttcgactatcaattaaatcaactcggttcaaacatctagaatcaaaaccatttatgtttacttgtagaaagctttcctctctcctaacagtcatatcctcatccacactttcctcatatttggccttagtatattccccctttgacaagtccttctggctaggacaaatggcaaaattgatgtggcttgaggatgatatccggagtcactgaatatatagaaagaagaatctttcatgaataacctagtgataagtctctctctctctcttttttttttttttttttttttgagatggagtttctctcttgttgcccaggctggagtgcaatggcacgatctcagctcaccgcaacctccgcctcccgggttcaagcgattttcctgcctcagcctcccgagtagctgggactacaggcatgagccagcatgcttggctaattttgtatttttggtagaggcgggttttctccatgttggccacaccgacctcgaattcctgacctcaggtgatccgcctgcctcggcctcctgaagtgctgggattacaggcgtgagccactgcacctgcctgtgataagtctcttgttttttaaaaaataatttttgcctgctacttatgtacaaaccactattttcccatcatggcctttgagtcaatgatagtgttttgattaaatagcagcagagggaagttctgtggacatgcatgtttgtgtccctgagactatcagaagttaaacaacaatgccaaagtaagctgaactccaaagcaaggcagatactgtgtttgcatttgggagaaaccgttttaagtatttctttgaggcttttgtactctgctcggttcaggtcctcatacaggcatttatgtatcaccttaatttataaatggtgagttttagtaggaagcattgaatttacacaaacaataatccagaggctactaaactgggtacttctcttgaatcaatggaaagaaaaacacagcaaagcacccttcatgctgagcaaaagtttcaagatgtcagacccattccgagggacactatctatggtggcttcccctctgtcctgtttgaaagagataaatacacataagcctttaagatacaaagggcagtttctgtatttgaagttatgcattacactggtgatttcagagtttctcaggtaaaatcctaacaactgtgattgcagtacaagctccatgattcacgcccaccaacacttcaatgtcactgacaatgtaattgcagctcatggatgtttaggagagtgtgctcactccagtgcgtctgttttaaaacagcgagtgattagttgtgttatggctttagccatcttgcaataaatgtattaggaacagtggtttattgatttagataaatgtatcaggtcctagctatttaacttctttgtgctttagtttgcacatctctaatatgggatactaccacttaactttcataggattcctgagaatcttcagttgaacaacatatataagacaacactcagcaccatttctggcacttggtagttgcttaaccaactgaaatatttttttgctattatttttaatttcctcttatgatatcagaactaggttaaaaaaaaaactcccaattttttgcttaaatcaaaagccaggagtcttcttaatttctgtcttctccttacacatcttatctaattcatcagtaaattagagatctgccaatattaacttcaattgggcctcacattttctacttatctttatctctactgctgctatgttgtctgagccaattgtgtacgtggacaactgctgtaagtctacgaactgctttctccgtaaccacattgctcccttcaaggaggacattcttaaaacttaaataagaatatgttatcttcctgcttaaaatcatctgattggtttctcattgtactaggaataaagtccagactctttcttgcggcctatgaggtgtttgacgttccggcctcagccgtctctcttttacctcttgcaactctctttgacccctgaagttttagtcacatctgagttttcttcattctcctctaattagtcaagctgttttttatcccagggccttccttcatcatttgtgttcaatattccttccaaacccttccccgatctcccacacataaacatcatatgaatatattttatcctttagttctcagtttctgtgagtttcctctgatttgtacaggtgtcttttttcatatttattgatgattggagataactgagtagacccagctgactgggaggtctcagcagcagacggttgagtggatattgtcacagaaggccaggcagcaagaggagaaaggaaattaggatgccgagtatttaatgaagcaaaacaaacaaaataactctgactcattctttacatataacttgaaaatgtaaattacatgacgtaattatttttgtttagattaagatatgatgattactaagaagtgctagttgaggactctaaagcagtactggacaatgaaagtataattcagcctcatgtgtacttttagttctcttatagccacatcgcaggtaagtagaaacaaaggaaagtcactttaataatctattttatttaacccaatatattaaaaatataatcatttcaatgtatagccaatataaatgtacaaattattaatgagaaaaaacaaagcaagcaaaattattaatgagatctttcctgttcctttttcatggtaggtcttggaaatctgtgcattttacacttgcagcacatctcactttctcgcagtcacagttcagagctctgtgaccacatgtggccagtggctacctagttggtcagtccaggtctaagggttatttaaaggaagtttaatctgcaccattcctttatcatctgggatgactttttattcaattttgtgacaatttaactttgaattggttttttagattagatataccagctttctattttcaatgacttttaaatagatgtatgggaaaaatattttctggcatttacgaaaaacctatcatctctatcttaattatgtttgaagataaatagggttgacaggggttagtttacactggagagttgacagtgctgctagagtttctgcaacttttaagatttatgtaagaggcagtttacacggaaattgcacatgcaagtggttcacaaacttgagtgggcatcagaatcagctgggaagctagtaactctgaagattttttggcttcaccccgggactcagtaggtctaggatggtgccgagcacctgcatttgtagcaagtttgcaggtgctgctcctgctagtagaggccactgctggcatagaccatctcgtctctccacatgcacggtgcacgtggagattgccttgagcaacagggcatgtttttcttctttatatggttgatgatgcagaccctggaaactactcttttttcatttgtttgtttctatgtgtgtgtgcgcgtcaggtggagggtagatggagaaagttacttacctgttcattatgctgttgtgttctactttgagaaaacagtagcaaaagaactttaggggaaagataacaacaaaataaatttcagagaaggaaactgagatcagtgggcaatacaagctccctagtgactattccatatatcttactacttatgctgtgaggggcggggaaataggaaggtattttacctttacagtgtctattttctaggtccagatgacagactattagtgaaataataatagctctgttgaatactcaaccaaaagctagtattttccccacagtaatttatctgttttctagccattatgatatccactaagttctaagtgttaaattagcttttaggctcacatggaaataagtaccattgtttatatgatcagggcagtgcttgttcagctactgtttcatgttggatttctgcaaagctgcaattgtgtgaatcaggcctcagtgaatactaggtaaaattaatgtcaaatttctaagtgatgaggaaaatcattatcaaagtaaatatattaactttgtaaggctatagattttaagtttttttaaataaaggctaaatttaggaaataatccagtgaaattaatctttcctcctcatgttctctgaaaacttatttctctgctgcattatctttttttttttttgagacggagtctcactctgtcacccaggctggagtgcggtggtgcgatctcggctcactgcaagctccgcctcccaggttcacgccattctcctgactcagcctcctgagtagctgggagtacaggcgcccgccaccatgccccgctaattttttctatttttcactagagacggggtttcaccgtgttagccagtatgtattatctaatatttattgagcatttattatttacaggcactgctctaaatgctttatcagcattaattcatttagtcctcataacaagctgataactatattattatcattccgattttacagatgggtgttacacaaccagttaggagcagagatgatattctgctgggcttaattgcaatattatatcttcctctgtgagattcagctgtcttaatttgttctttcaacacttggtctttcttccttgacctcctattccataaacttgtaccaaactatacatccatttgaaatatttttggcctggaattttgttcccttttccataattttatacttttttctccctccatgccttctctaagtcattcaccttatctgaaagtataatccctcttcttttggcttagctctgcccttaataacattttacattagttagctctcataactctcagtatatttatgacttttctttatcttttttttttttttttttttttgagatggagtctcactctgttgcccaggctggagtgcagtggcacgatctggggcgatcttggtgcactgcaacctcaacttcccgggttcaagcaattcttctgcctcataactccgcctcccaggttcatgccattctcctgcctcagcctcccgactagctgggactacaggcacccgccactacgcctggctaattttttttgtatttttagtagagacggggtttcaccttgttagccaggatggtcttgatctcccgacctcgtggcctgcccaccttgggctcccaaagtgctgggattacaggcgtgagccaccgcacccagccatttatgactattcttaattataaaagcagaaacagaacatttaaagaattttttaacatgagaattaaatcactatccagcacacatatacttccttctttgaaactttctgccaagtttctttcttttttttttttttttttttttttttttggataaggagtctcgctctgtctccaggctggagtgcagtggggtgatcttggtgcactgcaacctcaacttcccgggttcaagcaattcttctgcctcagcctcccgagtagctgggactacaagtatgcatcaccacacccagctaatttttgtatttttagtagacacgggtttcaccacgttggccaggatggtcttgatctcttgacctcgtgatccgcctgcctcggcctcccaaagtgctgagattacaggcgtgagccaccgcacccggccctgtccagtttcttatgtgtgtgtgtttgttggcaggtgtatgttttatatttattcactatgagtaatttgtatatggatttttacattgattattgaattattttttccttattaaagtaatatttagcattatcttcttaatatcaaattaaatgttcgttaaatagaaataatacaatctatctaaccctttttaaaatttttgtacaggttgagagtgtttattaatacagcatcttaaattttttacctttattttttaaatttccatttttatttttgattcaggggccacatgtgcaggtttgttacaagggtatattggataatattaaatttgggcttctattgatcccatcactcagatagtggacgtaatacccaacaggaagtttttcagctcttgcccctttctctccctcccaccttttggagttcccagagtctactgttcctaactgtatgtccatgtctacccaagatttagtgcccacttataagtgagaacatgcaataactggttttctgtgtttgtgttaatttgcataggataatggcctccagttgcatccattctgctgcaaagaacatgatttctttcttctttaaatggctgcatagtattccatggtatatatatatgccatattttctttatcgaatccaccattgatggacaccaaggttgatgccatgtctttgctattgtgaatagagctgcgatgaacatacaaatgcatttgtctttttggtaaaatcatttattttcctttgagtacatacctagtaatgggatttctaggtcaagtgggagttctatttttagtgctttgagaaatctccaaactgccttccacagtgactgaactaatttacattcccaccaatagtgtataagcatttccttttctctgcagcttcaccaacatcaatgcagccatatttatttatttatttatttatttatttatttatttatttattttagacggagtctcgctcagccacctgggctggagtgcagtggtgcaatctcggctcactgcaactttgtctcctaggttcaagtgattctcccgtctcagcctcccgagtagctgggattacaggcacctgccatcatgcctggctaatttttgtacttcagtggagacggggtttcaccgtttgagcgaagctgatcttgagctcccgacctcaagtgatcctctcgccttggcttccctaagtgctaagattacaggtgtgagccaccgcgcccagcccaatgcagcttttaaaaaatcaacttatctagtattaacttccagaagttaatttagtgagtcaacaaattagcctttttctggcttttaacatatatccttgtattgcttttaaatgatttttttaagttaatggtagccaatcttaatcatacacacaaatttttacatatattatataatatatgttatatatataatatttatatatattatatattttttatatatatacacacttctgtaaccattgctatgccacataggaaatttccaactacccaaaagtatcactgggctcctaaccaggcaaagattaatttcgcctattttactgtcttgctgtgtatttttctgttgttctctggtatgccattggatgaatatgccacaaataatttaccaaatctactgtcgatggttaattgggtttcccgttttaggctattacaataaagctgtcttgaacatagtttacatgtcttttactggacttgacactcctttctgacgggtatatttccaagagtggaattactggaccataggggatacatgtgtttagctaatattagttttttaaggtataaaatctatttaaaatataaatggaaatatttctattttgtcaattggtaagaatattacactatcatttaaaaggagatagatcaaataatttagaaaagtggtagcagagtctagaaacaactaattccacttgcctttggtcatttcctttctttccgtataagcttactgtacatgcaactatataactattttttcacaacaatatattcctaagtttttagacttttattgtcatactgttttggctgtaagcacccttcacttccattcctcgtggatttcgctcatgccattttgtctgtccagaatcacatcttccctgatctctgtgtttctccattgcacttcctctagacttatcgtactttttatttaactaagattatcagagcaatacattttaaagaacttaagctattcttataaattatctcttctggtcatcttatagcataattttctctaaattaagcagacacttcttttatatcttctcttatacctctgaaccaggaagtgaactcagaaaaaatttccttcaacacaggctttcatttgtttgttagggtgtgccggcaataaatattttctctctgggacacctaaattatagccactgttttaaccttaataatattgttgaggtgcagaccagacaatgtttccattattgcaatttttatttattggaggataaaaggttgtttagtgaaaagagaaggtgggaagaggtaatgattggcaattcttatttattggaggataaaaggttgtttagtgaaaagaatagatgcgaagaggtaatgattggctaagtactatggaactccctgacactgatcgaattatgttaatgtttagttcgtacttgggagtattacagtcgcttgttaaaactccattatgtaactccattttcaggcctgggatcatgatggggttagggataaatacaatgattaatttttaatgcaaggcaataatcagatttaaacattttaaatctgtgtattctttttggtattgttttttaagtggttttagttttgaaaaaagttttagttaatgttcaatgatattgctattacatgagaagtgaggtgataataagtaatctttttagaccagtcttatcaaaaatttacagcataccatgtactggttatttgcaggtattcttttactcatgatctctctgtatttctttgaatgcatgttaccttgtgagtatcagtgagtaggctgtgatgttgaacatctgacaggcatccagactctaattaactgttgaaataaaaatattaaaaaattaagaataggctaggcatggtggatcatacctgtaatctcagcactttggaaggctgaggcgggtggatcacttgaggtcaggagttcaagaccagcttggccaacatggtgaaacccagtctctactaaaaatacaaaaattagcctagtgtggtggcaccacctgtagtcccagctacttgggaggctgaggcaggagaattgcttgaacctgggaggtggaggttgcagtgagctgagattgcaccactgcacgccaacctgggtgacagagtgagaccctgtctcaaaaaaaaataaaataaataaaataaaataaagactatcttctcatctagtatagtactttacagatagcgaatgccttgttaagtatttgttgaatgaatgaatatatattagtataataggttaaattgtaataagcctatgtttctttgatttagataatagcagggtatattgagaaaaatgtggaaaataaacagaatttatatactagccctataaatgtatatatatgttatgtgtattatatcaaataactaatattttattaatgcaagtgaaccctgaaggtttgtgtagcattatttaagccagcagttcttttcctcagggtgcatccttcacaaagtctggcacatgaataagaggaagtatgtacagtagtatcaatcaaagcaacattgttttagtactagaaatcaatgaacaatcccaatgtccatcaatatgcataaaacattgctttatatacttataatggaacattacattgtggtgagaacatataaactagaggtatactcatcaacatgagtaataatattattacttacattttgtaaagggaaggtaggaatattgatcaaaacctcaggttaatgctgcatcatttaaatctagacctagcaggtgggtgtatgattggagagaggcacaaccggggctttcccagagtgtcagtgttctctttcttcacttaggtaagttacttggtgtttcacttattgttagccttttaccctcacaaatgcattatatgcatgctttcatctctgatatattttaaaattaaaaagaaaataaactatttcctaggggcagtaatatgttaggtaatatccttgtatttatggagcttccagctacagtaaaggtagacattaattcaataactgcaattactccaggcttatttaataagaagtatgtgatgccataagactatgcaatagctgatacaatctaatcaagaaagcgcagaaagagcttcactgagaaagttgtaactgagctgatatctaaatgatgagtgaaaattaacttagaaaacaaaggaaaaaaagaggaatatttgcaaaggccttctggtgcaggagagagcactgttgaacatgaagaaaataaagaaggccagtatagttggagaaaacagtatcatgaagaatattatttgagaggtagtaagggtcaaaataagaatcttgtagataatgcttttgcctttgcctatgttgatgagaagctactgagatattttaagcagggagatggggtaaacagattcacattttgaatatattattctggtggcaggtgaaaaatggattgggtggaggcaaaagtagatacgggaagaccagtcaagagagtattttagtagttcaggcaccagatcatgatagcttaacggaagttactggtagagaatatgagaagagtagattgatttcagagaaattttgagggcaaaatataagggacttcgtaataatttagaaatggcaagtgtgcgagaaattcctcaagaataatttctaagtttctagcttgcctaaatgaatggttggtggtacccatcacagagagagaatataggaagaagaccaaaggttaaatggacactccaacatggtcagatttgtacacctaacatgtgtgcatcttagatctctaggatcaggtactgactcaatttagactttgtctttcaaaagttatgtttcaacaatgtattttgtctggaatttaatcttcaatatagtgtaactccatttttctctctctttctctctttttttttctttagacaacatacagacatattaatataaagtaagtgtttgggctctgtttttctctcttccatttcaatttcttaccattgtccctacttctaccataggaatctctggatttctttccaccacaggaatctctgactctaaatcccacataatggaggattattggttctttgctactcaccatggttaattaatactcacttctcataatgaagctggtagtatctaatgtaagccttgttccaggattagtgaagatcatgacgtttcataaaagtgtagtgaagttaagcacagctctgtgttttgttccttttaaagcagaaaggccgatcaggtccaaaagtctgagttgaagaaagaaggctagaatcatagcatttcattgcagtgttccaatcagaaaccccatagttatcctttccttgtatttctgacagtatggtagactgaatgtctagagaaatcctttcattagcaaaaaacctaaagattccagacagtatatgtatatttaaaaattactttgggaggccgaggccagcggatcacgagatcaggagaacgagatcatcctggctaacacagtgaaacctcgtctctactaaaaatataaaaaattagccaggcatggtggcatgcgcctgtagtcccagctactagggaggctgaggcaggagtatcgtttgaacccgggaggcagagattgcagtgagccgagttcgcaccactacactccagcctggtcaacagaacgagatcttgtttcaaaaaaaaaaaaaaaattaattgcatagctgagttggtggaaagtaaggagaattctcagagtccatgaacagcatgaactaacaaatcaagagaagtaagcaagatgaatgtcactgaaacagacattttctctgaagatgtttggaagttcttcactgcatacagcctaggatttacaagaccattttttgtaaacaaatttagtttgggctggcaaaagttggcagatttgactacaaatacctctgcatgaataggatccctgaaagacaatacttattgtgaattaaataagcaaataaaagagacgggggtagggagtagagagagagagagagagagagagagagggagagagagagagagagagcaagagagaatgctcttgagggagatatttggttctgggtgtagtgaaggaaaaggaaagtttcaccagaagaaaattcataacttctcccttatgtaagccatattcatagtacatatgtaacctcaaaacctctaaaggtaaaattttacttttaagtgacacttggttgatagtgtccccaagtactttgcagaagcaagcaaaaatcctgtgacaagaaagcactttaaataaaggtcccacataactctcatagataaaatttcaaaggatatgagattgcattaaaaagataatcactaaatacaaacagaatagaacatctcagtgaaagaaatcagtaaaaacaaactggagaagtagattacgaagattgttgttagaaatttcatttgtagaatgtaaattaattacatataatgttcaaaataatatagattattaaaaatatggtaaaagacagaagactataaaaacaaacagatacatttaaaaaagaaccaaagagcattttgagatatgaagaaaaattaacaaatgaaagttgaaatttattgtatgtgttatacagcagagtagaaatagctgaaaaggaaatttttgaaatagaagatagatctgagaaaattatatagaaggtagagcaaggagacagagctggaaaatacaagagactttaggagatagagaggacagaaagagaaattgcaacatacatctaactggagagccagaatgaaggaagagaaaaaacatgagtgagatgtttaaagtgataatagttgagttacttttaggattgatgaaagacatggatcttcatattcacataacaaaacaaatcttaagttaattatggtataatcacagaacggcttgatatagtgaaatcgctgaacattgatcgagattttaaaaagcagaaaaagataatatagaaaatagaagacagtagtatatgatagaaatgaatctaaacatatcagtgatcgcaataaatataaattgagttaaattttcaattaaaggagattatcagacagaaaacaaaacactacaaacaaaatcccacttctgttgtttataggaacacacctaaactaaagaatatagatgctaaggcccggcacagtggctcacgcctgtaatcccagcactttgggaggctgaggggggtggatcacgaggtcaggagtttgagaccagcctggccaacgtggtgaaaccccatctctactaaaaatacaaaaattagctgggtgttgtgtcaggcgcctgtaatcccagctactcgggaggctgaggcaggataattgctttaacctgggaggcagagtttgcagtgagccaagatcgcaccattgcactccagcctgggcaacaagagtgaaactccatctcaaaaaaaaaaacaaaacaaaaacaaaatagatgctaagtgcagtggcttacacctgtaatcccagcactgcacttacaacagtggctgaagtaggagtatagctggaaccaaggagttgcagaccagcctgggccacatagggacaccccatctctacagaaataaaaagaaaaataattagccaggcgtcatgatgtgcctgtagtcccagctactcagaaggttaaggagaggggatagcttgagcccaggaggttgaggctataggttaaaccatgattgtaccaccgcactccaacctggattatggccctgtattaaaaaaaataaaaaagtaaaaagatgggaaaagatgtatcaaaataaaaaaaaaaagaatttgttttatttatttatttatttattttgagaaggaatctcactctgttgcccaggctggagtgcagtggtgcaatcttggctcactgcaacctccacctcctgggttcaagcgattcttgtgcctcagcctcccaagtagctgggattacgtctggctaatttttgtatttttagtagagatggggtttcagcatgttggccaggctggtctcaaactgctgatctcaggtgatctgcccgcctctgcctcccaaagtgctgggattacaggcataagccaccatgcccagccagaatttaccttttaaataacataaaaaggaaattctcaagcaaaaatactgttctatatggtagctagcttctgagatgccacccagcgatccttgtcctcctggtattcatggctttttttaagactcatctaagaatgaataggcatgatctttttaaccaataagatagtccagaaatgacagtgtgtgatttctgaggttaaactataaaacacaatgtagctttcaccttgttcttttggaacactttatgggggaccatcagctggaattctgtgtaaacatttagacagttctggggaaaggtacatatttaatgaattgaagcttcaaaagacactaccaatttgccagctctttgaatgagccattttcaaagaagatcccctgccccagtgaagtcttcggatgtctgtactcctgctaacaccttaagtgtaccctgtgagagacctcaaaagagaaccacacggccaaactgctcccaaatttctgacccatagaagctataagaaggccagctccgatggctcatgactctaatctgagcacttttggaagctgaggcaggggcatggcttgaggctaagaattagagaccagcctggtcaacatagaaagaccccatctttgcagaagagaaaaagaaaaaaattagccaggcatggtgatgtgcacccatagttttagccactcaggaggctgaggcagaggatcgcttgagcccaagattttgagagtgcagtgagctttgatggggccacagcaccacagcctgggtgacgagagtcagaccctgtctcagaacaaaaaaaaaaaaaaaaaagaaagaaactttaagatcaattttaattgctgttttaggccattaaatctctaagcaactcaactcaacaagaaaatatgattgtatttattgattgatttttaaatgttttactattactattatcagtagtagtagtagtagtaatagagacaagatctcactactgtgttgcacgggctggtctcaaactcctgggcttcagtggttctcccacctcagcctcccaaagtgctgggattacaggcataagccaccacgcttaactgaagatacaattttaaacctttatgcatgcaagtataatgtcgaaataaactaggtaataatttgcatacattttaatatatcattacagttggaaactttaacacaactgtatcagcaattctaatattgaccagccaaaaaacagtaagtacatagcaggttttataaatttcaaaagactaatgtcatgtaactatagtctttgactttagcacagttaagataggattcaatataaagataagaaccctctagtttgaaaatcaaaaatagacaccttaaaataacttatgtttcttttcttttttttttttttttttttgagacaaagtctcactctgccgccaggctagagtgcagtggtgtgatctcggctcactacaacctccgcttcccaggttcaagtgattctccttcctcagcctcctgagtagctgggattataggcgcctgccaccccacccggctaatttttgtatttttagtacagatgaggttgtaccgtgctggccaggatggtctcgatctcctgacctcatgatctgcccgcctttgcctcccaaagtgctgggattacaggcatgagccactgcgtctggcctaaataacttatgtttccaagaagaaatcataatggaaattagaaattgtttaaaaatgaatgatcatgaaaatgccacatatcaaaccatctggaataccactgaagtagaaacaaaaggagaagttaaggccttaacaagcttataatagagaggaaataacagtgcaaatagatgagataaacaactaaagaagtcagaaacagaacaacaaaataaacacaaagaaatagaaggaaagaagtcacaatgataaaaatgtaataaacaaggaaacaataatacaatagcgaatgaaaaatagggagtgaaaaacaacttaaaatttggaaacgcttaacaaaatgattccagaacacaaacaacaaggccaacacacacacacacacacacacacacacacatacacaaatcaggtaagaaaagtggggtataactatgatgcagcaggtattacaatgataatacagggacacgataaatagctttatacctgtacacttaaaacatttaaaatagtagttgtatccacaaaaatataatttctcaaaaataacatttgaagaaatagaaaaacttagtagtctgataaatcattaaggacttgaacccattgtcaaaaatctctccataaagaacatacgaatctgaataaatgatttcacaggtgcatctatctaacagttaaggaacctataatttcagtcttactttaactctttaaaagaacagaacatttgggaacactctacaacttatttaatgaggctagtgtaattttgatatcaaaccaacacaaaatacaaggaggaaaaatagtaggtccatctgactcaagcacagatgcaaaggcctatacaaaatattaggaaagaaaaactaaatttgtttataaaagataaatcatgatcacaggtttattatagaaatgcaaacttgattaagcattagaaatctactaatgtattcaccaaatttataggttaaaagtaaaatctatttcagtcatcttacaaatacagaaaaacaacctataaaattaatgtcaattcgtgtttttgttaaaaaagcttaacaacctaaaaatacaagagactatctttactataataaagtgcagctatcgaacttttttactaaatatctcattccatggtgaaacattaaaatccagagtaaatcaatgatgcctgttttcaccacatcaattcaacattgtactacagactggacccagggcaatggcaagagaaaaagcaacaagttattaggctctgaaaagaaaaaagtaatttttgttgttgttgttttgagacagtctcactctgtcacccaggctggagtgcagtggcatgatctgggctcactgcatcttctgcctcccggattcaagcaattctcctgactcagcctcccaagaagctgggattacaggcatgcaccaccacacccagctaatttttgtatttttagtagagacggggtttctccatgttagctaggctagtctcgagctcctgacctcaggtgatccacccaccttggtctcccaaagtgttggaattacaggtgtgagccaccacacccagccaaaaaacaaattttaatgttctatagaagataggacttcctattttaaaagatctatagaaaaatttttagtaattttttactataaaatccaaatatggcattcatgtgcatttgtatatatcaatagtctgttgctactgtcttaactttgaaatattctgttataatagcaacataaattataaggtacctcagaataatgggagaaacgcaagttttttacaagggagagaataaaattgtattgaaaaacattagaagacaaataaattaaaaaatatattgtaaataggaggacactgtttttaaaatgacagttttactcaaattggtttatgatttaatgcaattcctattgtctcaccaggacgtttcatgaaaactgactagctcatctgaacatttatgtggtagatcaaatggacaagaattactgatatgctcttgaaaaagtgggacaaggaaagacctcttgccctatcagatatcaagatctattttaaatctattataattattacaacgtattgttagtttagaaatatattgctgaaacagaatgctcggcccataaacaacccacacttctgtggaaactcactctctgagcctgctttgcagatcagtagggaaagggtagttgcccgaacaaaagatattgggaaaactggtagttaatatagaaaagatgaaactggatcccacctcacgctttaaattcaattccaattggcttaataggtgaaatttcaaagggacataagagaatatccttctgattacttttcatgaaataattagttttaaaaagaagcaaagctgtaaagagacactgaaacatatttaaagtttaaaatgagaactttgtccaggcacagtggctcacacctgtaatctcagcactttgggaggctgacatgggaggatcacttgaggccaggagtttgcaaccagcctgggcaacatagtgagatccctgactctacatagaataaaaaagttagctggacatggtggtgcatgcctgtagtcccagctactcagaaggctgaggctggaggatcacttaagcccaggagttcaaagctgctgtgagctatgattgtgccactgcatttcagcctgggctgagcatcagaaaaacagtttgttaaaaacaaataaacaaaagaaaaacttgtaggtgaacagacactataaaagactgcaatggcattccaaaagctgggagaaaatatttgcattgcccatgaccaacaaagtttcgaatataaaaagtcagagtcagtcaactacaaaaagaaaaccaaaagaaaagtgtgaataaggcatagacatttcatagaaatatttgtaaacatattcgcacgtatctataattagagaaaagtaagtttaaactgaaattcttgtgtcatactcatcatatttccaggtattaagtgtataacactgtcagcattagtgagcaacaggaactggcatacactttaggcaaagtgaatctttctacaatccctctagaaatctatttggaatcaatggtaaagtttagctataacactgagaaagcagttccactgctaagtatatgtcggggcaaggggccttaaactatctaggacaaaggaagaatgttttttaaaatttccagtcttttataaaatgtgacaaaaataaattattttaaaaaaggcttgaacccaggaggtgcagggtgcagtgagccgagatcacgccactgcactgcagcctggcaacagagtgagactccgtctcaaaaaaataataataaaaataaaataaaaaaagaaatgttaatacacttccagaaaacaataaatataaaaacatggacataaaaaatataaactcatttttatcattagattcggtagacataattatattttaataaaataatataaagtaacgctgatgaaaatatagttagacaaaccaaacaagttgttcattgaaagtgtgattattataaattaatataaagaatcactatcaccttttgtcattccacaattatttctaaataaaatgctatgagtgaaataggcatttcatatattttatgactgtaggagcactttgaatattcataatatgtaattaatagagtttttaatgtgacaaatgagcttgtttcttgcttgcttgatgtatctaaactggattgatgacaacacgaaattgttcccatattttgttacactaaatcaatttcacaacagcatgttgacaggtatgtacatgtaatgatgcatatacataaacatatgcatatttaagaaatcatgagttcactctcatacctccaattctaatccatcaccagatgaactttcttgccttttctcattccctatttgtctcttcttatacagccagatccctggctgccaataactataaaacatttattcatttgcttagtcctatattgacatctaaaactgtttcagaattacttccactgtaccactgtaaaacctaaaacaagttctggatatgttagaacattgtccctgtccctaacatccaaccctgctccagactgacggaatacagacaaataatgagttcacaggaaacttgattaattcctttctttcctctcaatctccctccctctttctctctcttcatccctccctcccttcctttcttccttttcagttatgatattcatttggaatacaatttaccttcatgcattttaccttgcttgctttctgttttatgtttttttttctgcttccattcttatttaatgtaatttttaaatatgtatgttatgctttcaaaagtaaaaacaatatatataaaagaattacaacaggactcacactctcgttatctcttctactctatactccaatcacatgtaaccaatttcagtgggattctttttcataaagattagcagatctatgtataatagtttttgcttttttctttcacgagtagggtaaatatatatgcttttctttttccttcactttgattttttttctccacttaattatatctcttgaaaggtactccaaaaccatttatagagatcttcctcattatttctttgtagttgcatagtactgcaccgtgcatgtgtattcattgtatatttaaccagcatcctaggcttggatatttaggcagtttcaatatttgcaattacaaacaatcttaaaataaataacattgtgcatatatttatcatggttggaggtgtatcttcaggattaattcatagtaatgagattaaagcatccaaagagtaaatgaaaatataattatttttaacttttatacaaaattaacccatggagcctgggattacaggtggatgccataattatttagtattttcaaaattcattttcaaatctccatccataacctattttaatttatagttaaatgatgaattttttacatgtctgcattttgatgaaaagtaaattccaaagtactctatcagattcataggattcaatgataattttttgctgatgtgcagtatcaagatcttcattgataatattgttaaattataggactcatcataataatctaaaaactttgttcttttaggcttctgactttcatttttgttttttatctggcattaaaaaacatattacattttttcttagaaagaagtgtaaacagcaatgaatatactaaagataaagacaatgaagtaagtctggcagtctcaatcacatctttacttgggatcaaaatggtttaataattgcaaagatattaagagttcacatatattaaatcatgtcaaaaacttcaaacattctctactgaacattttcctttattaagcattatatctccacattagtttttttaaatacaataagcttacatgttataatcataatataataatttctaccttaaaactgttttttagagaattcagtttttactacataactaagacttttttttatagcaagtctttcttggtgaagcaaccagaatattgatttctattgtcatgaaagctccttaaattttttttttctttccagtttccacatacagtattgaaggtgaaagcttcttaatctgcataactatttcagaatattgtcttgtcattgcaactgtaccatcagaacattatcttaatgaaacttaaactcccaactattatgtcaatgcaatccttttcagttttacaaatccatagctggttgtttctagtcatcaatgacattgagaaaatacttctttatatcaccagcctatacagtttacacagagattaaaatagttgccaagttagtgatatttttgcattcatccagttcctagctgtatttgttctgtgagtgggtccattatttttcttcattttctgtagtgttttaaagtatgctgtcattgaaaagtgggacttgagctactttctttgcagtggttgcagctatcatttctaacacacttttgatgcagtgtttcactaatgtctcagcaatttttaatgaatttttagctttaacaacaccaactgctttttaaaaccatctatgaattgtttatgtttaaataggaatatgtatagtttcacagattgccagcaattatggctaaaaaactaaatcaaatatatggaagataatgttttatttctttgaaattgtttatttttcattattttatttagtgttaccactacattctgaaaaggtataccttgtcctgaccaaaattaaaggaaaaaaggtgaagcttatactgctgtcaataaattaaagattaaaactaaatacacaaattttacagccctaatttagctaataatgttaaattataaattttaaaagtaggcttaattttaaattaagactatacatgtatgtataaaagtatatgtcctcattttatcccatttttatacacttcaattaattaatttcttcttattattcttattatttttgagacaggatcttgctatattgcccaggctggagtgcattaaagtgatcatggctcactgcagcctcaacctcttgggctccagtgatccttccaccttaacctgagtagctgggattacaggcaggcaccacaatgcccacctaaattttaaatttttttgtagagataaggttttgctatagtgctggcttatacacttttagattgcagttcccaatctaattttaaaaatattgcgtggttctattgtgcatgacttgtatgtgtgttttttagagtttttattttattatcctaagaatacttaacatgagagctaccttgtaacaaatttttaatttttaatttctttaaagccaggattagaactttttttttttttttctgagacagagtctttcaatgtcacccaggctaaagtgcaatggcacagtctctgcacactgcaacctccgtctcccaggctcaagtgagtctcacaccttagcctcctgagcagctgggactgcaggtgtgcgccaccacacccggctaatatttgtatttttactagagatggggtttcgccatgttgtccaggctgatgtcaaactcctggcctcaagtgattgccctcttcagcctcccaaagtcctgggattacagatgtgagccaccatgcccggcctttataacacatttttaagtgtacaagaaaatattattaactgtaggcataatttacagcagatcttgataactgttttttgtcataccgtgagttcaacattatcaaactagcgaagtcctattaaatgatatgagttcactgattctgtgcttggatattatagcaaaaccagattacagttaaagtttctaaatgcttgctcttcatttctgtacttatcccatcacaaacttgtagcaaacaatcagcgaactggcttgggtccacagaccacacattgatttttgcacctggaaacatacactagaatatttatagcagcactgtttgtaaaagcaaaaattggaaacatcccaaatgtccatttatagtagaatggataaatgcattgtggtatattcacgtgatgatttactataaagtagagaaaataaataaagcattcttgtgtccattaacatagatgaatcttataaacacaatgttcaggaaaaaaatcaagtcagagaagaatgtattacagtaatattttatttatataaagattcaaaagagaaacaactaaatagttaattgttactaaccatagatatgtggttaaaactcaaagaaatgcaagaagttattatcacaggatagaaattaccccagagagtggagattcaatcaagttaaggtacccagggcacatcgaaattactgttcattctctactttatagcctgggtatcgggtatatggatatttgtttcattgttattaaactgaacacatattaaatattcttttgcatatatattttataataaaattactaaaattataaataggcaagacttttaaaaaatatttttgaaatacatttaaaaacatgtgaatggcccagcgcaatggctcatgcctataatctcagcactgtggaaggccaaggtgggaggatcactgaaccccaggaagtcaaggctgcagtgagtcatgattgtgtcactgtctccagcttgggcaacagagagagacctggtctcaattaaaaataaatttaaaaataataaaatatgttaaaaataggaagacattcctagatgggaagataaataatcacaattatgcatttgattcaattccaatcagaaaaataattaaaaattaatacccataaatatttcctaaagcctgcaggagatggggatcattattttatattgagtttgaatatagaaatttgatcatgacaatataaaaacctggtttttaaggtgttcagggataaaaataaaataaaatgcctatattctgtgagtctgccagaacaactatagaacaagtaatgatcagatgaccatgactggaaagcatgacagagcacaggaatgctcaatctcacactctactatgtattgccttcgtgatctgaatgtttgcatctccccaaaattcatgtgctgaaatcttaattctcaagatgatggtattaggagggtggggcctttaggaggtgattaagtcctgagggctctgccttcgagaatgggattagttcctttataacagaggccctagaaatctagctagtctcttctaccatgtgagggaacaggagaagcagccattatgaacctagactgggccttcaccagacaccaaatctgctggtactttgatcttggacttcccagcctccagaactgtgagaaataaattcctattatttataagcaacctaatttatggtattttgttataccagcctgaaggaactaagacacttaactattttaatcaaatcacttaactgcattatccagttttccagtctctaaaatgagaataacattagtattaataacttctgaattattgcaataattatatgacaaaatacatattaaaaggataacaagttatacgttggtagtcaaaaattatttattttagcctcataatgaagaattctataaaatttaaagtattcgatgttttactttgttttcattttgagatgagagtctcactatgttgcccaggctggttttgaactcctgggctcaagtaattcttccaccttagtcaccagagtggtggggattacaggcatgtgctctgggtccagtgtatttgctggtttacttatgaaaagtaagaacatgtgatatatatggcatgtgatttttttcacctatctatattgtgtacattcttctatgtcaatcttttttgtagttgtaataaatcagtaagttgtaattcattttatgtttatcatttgaccaaataaaatttaaaaagtcatccccctctccatagtactcaaaaagttgggaactgtaagtataaataaataagggtgacttgtcaaactagatattaattaaactctaaagctataataattaaagctctatgatactggtttgagaaatgaagaatagagcaatgaaacaacataaaagctctgaaagaaaacctagggcagccagagagaaaggtcgggttaccctcaaagggaagcccatcagactaacagcagatctctcagcagaaaccctacaagccagaagagagtgggggccaatattcaacattcttaaagaaaagaattttcaacccagaatttcatatccagccaaactaagcttcataagtgaaggagaaataaaatcctttacagacaagcaaatgctgagagattttgtcaccaccaagcctgccctaaaagagctcctgaaggaagcgctaaacatggaaaggaacaaccggtaccagccgctgcaaaatcatgccaaaatgtaaagaccatagagactaggaagaaactgcatcaactaaccagcaaaataaccagctaacatcataatgacaggatgaaattcacacataacaatattaactttaaatgtaaatggactaaattctccaattaaaagacacagactggcaagttggataaagagtcaagacccatcagtgtgctgtattcaggaaacccatctcacgtgcagagacacacataggctcaaaataaaaggatggaggaagatctaccaagcaaatggaaaactaaaaaaggcaggggttgcaatcctagtctctgataaaacagactttaaaccaacaaagatcaaaagagacaaagaaggccattacataatgataaagggatcaattcaacaagaggagctaactatcctaaatatatatgcacccaatacaggagcacccagattcataaagcaagtcctgagtgacctacaaagagacttagactcccaaacattaataatgggagactttaacaccccactgtcaacattagacagatcaatgagacagaaagtcaacaaggatacccaggaattgaactcagctctgcaccaagcggacctaatagacatctacagaactctgcaccccaaatcaacagaatatacatttttttcaacaccacaccacacctattccaaaactgaccacatacttggaagtaaagctctcctcagcaaatgtgaaagaacagaaattataacaaactgtctctcagaccacagtgcaatcaaactagaactcaggattaagaatctcactcaaagcggctcaactacatggaaactgaacaacctgctcctgaatgactactgggtacataacgaaatgaaggcagaaataaagatgttctttgaaaccaacgagaacaaagacacaacataccagaatctctgggacgcattcaaagcagtgtgtagagggaaatttatagcactaaatgcccacaagagaaagcaggaaagatccaaaattgacaccctaacatcacaattaaaagaactagaaaagcaagagcaaacacattcaaaagctagcagaaggcaagaaataactaaaatcagagcagaactgaaggaaatagagacacaaaaaacccttcaaaaaatcaatgaatccaggagctggttttttgaaaggatcaacaaaattgatagaccgctagcaagactaataaagaaaaaaagagagaagaatcaaatagacacaataaaaaatgataaaggggatatcaccactgatcccacagaaatacaaactaccatcagagaatactacaaacacctctacgcaaataaactagaaaatcgagaagaaatggatacattcctcgacacatacactctcccaagactaaaccaggaagaagttgaatctctgaatagaccaataacaggagctgaaattgtggcaataatcaatagtttaccaacaaaaaagagttcaggaccagatggattcacagccgaattctaccagaggtacaaggaggaactggtaccattccttctgaaactattccaatcaatagaaaaagagggaatcctccctaactcattttatgaggccagcatcatcctgataccaaagccgggcagagacacaaccaaaaaagagaattttagaccaatatccttgatgaacattgatgcaaaaatcctcaataaaattctggcaaaccgaatccagcagcacatcaaaaagcttatccaccgtgatcaagtgggcttcatccctgggatgcaaggctggttcaatatacgcaaatcaataaatgtaatccagcatataaacagagccaaagacaaaaaccacatgattatctcaatagatgcagaaaaagcctttgacaaaattcaacaacccttcatgctaaaaactctcaataaattaggtattgatgggacgtatttcaaaataataagagctatctatgacaaacccacagccaatatcatactgaatgggcaaaaactggaagcattccctttgaaaactggcacaagacagggatgccctctctcaccgctcctattcaacatagtgttggaagttctggccagggcaatcaggcaggagaaggaaataaagggtattcaattaggaaaagaggaagtcaaattgtccctgtttgcagacgacatgattgtttatctagaaaaccccatcgtctcagcccaaaatctccttaagctgataagcaacttcagcaaagtctcaggatacaaaatcaatgtacaaaaatcacaagcattcttatacaccaacaccagacaaacagagagccaaatcatgagtgaactcccattcacaattgcttcaaagagaataaaatacctaggaatccaacttacaagggatctgaaggacctcttcaaggagaactacaaaccactgctcaaggaaataaaagaggatacaaacaaatggaagaacattccatactcacgggtaggaagaatcaatatcgtgaaaatggccatactgcccaaggtaatttacagattcaatgccatccccatcaagctaccaatgactttcttcacagaattggaaaaaactactttaaagttcatatggaaccaaaaaagagcccgcatcgccaagccaatcctaagccaaaagaacaaagctggaggcatcacactacctgacttcaaagtatactacaaggctacagtaaccaaaacagcatggtactggtaccaaaacagagatatagatcaatggaacagaacagagccctcagaaataacgccgcatacctacaactatctgatctttgacaaacctgagaaaaacaagcaatggggaaaggattccctatttaataaatggtgctgggaaaactggctagccatatgtagaaagctgaaactggatcccttccttacaccttatacaaaaatcaattcaagatggattaaagatttaaacgttagacctaaaaccataaaaaccctagaagaaaacctaggcattaccattcaggacataggcatgggcaaggacttcatgtccaaaacaccaaaagcaatggcaacaaaagacaaaattgacaaatgggatctaattaaactcaagagcttctgcacagcaaaagaaactaccatcagagtgaacaggcaacctacaacatgggagaaaattcttgcaacctactcatctgacaaagggctaatatccagaatctacaatgaactcaaacaaatttacaagaaaaaaacaaacaaccccatcaaaaagtgggtgaaggacatgaacagacacttctcaaaagaatacatttatacagccaaaaaacacatgaaaaaatgctcatcatcactggtcatcagagaaatgcaaatcaaaaccactatgagatatcatctcacaccagttagaatggcaatcattaaaaagtcaggaaacaacaggtgctggagaggatgtggagaaataggaacacttttacactgttggtgggactgtaaactagttcaaccattgtggaagtcagtgtggcgattcctcagggatctagaactagaaataccatttgacccagccatcccattactgggtatatacccaaaggactataaatcatgctgctataaagacacatgcacacgtatgtttattgcggcattattcacaatagcaaagacttggaaccaacccaaatgtccaacaatgatagactggattaagaaaatgtggcacatatacaccatggaatactatgcagccataaaaaatgatgagttcatatcctttgtagggacatggatgaaattggaaatcatcattctcagtaaactatcgcaagaacaaaaaaccaaacaccgtatattctcactcataggtgggaattgaacagtgagatcacctggacacatgaaggggaataccacactctggggactgtggtggggtggggggaggggggagggatagcattgggagatatacctaaggctagatgacgagttggtgcagcgcaccagcatggcacatgtatacatatgtaactaacctgcacaatgtgcacatgtaccctaaaacttaaagtataaaaaaaaaaaaaaaataatgtgtcagtcatgatacaagatgatttaaataaaagacctctttaaaaaaaaaaaaaaaacaaataccttaaaaaaaaaaagaaaacctaatatttatacgtttctaatataagattatatgatgtaagtataatatgtgcttataatatgttattgtaatatgtataagggggaaactgataagtactgctggatactgttatgaatattcattgggaatgaaaaattataagtgaaatattcagaaaatttttaaaaaacacctaaaaggacaactatctatctgatcttgggataaggaaaattttccaaatataaaagcaaagtaagaaattataaaaggaagtaatgacagatttgatgaaagttaaacatttaaaaaatacataggactatatcagaattatacaaatcaagcaacctgttgacattattttctatattacaaatgtagatttagctccctaaaatgcaaaggactttgtgaattaagaagaaaatttctcaaacctcattaaaaatgacaaagaaaatcaaatagcataatttcacaaaaactgagatttgggggggtatagcagttagaatgaagatcatgttgctataattaaagggccccaaaaagttgtttaaataaaatagaagtttctttctcatgtaacaacaccaaagtccctggtctaggttggatggtatttgtatttcacaaggttatttggggattcagactgcttctatctttctgctttgctatctcctagggcagccattggcaatatttttttgtaaagagacagattataaatactgtagaatctggggtctcatatggtttctgttgcagttactctattctgcaattatagaattaaagcagctataaacaacacataaacaaatggttatacctatcttcctataaaattttgtaaatttggtttaattaactaaaaaaacaaatttttggtgtactacatgatgtcttgatatatgcatacactgtagaatgactaggtcaagctacttcatatatgcattatctcagtaatatatatatatttttttcttttttttttttttttgagacggagtctcactctgtcgcccaggctgtagtgcagtggggcgatctcggctcactgcaagctccgcctccagggttcacgccattctcctgcctcagcctcccttgtagctgggactacaggctcccgccaccacgccaggctaatttttttgtatttttagtagagacggggtttcaccgtgttagcccggatggtctcgatctcctgacctcgtgatccgccccccttggcctcccaaagtgctgggattacaggcatgagccaccgcgcccggcctatctcaataatattttttgttgtgagatttatgatactggtttgagaaatgaagaatagttaaaatctacttaaaatctattctcagcaatttttaagagtacaacatattgttactaactatagccccccgatgtatgtatattcttcctgtgtaactaaaattttgtgtcctttgacaacaaatatctccccaatccttttattccccaccaccttagcctctggtaatcaccattttgctgtctgtttctgtgagtttgatattgttagagtccacacagaagtgtgatctctgacagatgtctttctgtgcctgggtgatttcacttaacacaatgtcctccaggttcacccatgttgttggaaatgataaaattttaatttttaaggccgaataatattcaattgtgtatgtattcgacattttctttatctgctcattgattgatggacacttaggttaattacatgtcttggctattgtgaatagtgctgcaatgaatatgggtgtgttttggagggatctcatatatttgatccaattccaatcagaaaaataataaaacaaaaatcaaatattaatagccttaagtattcctaaggcctgcaacatactgatttcatattctttgaatagatacacggtagtcagattgctggatcatatggtagttctatttttaattttttgaggaaactccatactgttttacctaatggctatactaatttacattctcaccaactgtgtataagggttcttttttctccacattgtctttaacactagtggtctttcatcttgatattgataatagccaactgacaagtgtaaggggatatctcactgtggttttaatttgcatttccctgatgattagtgccacaatttgagtgtgtcccccaaagttcatgtgttggacacttaatctgcaatgcaacaagtgttgagaaatgggaacttttagaggcgtttaagtcctgagggctctgtcctcataactgaattaatgttactatcatgggagtgggtcattatctctagagtgggtttgttagaaaggtgagttcagagttctctcgctgtgtgtcttgtgtgctttcttgtctttccaccctccgccatgggatgatgcagcaaaagcccttcaccagatgccagcatcttgatattagacttttcagcctccaaaattgtgagaaataactttctttataaattatcaagtctgtagtattctgttatggcaacacaaaacagactgagacaattagtaatgttgaacattttttcatatactccattggccatgtgtatgcctttttttttgagaaatgtctattctggtccttcgcccattttggggggattacttgtttttgttttgttttgttttttgtctttgctattgagttgtttgagttccttacatattttgttgtatagcttgcaaatatattctcccattctgcaggttgtccctttactctgttgattgtgtccttggctgtgcagcgctttttagtctgatataattccatttgtgtatttttgcttttgttacctgtgcttttatagccatatccaaaaaaaaaaattattgcccagagaaatgtcatggagcttttcccctatgttttcttctggtagttttatagtttcaggtcttacatttaagtctttaatccatgttgagttgatttttgtaaatggtatgagatgaaggttaagtttcattcttctgcatgtgaacattcagttttccccagcaccatttattgaagagactgcccttttcccattttgtgttcttggcatctttaatgaaaatcaattgatcctaagtgtatgcatttatttctggactctttattctgtcccattggtctatgtgcttatttttatgccagcaccatgatgttttgattactagagctttgtagtagattttaaaatcaagtagtgtgatgcctccagctttgttgtttgtcccttaaaactatttacaagacagacaatttggtagttttatggcttttgctctagggccttatcttgttctgttaggttggagcctaatcacaggcacacctgtactccagcttccaggaaggagtgagcatggaagatttcatgcacaatgtctgaaggcccaggcacctaagtagcaaacattacttctgatcccattccattggtggaaacttagttccatggcttcactgagctgcaagcatggctgggaatatgatcttcacttccaaagtgcccaattacaaatcttttgctgtggaaggagggagatcatatgttagggaactactggatgtctttgccaaactggtattcaacaaattcaaaataactttacaattttataataaataatataaataaatatttctaaagaacaaaagttataatattcattgttggtattataccatttctagtggttacagtagtaatatttataataaacgattgttacagtattagtatgtgtccaacaccacagtacatgatttatagactattttattcctaacacaacctcaaggtttgtacacatttattgtcttcactttccaaataagtatctttttaatgagtttcaagactaatgtggctgggcacgttggctcacgcctgtaatcacagcactttgggagcccgaagcggggggatcatgaggtcaggaaatcgagaccatcctggctaacacggcgaaaccccgtctctactaaaaatacaaaaaattagccgggcatggtggcgggcgcctgtagtcccagctacttgggaggctgaggcagggaaatggcgtgaacccgggaggcggagcttgcagtgagacgagatcgtgccactgcactccagcctgggcaacagagtgagactccgtctcaaaaaaaaaaaagaaaagaaaaagactaatgtatgcaattagtaactgtttgagccatgattccacatcaggcagtcctattttaaagcctatgctcttcactattagataatcaaaatatgaacacttttatgaagagtgaatatgtttgcttttccacttgaatgagagattattgaaggcactctctattattaattttggttcttgagcacatggcctggtctatattaggtagatttagaataaattaatgaggaaatgaatgattatgtaaatttaaaaaggttaagtgattgctaaagttcacctagagaatagcaatcatgtcaggccttcttaactttagtttcctattttctgtgacaggctgttctaatatctgtaaccagactccttgtttcaggacagtaggcatatgcctgtgctgttccttgccagaagcagaatggcaccaagactaattacacttatttgagcctcctggtgagaggtgaagccagctggacttcctgggtggagtggggacttggagaacttttctgtctagcaagaggtttgtaaaatgcaccaatcagtgctctgtaaaaacgcaccagtcagtgctctgtagctagctagaggtttgtaaaatgcaccaatcagtgctctgtaaaaacacaccaatcagtgctctgtagctagctagaggtttgtaaaatggaacgatcagcactctgttaaatggaccaatcagcaggacatgggtggggacaaataagggaataaaagctggccacccccctgcccccccgccccgtagccagcagtggcaacctgctagggttcctttccatgctgtggaagctttgttattttcctcttcacaataaatcttgctgctactcaatctttgggtccatgccatctttaagagctgtaacactcactgcaaaggtctgcagctccattcttgaagtcagtcagaccacaaacccatcagaaggaaccaactctggacacactgggactaagaccttgatctgtcttcttcgtgagcaagttatttcatatctctgatcctaatgttttttgctttgttttgtaaaataactaaaaataatatatatcacacaaggttggtgtaatggactgaatgttcctgtccttcccaaattcatatgttaaaatccttcccaaatttatatgttaaagtcccaatgtgatggtatttggagatggggcctttgggaggtaattaggattagaataggtgacacagtggggctctcatcatgagattaattgctttataagaagaagaaatttctctctctctctctctctctctctctccctccctccctctcttcctttctccctccctccctccctctcttcctttctccctctctccctctcctcctctcccccactccacatacagagaaaaggccctgtgaggacacagcaagaaggcaactatcagcaagccaggaagaaggccctcaccagaactcaattctgctagcaccctgattttggacttacagtctcaagaaccgagagaaataaaattctgttgtttaaaccatccagtctatagtactttgttacagcaaactgagctaattaagataggtgatactgagggttaaatgagataagtataaaatgtttagtacatttcccagtacatcgtaaaacctcagtacatgcagttcttactatcctgggcattgaatggtgtgtctggtacttggtacccactaatagtaagcacacagtagtccacttgttgcctttctatgtcatctccaactgtttaccacttccttgctctccaaccacattggcctacctgaagtttccagaagacacagagcttgttgctgtgtcaggcttctacccgctgtgcttgccacagaaggcctcttctccctatttgctcaggtctcttaagtgtcattctcttagagtggccttcttaattagcctacccaaaataaccctaatcactctatcacctcatccttcttcatttctcttcattaagcagtcactgacatttcgattaatatatttagttatttttgtggtatccctgttgcttaccagaataaggtccatgagggcagggaatatccccagtgctgagaagagtacctagcctatggtatcattaaacctatttttgagtgattgaataaaaggagttttataaggaaatgcttctagtaagaaacacactatatagaaacacacgtatatatgttagcattttggaaggaatgcttgccattcatatataaaaattaagataaaggtttttagtctctcattgtcctcacatcatcccttttgtgtaaataatacattcattaaatgtattattctatctcatcaaaaatcaaacaaataactcatcttccaaattaagtatatcaactctcaaaatgataaaacattgatttaagtttttggagaccgacttcctaacaaattagtactagattatcatagtctttttgtaaaaacaaaatgtagttcctgaaacatacaatttttgaaactttttataaatttaagcattatattccatatacctcttccaactgtctttatctagaaagattgtatttgtttttatttaatcatattgcttttaggcagataggaagtgattaataattaaaaattaatttccataaagtgttggtatctttagttacacacaggccacaatgataatcaatgtggtgagtaatgtttaggtactgtgctccagagaacaattcaatcaattgccccaacctggtgtttcctgttatgcatgaacttggggaactataattttctgaataattcaacttaaagcaaaatgaaatgtgtgagtaattaagaaaatgttcttctgctaatatttattctgataaatcatttcagttctgtttgattttgcagacactccataatatcattgaattagtaaaatataataactcttaaaaagctcatagaagtgattattgcctctatattttccagtaagatgttaatttttttaaataaccgtaatgtactgtgaatataatttcttctacaagttacttttgctgcttctaaaatactagtggtagcagtttgcatactttctgtataaagactgatttgatgtcatctctgaatcacaaaaaaaagtcaaaccaaaacggaaaggtcttaatttaattaactaatagaatcattactaattctatagaattagatattttaaatcagagctagctgcaacaagttatacgagctttgccattttatgaacataatttgactaagcggttatgagatctgtaaagaacacttcttatctgagtatagctggggacgtctttgttcagaagtacacagaattttataaacctgtccagagcttcatatatatccagtaaggctcattttctacatatttgagatcttattctctgtataagatctttacagggtagtgcaaaattcgacataatatttatattatgaatgaagaaacaaacagaaaagaagagaatgaatctcaaattcattgagtacctactaagaatgaaaacaaaaacatttgaaagtggtatatggcctgagatgtaacacagtttgagaagaaatttagggaatagtataagcatttgctgatttgtacacttgaaatattgtttcaaaaaatcccttttttatcttcctgagagcatggtcctctgaagagtataacttttcctgtgttattggatcacttagttttcatttcaaggttaaatttgatgttttatcttgtttgggccatttttaaacctgatttattttatttttaaatagaacataaagcattgactcaaatatttccttagaaagggtgagaatgatagtctttccaggttggtaaccaaaatctattcctaatcttcagaagatggtaaaattaacattctatataaaagtcccatagaataaagaatattttatttatttaatttattttaattaattaatttttattattttgttttgagacagagtctcactctattgcctaggctggagtgcagtggcatgatcataactcactgcagcctcaactgcctggatttaagcgattcccccacttcaggctcctgagtagctgggaccccagacgtgtgccaccatgcccaaaaaaataaaaaaaaaattatttgtagagatgaggtctcactatattgcccaggctggtcttgaactcctcagctacagcaatccttctgcctcagcttcccaaagtactaagataaggtgtgagcacctggcctaagaatattttaactagttaatttggttaaatatttataatagtctctaatatatccagaacagatccattggctaatgaattgattcagtcatttaccaagcatctgaagcattcagaacagatcctcaggctctttattatagctgtagactttaatccagttgtaaagaggacccacatacatcagttttaaaaacaaggaaccacacctcttacataccacataatctaaaagaaagtgatcagatgaagatttgtattaatgctctggcaccatgttccttatttgacataatcaggtggttccttgacttgtcaggtggctttatatgatccttaagatagaagggagattggtcactgtggctatacaccttatgcctattcctctatacacctctgagataaatatttttaacactgttatttaactaaactgaacgtgtccaggatgagacagcaagtaacatggtatcataattaaaacctgagtctatgtgactctaatgacattcccctagattttactaaggattatttgagtagagaggtagtatcttagagaggttggaaattccttggagcctgacatgctgcagtgaatctaataggtggatcttctgttgtttgctatagagaatacttctgaaaggcatgtggaatatctagggcaggcatcaggggcggtgggggtggtggctgctcaggtctagctctgcataaagatatttttctcataagagcattgccatagagtaagacatttactgtagacagggatgcaggaatgtatgttaattacatataatattatgtgtgcgtgtgtgtgtgtatgtttatattgtgaggagtgagatgatggtcctttgcagtagagaacaaaaaagaaagataccaattttgaggaaaatgtaatgagttattctgttttttatatatatttaattttttgtagaggcaaagtctcactatattgcccaggctggtctcaaactactgggtccaagagatcctttcacttccaaagtgcttggattacagagtgagccaccatgccaaacttcagttatgtcttaagactagcctgctcactggtaggtggttaggtttagatatgtacatttaggaggtaataataaaagtagctgctcctattgtacatacaatcactgaatgaatgtatatagagataaggaaatagataagagagggttaaataccccgtcttggattaagaataagaggaaaatgtgaaacccactaaggagatgagaaaggaaaaaaatcagcagaaagaagactactgttggtttatgtttaatggtctaactcttttttttttttttttttttacttctaaggaagaatagttgtcaaaatgagggaaactctaaagataaagacacactcagactgattttcaaagcttcattttcccaaatgatacaggggtcaaattttcataatatctactcagacaacaacaataacaaataaacaaaaactgttttgtctttgagcatgaaaaaacgtaaaaatgttcctactatcccctaagtttcttgaaggcaggaattgtatctccttaatgtctttgtttcctaaatgcctggtacatgtgaattgaatttacgccttcatggaaagaagcaataacctccacttacaggttggcattcaggggcatagttcaggttgcgtcaacatcataactgggtcaaagttaagaatacagttttcatctcatgtgtgtttttaaatcaaaagtgaaaactaaagagaataatgacaatctttcttctattttatttttctaatgacttatattttaactgctatttaatggatatgatattaatgaaaacattctgattatccttaataatgtacatttttaaaggtcagtaatggtctttatctcaggcaataaagattatgaaacaaactactgtaattatattcaaactagaatatgaaatgttaggcattttacaatttttcccactattttttatttgcttacagtgactacattcattcaacaaatgtctgtctatctagctatttcacccttcaggcagagtgggattatataaaggaaggtaattcctattccgtagtaggaaggaactctctactagctaggtaaataacacttatataaaatttaatagaatgttagctaaataataacaccaaatgtatctcagcagtatatgactgcattcttagtcagtgtaatattcataaagtgtcatgagttcttaggaaagaaaatcactgtggcctatcaaaattatgaagcctaatgtacatgcagaattttaaacttgtgcctaaattcttctcattatgtagcaaaaactgatttctctgtgctatacaaataaacctacaaaatgtgatcaggaaatcaataagagaatgtaaaaaatagttcatttattgagtgataggattctggatcataaaagatttattctagtcttgatgttataagtcttgagttcatacttggcttgtgtagtagtgtttataaatgacctgtatagtttgacttcatttagaaaagacaagtgaactctgctatatcctcatgtgaaacccaggagctaatctgtatacatcttcattctagaagtgttcattcatttatgcatttagtcatgtacacatttatccttacttatccattgatgtgattcagacccagatgatctggtggcagcatggacaggcacttgtcttcagaatgctagccacctagaaaagccctccaggactctactcagagtccaaaagagttgtttttcaagttacatagttgtgtcttaaagtaattcacatacaaatggaaaatcatacaccatggaattacatattaaatcatttttccttagttatattttatattttttagagtgatcatagttttccatgagaatttgcctagttgtgaggccttgtagatactaattaactcatgctgtatgatgattctgtataaagaaagcttaaatcaatacgtacgttctgaagaaaaaaaaaatctctttgcagtacacaaagagaaaaaaacaaacctaaaaagagttcctgaaaatgactagtaactaagtggtttgaaagagttaatattgtttcctacaggcctgattaataaagacattacctatccctatattgaaaaagtggacatggtttctagttctgtttcaggttgatttatgtggggagagtgtgatgacatttatgtactaaatacttagtgcttttaattcagtttacatttaatctataaatgcaaaccatgttaaaggatgcttgacaaaaataaacttgaaagccagcattaaccttccaaaccagctgaaggtgcttaaaagacaataagggtaaaatttcattatacagacttcaagtgggtttttaaaaaatctatagactttccaactaaaatgatgaatgctgttctgattctaattgacaagtgttatatataaaagagttcttgccttcattcttatcaaaactgtggggatttccaatgataggacaatattatgtgggtggaaacttctcagaagaatagagaacttatcagtatttacttaggttctattacattcagagccataaaagaaactacactcataaatttatagacagtcaaggatattgcctcttccccaaagaggctagatattaaaggagtggagcgaatgagctcaaatcatgaagtggtttcaatattggaagagttttcccccttcatatttcaacttgtaactaatatgttatgaagaattgctggctagctaactttgagggtttggcagaagaaaacagtcttcaccactttttcttacaaatgttctttttcttctacaattagtacttaatgataatatcgaccctttaatgagttactgtagattaatgattaccacacttgttcaaatatatttaggattccaactttgcagataaagaaagaggtttatagaggttaagaatcttgcccaaaatcacacagcagggacaagatgtaagcctgtttttttctttgcttcctatttctgctgtcacaaattaccacgaactgagtgttgtgaacaacacaaatctattattttacagctcgaggtcagaagtacaaaaggggttttactgggctaaaatcaaggtgtcaacaggggtgcattcctctgaagaagccaggaaaatctttttccttcccttttttagcttccagggtcttcctccattttttggctccattccttggccccttccgccatcttccttcttcaaagcccacaatttcattacccaacctcagcttctgctattacatctccttttctgacccttcttcctctctttttcatcctttaaggacccttgcgattatatcagacccacttagataatccaggacaatctcctctatttcaaaacccttaatcacatctgcaaagtcacttttgacatttaaggtaacattcagtttctaggcattagggcaactgtgagaggccattattctgcctactacaaaagctaaagatctgggtaagtatagtgcagttgtgtgcatacagcagttctcctttatctgtgggggatatgtcccaagaccccaagtagatgcctgaaaccatgaatagcactgaactctgtatatattatgtttttttcctatacatacatacttatcataaagtttaatttataaattaggcatagtaaaagattaacaacaattgctaataataaaacaggacaatcacaacaatatactgtaatagaagtcatgtgaatatggtctctttaaaaaaaaataaatatataaatatataaatataaatatatatatatatatatttttttttagatggagttttgctcttgttgcccaggctggagtgcagtggtgccatctcagctcactgcaacctccgcctcctgggttcaagcaattctcctgcctcagcctcccaagtagttgggattacaggcatgcaccaccatggctgtctaattttgtatttttagtagagatggggtttctccatgttggtcaggctggtctcgaactcccaacttcaggtaatctgcctgccttggactcccaaagtgcagggattacaggtgtgagccactgcgacaggcctaaaatatcttactgtactttattcacccttcttaggcatatccaaattgtcagtactattaactcttgccctttggggccattattaggtaaaataagatcaactgtcacagtatcacagtgattgtgttacttgaactgtgacagttgatctgatgaccaagatggctactaagtgactaatggctgaatagggtgtacagagtggattcaggacaaaggaatgattcacatccagagcaggatgacatgaaatgtcatcatgctactcagaacagtgaccatttagaacttatacattgtttatttttagaattttcagtttaatatttttagactacagttgactggtgttaactgcaactgcagaaaacgaaaccttggataagggaagactgttgtattttgatattaatatgtcaatataatttagtagagaaaaaatacaatcacagagattaatgatcactacaatgattacggtagtgtaatataatagaaatagctttgaatctggaaaaattctggcttcatcatttactaactgtataacatcagataaatatcttagtgttgtctctttagaggtgatgtggtggtgagttataaggaatgttgttccttctccttcatttttagaaaataacaaagatagagaaggcagacaatatagtacatgttgtacttagatgttataagtaatgtctaataataattacatttgcaaaaactattttctaaatatattaaacattttgtgggccttatttttattttacaaataatattctgctgctcaatgtgctctttttgttcctcctctgatattcaatgtctgcttgtttttttgttttttttttttctgtaatgcctcttaaatttaggaatctgaattaattcattagcttgatgatggctttttctcattccattttaggaacttaatttttagcatgtaattttctgtattgttgtttgctggtataggtgtacaactagtattttttatgaaaaacaaatcctgcattagccttttaaaaatcatttataaaataaatcccaacctcatattataggaaagttatgatataaagtatcacctctgcctcgtcattccctcactttgatcccattctcagagggaactcctaactgttgggttttaattctttttctttagaatgttaccttataattcttgatcacatgcttgtcaactttttaaacaattgttgactcctgatttgaaaggctaggatctggccaatttaattacaccatctttccttgcccctcctttcaatatttgacatttatattttaaattttgttcttctattgtttacttttacaactgaaaataatatgggtaagcattcattttttttttcaacagagtctatactcttcactttccagataaggtattaattctcctactcatttcctcaagttttcctttcttcagcagcttaactttggtcaggtgtcaagtttgtttatatttacagttttcctataaccacctccaactattctttttgtgaatatgttgatttttttttttttttttttgagacagaattttgttcttgttgcccaggctggagtacaatggcatgatcttggctcaccacactctccacctcctgggttcaagtgattctcctgcctcagcctcccgagtagctgggattacaggcatgtgccatcatgcccagctaattttgtatttttcatagagacggggtttctccatgttggtcaggctggtcttgaattcccaacctcaggtgatccacctgcctcaacctctgaaagtgctgggattacaggtgtgagccaccgtgcccggacacattgactttaaagttggaaatgtatgaacaacattgccaaaccacaaatattatttgatgctgagtcacatagtgtactatgttctttgaagtagtttcactctcaggaaacctagggcactcatgggaacaagttcaccatgtgaaaatggattctctctcttttttttttaactcaattgcttgaaatcatttcaaatttacattttctttagatttatatttacttaatataataccattccaaatttacttgtatttgctttatttgattttgaaagtttcatgcagatttgtttttatcctgaaatatcaaattgtctttcattttgtttcctgcactaaatttgcctttatcttatcctcagttttttaccccctcaaagttttatattgtctcagattttttccccttggaaatgtccttcatggagctctctatattgttccttcttcattcagaatgtgtggcctctttaatcttgctgtgcagctgtcattctccaaatcccctcaatttattttttggatgagagtcttattttatttgactcaatataattttgcttatgtattattgttttaacttttatggagtctatcagattgtatattaataatgtgagatattagagattggtttatcttatacccatgactgctttctaattcctctcatttagatcatgggacatgaggctgcccttatttctgaaatagtgtacaggaaaacaccagggaacaagtatccagaatcatgactgctaggttaaaaaggcatcatccaagtatggacagagaattcactaatgaagtccaaataggaagaacaagagaatatgttgggagaggaaaaggaatgaggcatgatgtaaagggtggtaaaccttgttttctaatccttgtctggattagggtagaatagaggcacaacagtgtctgcctacatttcctaaggcatccttcaatagagggagtagtcatcttgtttatcctaactggaactcttgtttttggttgacttcctaagatgtcagtaagggatgatatggtattatgagaacttacagatagcctcatataggattctacagatcctacagctaacccatgtagcctcatatagactctatgcaaaaattgttaaagtttaagataatatacataactagaataatatataatgctcacaaattagatgatttcataaatcatggttgtcaactctttgcaatttcatcaataaagttatagtgtttccagtgaaaagccaagcatgatttttagtgaatattaataagctcatgctaaacatctctatgccaatcaaaggcataagaaagtcaagaaaatcttgaaggcaatattttatctgcttttatgcatgtatggcacattttataggtttaaaaaattaaaataaacaaataaatagaaccaattatataaccagaaagaagtttcagagactaaaggtatcataagcaaaacagaaaatacatttgaagcctaaaaagtaagcaatggaaatatgtattatgccaaaaagaaaaagtagaaagacaacaaaagtatgaaataaaaaacaggagaaaaagaaaactaatttaggaagtacaactagtagaaataagaacaagaaagtgaaagcaaagaaatgggaaagaagaactgatcagaggggaaaaaagaaaaactagaaaatattttcaaagtttaccaggacatgtttcaaaattgaactttcttgactaactcaattctttctttacttattctgcttctaaaccttcctagaatcctccttctattggaaatgaaggaagcagcctgggataatagactcttcacttttttccttcctagtcacaggttatgtgtgtgtgtttgtgtgcatctgatgaaataatatatacagagtaaatatgtatgaaaattaggaaaaggccagtatttatttattagcttcttttacctttactatcatttttaatatctgttctttagtcagtttaaggaaatatcaagtagaggctcattatactccaaaatgcaaatatgtttctgagactttaaacaccacattgtctaacttcataatgctagaattctgttcctttatactcataccaaaattttcttttttcagggattattttgttaatacattctgccttctttcctcacatctgtcaacaagcaatgactgcctctttatcttccaacttttttcttttctcaaattaccaatgtcttttttacagtcaagtttatttttatagattttattttatttatctaatttgttttattagactgtgctgctgaattttaccttctatggcatttttttcagtgaaaatccactctcttgattttgcttgacttgctgacctttcttttcctttccctctgtcccttcctccctctctccctccctccctcctttccttccttccttctctcctcctccttcttctcttctcttttctcgctccttccttccttccttccttccttccttccttccttccttccttccttccttccttccttctcccttcccttcccttcccttcccttcccttcccttcccttccctttctcttcttctttctttttcagacaggacctcactctgtcacccaggctgagtgtgatttcagctcactgcagccttgacttccaggctcaagagatcctcctgcctcagccttccaagtagctgggactacaggtgcctgccaccatgcctggctaatttttgtattttttgtagagatggggttttgccacgtggcccattctggtcttgaactcctgggctcaagcagtctgcctaactcaagattcctaaagtgctgggactacaggtgtgagccactgcacctggcctgaccattcattctgtatcttctatgttgttgttgttttttaatttgaggagtatactttttcttttattttttcgttaaatagttccttagaatattttcagtcttacataatcttcctatacattctcatttgttttcttgatgtaagatgatttctaggtttttggttttccctatgaccagctcacatatgtccctgagacagtttctctactaaagcatttatttatttattcaagaaatgtgtgagtgcaaattatgtgctaaacattttagcaacacattctttcttctgctgtccttaacctgcactccatttcactggaatggccacattcctattatcattcagtactcactagttcacattagaaattttatattcgcaaacagggctgagtgcggtggctcatgcctgtaatcccaacactttgggaggctgaggcaggcagatcacgaggtcaggagatggaggccattctggccaacatggtgaaaccctgtctctactaaaatacaaaaaatcagctgagcgtggtggcacacacctgtagtcccaactactggggaggctgagagaggggaatcacttgaacctgggaggcggaggttgcagtgagtggagatcgtgccagtgcactccagcctggcaacagagcaagactctgtctcaggaaaaaaaaaaaaaaggaattttatattagcaaacagcacactgaagtcacaaatttttatctatccatatattttacttccttcttctagacatcaagaaaagtaattatttttttttaaaatgtcattcccagatgactctaatcagatctacctctgtgcactgttgaaacagaatccagagtcctaatctggaccatggaaactgagttgctaggacggacttacagaatctgcattagtagcaaatgttctaggtgattcacattcacgttacattttaagaaccactgctgtatgttgttttcttttcttgttataaatgatatcgtcatatatatttatacaaaaatgtacatatgcatatatgcatatgtatgtaatgttccatacaaataattatatcattgcaatagatgcctgagcaggaaatgatagttaaaaagaaaaccattttaatatatcttccactattccaatcgcttgcattctttctccaatttaattctataatatagtttttctagttgtatatctatcctcttttcagtccttttcattggtttccttcctaccattcatttatatgctggtattccccagggagaggtccttctttggtccttgtcttttcttctacacttaaagttttgcagaggtcacttaggtatttctcaagaaccatgcttagtctgcatctcccactttgtgttcatttaatgaattaaaaggtcaacataaaatatatgtagggctgggcacggtggctcatgcctgtaatcccagcactttgggaggccgaggcaagtggatcatgaggtcaggagttcgagaccagcctgaccaacatgttgaaaccccgtctctactgaaaatataaaaattagccgagtgtggtggcatgtgcctgtaatcccagctactagggaggctgaggcaggagaatcacttgaatctgggaggcagaggttgtagtgagccaagatcatgccactgcactccagcctgggtgacagagcgagactccatctcaaaaaaaaaaaattatatgtagagttttctaatgctaaaatttttcaatggtcaatgtttttccctttccctgtgtaatttactcattaaccgttccttcctaatatggtagccttgttattgcctccctatcatctagaaagcaagttaagacaagtagattatgattttatgggaaaccaaagtcttgagaaacaaaacaaaacccactctttattctttactctgaggttaagagaaaaaaaaaaagctgcattagttagctattgctacaaaatgctgcatgacaaaagagtcataaaactttcagtggcttattgatattttatttttatacttaaaaggctgtaataatttagctgatctaggctaggcttttctgaatgagttaaatggcaggcttctgatttggcttcaggtctgaggtgcaggtggaaggagcagcagagatattggaaaatctttttttttggtggcagatcccaggtgcacaagagaacaagcccaaccatgcaagcaattacattatgttcattcgcatttccttagtcaaagcggtttcagggcaagcccaaccttagtgggatggggaaatataccccacccacagtgggaggctttgtaaaattacatagcacagggtgtggaggtataatcctagtactaggcactgagtaattgcgacaataatccaatctacatcagagggacagtatatgaatctgaggattcttggtatacataattttttgtttgttttgccattatcagaaactttctcagatgatttttttagagggtttcacttacttaattaaaaaggttactactcatttacttgtgttttatcattagttcttttactgtagaagtggcagaagacagagaagaaagggcctcagtctcttgcctgagtctgagacctgtgtttcaaattgtccgataagtaatctacagacagtttttcctcaacaggcacccataattttattaattctttgtttatcttaagcctgtggctccttaatttctcatcatcaaatctccccaggttatcttcaagtttttcttctttctcatccttatacccaatctgtgaacaaatcctgtcagtttcgatggagtattcctttcaagtcccctcagtcaatttttatttcattaagtgttttcatttttaaccaggagttttacttcaaaaacctctggatccagaggcatcttataaaaaaagaaacctgagagtgtcccctgtttaaagggctcactcaactgctggagcccgggctatcttctctttcccattcaccactcaaactacatggaatactgacgtcaaaactctcactttttagatgattctcttactatctgaatatcacctacattgccttctccactcagcaaagcctgattcatcttccagagcaaagtagggtgtaatctttgctcttaagcctttcaggattctcttacgaagtcagtggccttctcctggcattctcactgcattctgcacaactacccattcaagaattgtttcatggattctttacatttgattataaaagcattaaaagatcctcataaaaatcagaggacatataaagtgtaaagaagaaaatataatcactgttcttggcttaagagaatacagttaacattttggtactatatttttatggcaggattacctcatttaacaatatagcatagcatttttccaattgtagtctattataaaaattaattttgctgtttctctccccccacagattgttcattcctttaaggatcatcatttttcattttacaccttatttccagtgcttggtacaatccttggcaaataggacacatttaattaacagttgtgtgaatgttaaatgaaatgggaatattttattaagtccgaaataattcagtgaacaaagaagcataactataagccagtgacagactacaaaataggtagtattttactaaagtctggatatcttgttatgttaaatattatttttgaaagcctgacattgtgtcaaggcaatagttatgctataattctgtgttaatcctgttttctatttttttgtcctcaggaaattatttgctataagaaatagagtcacatgagactttaaatattagtcaaataatgctgtagttttagcactggtaagagatacaaggggttaagtcactctagtctttcttcttcttcttttaaagacatgtaacttctttgtctgatctccttatggtccttgtcacaactgtatggcttttaatcactcatacattcagtgagttactgcactgctggaaccttaataacgttctagtttgtttggatgatcttcctgataaagtcctgacaatctctcagtataatggaaagacaatcaaaataaaaaatgctttaagagttcaggtagtggagcatactattatttttcacacagtgcaaggatattaaaatactgactttcattcatttgattgagttggtgatgaaatccaagaaaaattgaaaatttgaattattctactgccagtagggactgtatatcatgaacagaaaagcaggcatatgtaactgactcttgtagcataatctgaaaagtgtcagcttgccctccttttatatgaatttctgcagtatatctaagcaattaattcattatatagctctcatatttgcaatcaccacctggaattttataaaaatataaaatgtcatcttcaatatacatagtttgaatagttaaaatgacgtcttacattgatagagtgtttcagttttttcaagatgctttctgttaaagtatctcatttgactcaacagccctctgaaagtaagtagtggaactctgataattctccagcctgttccataccctttgcctccttccttcttattaatttccaatttatctttctttcttttaaaggaggcagtttggtgtgatggaaagagcatagaatatgaattcagatatttagctctatccttgtcttgaattactttgacattggagggatcattttcagttctctgaaccttggttttctaattggcaaaataataatgatgctaaagtgtactcccaatgttgtgaggattaattaaggtgaaattggggaaaccttaaaagagcaaatgtaacattcatgttagcttcttttaagggcagcttgggatgatggaaagagaacagatctttgcttcatggcttcttacttatggtacttgagcaagtaatctaccctttctgagcttcatttttctaagtgtgaaatgggtataacaatacctgtcttgtgaagctgctgaaagataaggtgacatatatgctgattctagcatagttcctaactcagagtcatatatcctattgaaagtgtttccctttctttcatccttcctccctacctcttaccactcctctttcccacctcctgtctttccactttactcttcatcctcctatctcaactttgtgtgacagaaaaagataaagaacgtgattggagaatctcaagatttaataatttagaaagtatttagcttagaaattcttttttctaaagaaaattgtaattttcagttgaggcaggagatggggattcaagttctccctccttttgagaaaagaccccttcctggcccactttgaaatctccattgaatcctgtaaactttgtgcagtagaatttggaaaaccactggtgtagccgaaccctctcaacttgcagatggaaaaactgaatttgagggaagttgagatacttgcctaagctcgtgaggctgggaagtggtgagctaagactagaactcagtcgttctttgccttaccctattcccttagtaagtaaagatacagagtgcaaatatgtataatcagattcatctcttgaaagatgttacagtctatttgtgtagatggaactcacattaaaagatgaggaaagtaaagtagtatgatataacaatgaaatgggtgaaataggtaaatccattaagaagagacgggcatggatgatcactgttttggggggctggacactgcaaactttatgagggcaggaatttctttgctgtgctcattattattttattcccagtgcgtagagaagtgcctggtttcctatagggaattaatactttttaaaaattaaataaatgaatggctaaatgagatgtaaatgaaccagtcctagaaaaagggcaagggtttagaaaagttagatcagagtgtttaaacaatgggctggtcttcattgttgggcaatgaaatatgttgagtgagtcacgatttacatataaaagtgtcggccgggagcagtggctcaagcctgtaatcccagcactttgggaggccgaggcgggtggatcacaaggtcaggagattgagaccatcctggctaacatggtgaaactccgtctctactaaaaatacaaaaaattagccaggcgtggttgtgggtgcctgtagtcccagctactcgggaggctgaggcaggagaatggcatgaacccaggaggtgagccgagatcgccccactgcactccagcctgggcgacagagcaagactccgtctcaaaaaaaaaaaaagtgtcattatgtcatggaaattgtttagatttatatgtgatacatacataaaatatatttggaccaatatgcttgtatgtacacttggtcacaagttaaaatgtgtgtctcactgtaagtcatgattaaaaatgtttgaaaaatatggttttagacaaaggaaatactaaagtttgaggcaggcatgtgaatgttttgtgggaaaatagtgagtttaacagttttgctaaatctgaggtgaagagaatagtgaaatcaagtctatccaggggaagaagaatccatttggctctttagctattaaagaattacagggactccacttcacctcctgactgtctccatcatccacaataagatttaacaaagctacatgttaggaagattagacagcttaaactttcaggagtgattcactcggattggaactggggggagtagacagagaacgatgcaaaagaggcagcacagggtaggaaagttatggctttaactggtgacacctggtaaagaaaaccagtttcttgggcacggtttgggtagatgaggttaaaaaaaaaaagtgaatgtgtgatgacaaaatggagaccaaattgtgaacaatttcacagaagggctgtctgagaaaaaaacaaacggaaacaaaaaacaaaacaaagaaagcattaagagaacaaaaagtaggagttaggagaaggttaggatggaggtgaaaatctttgtggtcaactagggatagtcaatagagatctctagacattgatgagaaattaaagaaggccagaaggtctttaaaaagattactttgaaagaaagagattccttctcccctgaaatctagctattaagaccagaggggatgggagggatactggatatagataacaaaacttaaacagttaataaatgcttctttctttaatttgaacactgactagaacagcagttttaatcaacaatgtggcattagcctactacttttgtgttagtaacaagagacacttttaagtgtgtaaaaacatttactttgctaggtaagaagcatactctttatatgccctaaatttgtttaatatactaccattacttgagaaattgtataactttgaccactctccatattatggctaaattaggaagttagaaggaagattgagtattgtatgaaggttttagatttcatgtccttaaaactacttaaaataagttcaatattgatgaaaaaagttgagaaagttagaaatctaattacaaatgtctgaaatatgtccacataagttgagcttttccttttggttggagtttgtctgaattcagaggaaattcagaggtcaagaatgatgaataataataattattattttttttggagatggaattattattttttaatacaaataataaatattattttttgtcgctctgttgcccaggctggagtgcagtggcgcgatcttggctcactgcaacctccgcctcccagattcacgccattctcctgccttagcctccggagtagctggtattacaggtgcctgccaccacgcccaactaatttttgtatttttagtagatacgaggtgtcaccgtgttggccaggatggtcttgatctcttgacctcatgatctgcctgcctggacctcccaaagtgctgggattacaggtgtgagccactgtgcctggcctattatttattaattaattaatttattttttgagacggagtcttgctctgtcttccaggctggagtgcagtggtgtgatctcggctcagtgccaacctctgcctcccgggttcaagcgattctcctgcctcagcctcccgagtagctgagactactggtacatgccaacacgcccagctaatttttgtatttttagtagacacaagctttcaccatgttggccaggatggtctcaatctcttgacctcgtgatctgcccgcctgggcctcccaaagtgttgggatcacaggcgtgagccactgtgcctggccaaataattattttttaaaaaaaccatggcttaagttatttatttttaaaaggaagccaaatagtacccctctgttgtttattaaaggaaatatatgacattatagatgtcctgtgagcacatgtgtatatgagtctatataattaagagaaagatagaacatgagcctatgcatgtttatgtgtgtgcgtgtatttatatttatgtatgtgtgtgtttgtgtgtgtgtaatgaaactgtctctaggcaaggccaggtacaaaggtccatcatttaagtctcagagctaaataaacatgtgaggttataattattttattgagcttttttattttatgacccactaatggcttatggatcagttatattgataagcactgaaaacatacagcttcagagtttttttattttttcatttattgtttttattttaaagtgccaagaagaaaatgcccagttcccagccttatttttcatttataataaaccatagaagtacaatttatattatagggtagaaactaaagtgtatgtagggtgtatataactggcaatttgtatgcgacaataacgtactttcaatttctgatgaaaattgttgaacttcatttttgaatttaaaattaaatttatttttaaaattttttttattatgaatttggggcgtacacatgcaggtttgttacatggacatactgtgtaatggtgagatttgggcttctagtgtacccatcattcaaatagtgcatattgcacccaaaagaccatttttcaacactcacctccctcctgttctccaatttttttggagtctcctgtgtctattgtttccatctttacatccatgtccattgtttatctcccacttaaaagttagaacatgtggtatttgattttctgtttctaagttatttcacttggcattccagttccatacatacagctgcaaaatacatgattttattctttctttattgctgtgtagtattccatggcatatatataccacattttctttacccaatcattcattgatgaatacttgggttgattccatgactttgctattgtgaacagtgctgcaataaacataagagtgcaccaccaatagggtataagcattcccttttctccacacccttgacaaaattgttgaaattctgcatttgagtgtatgtcttgaaatcaactattcaatatcaggttaatgtttctttttgcactttttattatggcaaaattaaccccgttatgtcatttagcatttgtgagaagataacgtaatacaaacatagtttttaaaatttgttgttgttttgtttttacatgtactgtagattatgtatgccatattttatcaagagttgagatgctagaaattcctgtctgtgtaatttcctgtgggaactacctgtagctttctgcccaaagaaagaggggcggggcagggctatgcaggccagtttaatctttccaaatttgccagccagataaattcctttacctgctctggggcaggtgaatgaatgcatgcagtgaggtcaggagtcagctccagctgtatagaaggaaacatcaggagtgaggagtgtctcctcccctcccagtgttaacatttctaatattcatgggtagattcaattgaaaactaagtataaacattttgtttaatgtagtgcttgattatctgtcttatctattttcaagtaaaactaaaaactgagtatttagctttaaaattatttagcttctctcaaactctcagttttatcaacatcttgtcaattttaattgataacaccttcagcagagtttgtaggaatgaaatagaagcatttcccagttttgcttcaagagtctgaaatattttggttttttaagattatattgccattacaaagaaaaccatttgacttgatatatgtatatgttccccatggtcagagcctaccattaaattttctaaagattcttaggttaatttttttaactgtgtactttcagtgctaaaatatttattagaatcacactatggggaatgagaaatgttagactttatcaatatcgttgtctattggatcctctacatttacagtcaaattcttcaagtctcatcatatgtacagaaattgaagaacagttaatttctaggtgactaaatttggaaacacatgtaaagagagcagaagggcaatggaaatttacgcaagagagaactacctattttctgaatttgttaatatttaaaataggacccctacccaaactaaatgaaactaaaaattcagttcttgtttttctgctagaccttgcatttctttgtattactatttgcaccattaaaaatatatatataaatatatattttaaaaagttctctgccgggcgtggtggctcacacctgtaaacccagcactttgggaggccgaagtgggcagatcacctgaggttgggagtttaagaccagtctgaccgatatggagaaaccccgtctctactaaaaatacaaaattagtcggatgtggtggcacatgcctgtaatcccagctacttggaaggctgaggcaggagaatcgcttgaacccaggagggggaggctgcagtgagccgagatcgtgctattgcactccagcttgggcaacaagagcgaaactccgttcaaaaaaagaaaaaagaaaaaaaattatgatgcattagcttacataaatatacattgaaatttaggccgggtgtggtggctcacgcctgtaatcccaccacgttgggaggccgaggcaggcggatcgcctgagctcaggagatcgagacaagcctgggcaacatggcggaaccccgtatctacaaaaaattgaaaaaattaaccagggcgtggtggcgggtgcctgtgatcccagctccttggtaggttgaggtgggaggatcgcttgagcccaggaggcccaggctgcagtgagttgagatcccaccactgcactccagcctgagtgacaaatggaatttaaatagtattagggacaaaaggattaatgaacacggtttaaaggaattctgcatattagaattctggaatacttccgcaggcattctaaagtcctaaaacctgttgttttacggattctaaaattcagttttttgtacagcggattttcaaacaattttttttcttttactgaggacgttgaaattcatagcacaggatcttgagtccaccctgaaaactaaagaaagtggcttgttagactcttcagtcccaaaatataatgtgaaatgagaatgcatgttgatatcagataaatttaggctttgaatcttggctttgtcaagcggtatgtattcttgctcaagctagtgtacctttttgagacttagtttgctcatgtataaagctggagatagctacgcatcttttctttttcttttttcttttttgagatggagtttagctcttgttgcccagactggagtgcaatcgcgcgatctgatctttgctcaccacgacttccgcctcccgagttcaagcgattctcctgcctcagcctcccaagcagctgggattgcaggcacgtgccaccacgcctggctaatttgtatttttagtagagccggggtttctccatgttggtcaggctggtctcgaactcccgacctcaggtgatctgcccgcctcggcctcccgaagtgatagaattacatgcatggccaccccgctcggccggcaacgcataattttaaagggatatgaaagggcttgaaaaatatctagcacagaattggcccttgttatttgttaagcacagtattatttccaagggaactctcccaaatcatccctgaccaaactactacccttattaagagatagattggcctcttagattatatatcccttagctttgctcatcaatagaggcaaaggattcatttatctaaaggaataaaaaacaattgcccttgaagttagtggattcgtgcacctaaaaaatggcctgcatatggtaccaatcaaatcttttatttcttgcatattttgcagataatacgattttcaaatacaggttgtatggaatcaagtgaatcatctttaggagaagactgatttttagtaacctaaaatttttagtaatcaaatctggcagagcccagatttgaactgaggagactgtctttagagccatacacttattcaggacagtaaatattcagagataaaaccagtgtagaaattaatatcagggctatatcattaacaagattctatcacttcatttgcatttttttttttttttggtgtatgtgtctcttatataaagaaatagcgatgctgtgaatgcctacatatttgttgaacaaacattttttaaaattagaaactggataacaagagagaataagaaaaatgttctgcatttgttaaactaccatggaggtgaaggaagattttacaagctgaaaaatatgaaaaaaaaagaacatttctttatcttctgtagtattgataaataacatatttccagaagattatccatcacatcaatgttttcaagtttatttgtatcaatttgaggaaagtagtctatcatgacacttttaattgattaggatataccatattaccaaaaatagcaaaaacatatcacaaaggtttatgatttatataacaggaaaaacaaccttaactttttttttttgatgttatagaaaaaagtgttattttttggaaaaattctcccatacaatctgagaacaatataattcttattaaatgtatgcttaatagcctattagataatttgcttatctatgtgctatacctggtaacttttggtttattaatgtaaattttaaaaagttcctcaagaattaataataacacaaaagtttaataagattaactggaaagtacataatatctaaggtaaaattaaatcaaactttgggaaaaatcatttccccttctttgagcagcgcacattttaattgtatacgtgcatagccatggcagagcagcacatattgagtgcccaaagtgtcaaagctggcagcccaggctgaatcctgtagcatggctgcactctgataagctactacaggtcttctctctgatacttagtttgaactttaaaaataatttttatcagtgaaaccaagagtgaatgataaagataatagctaaagtaaaacaaaattcaggcggaggtgaagtaagtccaactttattaattttttgtattgaagtatggtactgaaataatattttaccatattttccatgaaccttgccagaaaatatatctgggataattaagtgttatacatattactacaaaggaagtaaggactcttcattttcaatcctaatgaccttgaacaagtaacttcgtttctctggatctcatttctttttctttttcttttttttttttttttttttgagacagaatctcacccaggctggaatgcagtggcgtgatctcggctcactgcaacctctgcctcctgggttcaagtgattctcttgcctcagcctcccgagtaaccgggactacatgcgtcagccaccacactcggctaatttttgtattttttattttagcggagacggagtttcgccatgttgggcaggctggactcgaactcctggcctcaggtgatccacctgcctcggtatcccaaggtgctaggattacaggcgtgagccactggtcccggccggatctcattttctcaccagaggatggaattagatcactggttttcaaacggtgctctgcagagtcctacagattagaaatgctttttagtctcccacacaattctgactttgtattttatccattagcttcatgcttggaatttatttagataattccataaagtaaaggtttgaaaagcccctggactatattacatctgaaatttctttacttttaacactttatgagccatttatgtttttcctaattcctatacttgagtcagacacaggagttaccatacaaattttgtgcttttccacttctggaactgccttatactccagacttttcatggaatatccatctgctcttcttactagtagaaattccatttatttttcaaggttcaactctggctatccctgagatgaattgaattatcagccaggaaaaaactttcgttccctggaattttgaaaacagtaagttagtattatttttgagcacttacctgttctttgttctgttagggttgctatgtacttgatgagtttctgtcattcctacaggagctgggcaaatctgataagcacgagtagggcgatgaatagaagataatggtgggaccccaaggcactttctaggatgtacacatttcatcaagagggggtgtcacagccttagtgagatttctgtactgtccacagggaaatttaagatcaacatggccaaattctatttcaataaaaattatgcatctaaattttcaatgaaatttttgacatctgaaaactcatttataaaaataaaaatgcaaaatgcccaaacaaaaaaaaatgtgtaatggccacttgtatacacttgtatacacctctggactctggactgcataccctgtgcctgtcttcatcctctaacataacataatctacttgcacctttgttcagggaaattttgtgaattttgttggaaatgttcgatagcctttgtgtataagcttgaataaaatcatgatattgaagtttttaaaaatctagtgcaaacaactgtcaagcgcaatatcacaatatcctcgagaaaatcaagttgtgaagtggatcatcctcaaatttaaaatcttttggtctcaccctcagaatatcccctacttgaggctttgcagtgtaaatgccttcctgaataaaaatgagattaaggaatatttcacagttccttaagcagcagaaagattagctagttgcctagaaaaaattaaaaatctcatctggaaatttgggaggattttaatgggacctccttgtattgatcttgaaagatatagtttgtattaaaagcctctcttctcctctcccctcccctcccctcccttctgctccatttttagaaggagtctctctctgttacccaggctggaagtgcagtggcacaatctttgctcactgcaacctccgcctcccaggttcaagcgactctcctgcctcagcctcccgagtagctgggactacaggcttgcaccaccatgctcagctaatttttgtatctttttatagagatggggtttcaccatgttgcccaggctggtcttgaactcctgacctcaggtgacctgcctgccttggcctcccaaagtgctgggattacaggtgtgagccaccgccccccggctggtttttgttttgttttgttttggatactttcctgatcgccttttgatgtttgtcactagaacactgacaagtttatattcttttaaataccacttgctggtcgtcatgcttgctttttctttattaagaatatgtttgaattttaacctgtaaacacaaaatttgacacagtcatatcttgattctgtatctaacagcagtagtgtttataacatatttacaccattgtttcattattgttggctgaagtaattcctagttaacttttcattttctggttaaaattgtaatctaattccgtgttctgtttatcactaaataacagagtaatcagtagtgactgaatattaggagggacaattgaacacttttaaactcaatgacatgtgaactgaacatgcgcaggtatcataaaacaaagtttgaaatgatttgtttataacaaaacaatagctctttaatgaggaaatggacaacagcatgttatgttttgctaaaataaatataaaatggattatatttctaaaaatgatgaatgttgctatattaaaatatttattcatttatttcaaataagtcacttaattttttttttaaattttatcttaataaattagtcaagggatggttactttctcttttcaatgcaaatgtaattccttaagtggttttcatggcccagggcatgactgcatttctctgcatcttttctctttaacagggctattaacattaagcaagcaaaagtgttctcttgttaaaaaggaacagtccacccattccacccagagaagttccctctggtgctcggcccctccctgcactcaggtctgcagtgaggccatttcttttctcagcttttgttacactgccccctgcatctcaccaagtggactcgcagtctaaattgttaaggtttctcatattttttcctccctaaaacgtaaacataccattggtgcaactcttccttgaagcttaatgtcgtgtatttaatgctggacttaggtaaatgaaaggtccgctctcttaaaactgagagaaattattcatttaaataggatgtatataatactttaaaaactgtgtatctaatatctcttaaaatttattataataacacttattaaggattagacaaggtgataccttagcaagtgttattagttacagtttcttagatatattatctctgtattgatatgtctcgatcaataataaacagcactgatataactgaccttttagtacagtttgctatacacatggacactttcacataaaatacttcatgaattatcacaactttattattagtagtattacagattcaaaagtaaagttaaggaatattcaagttagggaagccaagtagatggctgcttttcagaacgtaaatttttattgttttaatgaaagaaaatatggcaaaattggcaatatattttccttttgacccaacgtgtcattaagaagaattctaagtaaattagaatgtttagctcagcatttctttaaatagaaattgttagaaatgaatcacatgactaaataggagaatggctaagtatagtgtggtacatcttcatgatgagcaataaacagtcattacgaatcatgttttcagtaaaatggaaaatggaaaatggaaaaaagctctctggttaataataattgaaaagagtgatatttagaaatgtatagtccttctgattgcaattgtggaaacaacctttgagttctgagccagagtactccagtgcacaaggcttctgcccatctcaagggcctccctggaattctcctggccatcctctttgcctggctacttcttcaggttccagcttaagtgtttctttctcaggaaagcctttgctgatctgcaggaccacttcagccacattatgttccccagttacatgttctcacaaaactctaattttccttcatggtatatattatgattataattaatcaccttgtggtatctttcaaatgtctgtcctccccaatagactatcagcttcactgaagcagtaactgtgtccttgtttactcaatgcctgccccagtgactgggacatagaatgagctcagtaaacatttgttgaggaaatgaacaaatgagtgaattgcaaggcactctctgagcacttttgacataatttcattgagactccaccaaaaacttatgaagtagaaaccatatttattacattttatggataaggaaactaaattgtaaaggaagaaaattggccagagttatacagtaggcggacagctccaatgtaaacctgacgtctctgaatgttgtgcacaagctcttagccgccaattgtaagtggttgtactgaatgtaactaagataactatatttaaatggtcaactttgtaggtcaaatatgcagaaatattacaaatctttatattaatttgttaataaatttataaacatgttaaattctgaagaaaatatataaaaatggaaatggtggtagaattgcactggttcttatttttttcacacaattctacatttcacaaattccctataccaagtacttatcattttctataaaaaggaagaaaaccattaaagcatgttggagctaggtttcaagtgtgaatattttgacatcaaattccaaagagtttccactcatcaaaagagaaaagttgatcactatcttgtgaattggcacacaatttgcaattaatttttctgaacaatttaacccaaaatcaatgtcataaatatattttaataatgttcaatgtaaaattctatgtaaaaaactgcagaataagtagctacattaagcctataccatagaaactgttaattaaagttttgagctgattgaatatatttctttctatgtatagcttttatgctttttgacattttcctatcactaatactgattagcaatcaaatgtataccatccagttttaaagatacctaatttatttatttcaaacttcaatatttaagataaacttgcctttcaaaaattaattttgttcctcaaactcaccaaagtaaaacataatttaaaatctatctctatagatttcctcttatactttttattttggtttttcttccagtgattgctgccttgaccgtccctgctcttgaagtaagtacaaatgagcaaggaccctgaaaaactctgggctcagattgccctagtttgttagataattttgatggtacaggggcatgtattttgagatacagcatttggtagtctttggagttaagtcatactgccgacacagattctactggctgttgcagacactagcttccctactaggtctgctctagctgccaaccatatccttcatccaaagcatcagatgtgagccctgaatgattatatagggcccagttttattcaggccttaatgccagacttacagatgaatgaatgactgaatgaattacagtccctgccttaactggattcttaatttctagctcttctttcttgaccatcacatttgacttcttgaccttaaccttacaaatgaaactagctgtccttcctaaggacattgtccctacgatcagccttggccaaataattttcccttaagttttctgcatgtcttaaagtataagtctccattgtccctcttatagagacctcaacatgctttctggttgaaccttagcagtaccttttgttatattttaataaccagatttgagtaacttgatttggccatctttctttttccttcattgatcatatacatgttgaatctgtgttatgtacaaagtagtaagctaagcccttaggaagaaaataagatacctataaacaatagtccttgcctaagagtatttcacactttagttaaattagtaataattactatagttcttttgtagaaaccaatttcagttcatctgtacctttgtagatggaagctgaccaaattcaggcaaaaaacaaacaaacaaaaattttctatgctgaaagtttatagttgattttggaatttcactttctaaaagtgaatttaaaaactgagtagccaggcatggtggctcatgcctgtaatcccagcgcttcgggaggttgagccgggaggatctcttgaccccaggagtttgagaccacccgggcaacagagcaagaccccatctctacaaaaaataaaaaattagctgggtgtggtggcatgtgcctgtggtctcagcaatgtgggaagctgaggcaggaggatcacttgagcctgggagatcgaggcggcagtgagccgccatgatcacaccacttgcactccagcatgtgcgacagagcgagaccctgtctaaaaaaaaatgataagaaaaaactaggtaatgttaaatcccacttacttcaacaatttaaaaattggcaaatattaaaaacccagttttttactcatttctgaataatataaatgctttaaaactcattttgacaacctttatattccactataacagtatttaccttgggacaggctccttttgccaacttgcagacaggtttttcttttacatgtaattgtatgtgtagatcagcgattcttatatttttttattttatttatttatttgtttttaagtttaacatgccgttggctctagaagctgccatgtttaagaatttcgggatagacacatatttgatcttttatatttgttatttggtttgtacacgtaatatcactgatctgctcaacaaatctttaatggcttccaatcattcatgtaaacaaatctgaaattttctgtctagctctctccaaaccctccataaaatagtcccactcttactatccaatcacacttctcacatatcctttcaaacactaattatttgcctttctttgacccaaaagtcttcttttcttttgcctaccaatcaaaatttatctatcctttaaagcccagcttagacccagtttcatgatcactccagttctcaattatgaattttcctctgaatttcaggactaactagaattagaataatttcttttctcacttgttcatgctaattaagatgatcattatttccctccacaaagattgactccttgtattaggtcattctcacactgctataaggacatacctgaaactgggtaatttataaaagaaagagatttgactcacagttcctcaaggctggggaggcctcaggaaactcacaatcatggtggaaggggaagcaaacacggccttcttcacttggcagcagcaaggagaagtgccaagcaaaaggggaaaagccccttataaaaccatcagatctcttgagaactcactcactatcacgagaatagcatgagggtaaccatccctatgattcaattacctcccaccagatccctcccatgacatgtggggattatgaaaactacaattcaaaatgagatttgggtggggacacagacaaaccatatcactccttgagggtaggaaccatgctttatatttttctttatgtctttggactccagaaacaagggccacttattagggagtttagaaatcactgttgttaaatgtaatttgacaaaattggtcattggactttttttgttttgttttgttttactttgtttttgagatggagtctcactgtgttgcccagggtggagtgcggtggcgtgttcttggctcactgcaacctttgcctcccaggatcaagcaattcttctgcctcagcctcctgagttgccgggactacaggcgtgtgccaccatgcctggctattttttttttgtatttttagtagagacagggtttcatcatgttggccaggttggtcttgaacttctgacctcaagtgatctgcccacctcagcttcccaaagtgctgggattacaggcatgagccactatgcccggcctcattggacgttttggacaataagcttagaacaatacaatctttcttaggactttaaagcattagagactttagggattaatatagcaaattcttcattttacagatgagagaactgcgatttacacagggacagtatggatcagccattcttagtagcctttatctcagtatctttgatagcctttctcattctatttcctcaaatttaaaaaatgaatataaggagtgtgatgttttctgtctattaaaaagtatgaaaaggcactgtttcatcctcggtttggtcagaaaagcagaaaacacttcaggagtttgaagtaggagggatttaattccaggaacaaaatgctcacaaaactaatggaagacctggagaaatagaattcaggaaagaccactgttagcttttaggctcaccgctcactttggtgagtcaagaagctcccagcactgatcaaagaaaaggcctccaatatggaggtggctgaattccagaaaaataacccagaagccacaatagcatctcatatttgttggagccacgcatatattcacctgcagttactggaggaatggtaaaggtcctgcctttcttccaccttccaaattttacctgagtgcttctaaatggcagaatctgtgctgtgaaggaaacttatttttaaatgtattagcatcttagttctttatctcaatggtttgatgcctttcaatttaagggcaaatattcctacacatgtcaatatctcacaaattatttatctgctctaacactaaacagtaattgatgtttataataatggaattattaatgctggaagagaccagagataaactgaacctcatcttctcatttaaaaaactgaagtcacatagcaatggtgttgaagagccaacctttttgacctacctccatggctcagatggagtgttttcctgttatacttgtatctgaatttgcctactgctttatagttacattcaattgaactctataactttctgatttaataaggatttaaactacctaattatttagtgctaagaccatggttgagttttataagacacttcaaaaaattgtacatggggtcatacacacaggtgcaaactaaaggggagtttagattgctcattgctcttccaaggtgaaatcaccattttatctgatgacttacaaatgaaaaatctggccaataaatctatttagtcagatttctcaacattgtgaatgatcctcctggtagccagatattatgtctatcatgacatgaccgcttatttcatgttgacttgttgttctgtgtggaacttcctgtggcactagagttttcttaagtataaaccattccaaaatcacattgttattatgggttgctttgtcctcaggctctgtaggactccttttgggctattggtctttcaacatgcagttaggggataaaagtaaatcatttaatctatgcagcatgtcactcaatagtatacttttggaaattgtttccacaggagcaccagcgaaagcagccagtctgagatattgacactacagaaaaaactgacagcttactccttgtattgattctactcttctctacaaatatagactccgttccctaccacagccttgtaagtggtgcccgctgaggctgctaaattgctttgtaaattatttattacttggacaccttgtaaagacctcttttcttcttgtctgacttgcttgtgctttcgtatatactaaaaggtctcaaagtgtacactgaccacaacctccttatgaaatcctttccttcctatcttttattgcaaatatgatcttccttgcccatattatgactatgccttttgtcattggtttttatttctgatctattgcttataaaatatcataaatgtttatatgcacgtttggagcctggcactgggcacttaattagcatattctcaaattagaaagtttgaagtatttaaagaacatttatttaatgatgggaaagagtttctattaataaaaactgtttatcagagcaaatgcacatctttatttgcacttatgtggtagagtcaatgttctgaaaaagatggcaagtgttttctctcttttcttgattatttcttcttacttaggttttattttgtgattttctgaagaatttttaaaatgttcataatgtagataatgaaaacaatattttttgtccagtaaacaaaacaatttgagcagattgcgattgttcacttttagctaactgaaaccatatactcacatataaaatactcaatagaaaacgtcttcgcttaataatttgcattttcctgtctccctctcttagcttcctatattagtcagctcagcactagtataaatttggtgatttaggtccagagttatttcagtgcctcttatagtttggaaatccaagaagctactcctctcatccatccctcaaaattcattagtttgtgtttggaaagtacaggattttcaatcttgtctctgccatttatgagttctatgactttaagcaagtaaattagccctcataaacatcaacttctactatgaaatgaagtagtaataataatagtaataacatctatcccaaggattattggaagaataaatgtggtatatttggagtgttagaacgggcatatattaggtatcagtgatgtttacaacatgttactgatacaaaatttttttacttgaagatttacttttatgataattatattttatacaataccaataaatacatgttgagaataaaaaatgtagtgagtaattatacactaaaatcatagtatcttataggcaatttttttaggtcatagaaatttgagaagcacaaaaacacacttctaaaatcactataattctttttcttttctttcctttttttttttaagacaggatctggctctgttgcccaggctggagtgtagtggtgcgatctccgctcactgcaacctctgcctcctggggattcaagcaattctcgtgcctcagcctcccaagtagcgggattacaggcacatgccaccacagccagctaatttttgtatttttagtaaagaaggagtttcttcatgttggccaggctggtctcaaatacctgacctcaggtgatccatccgtcttggcctcccaaagtgctaagattacaggcgtgagccaccgcgtcaggccagatcactgtaattctcattgaaatgggaaatgcaagtcgcttagaggactaaggattagaccatgaagacttataagcagaagagtccagctatgtctagacaggccactgtggttaagagatgggcacacaaagaacaatgcttgccccaaacaagtggttttagacagtgaggcccttagccataagcttgaaatctgtttcaataatatcctctccaggccaggtttactccagagctgtgctggttttcttgtagactgctttgtgccagcacatattgctatgacttcatttcattttttccttacatactgaaggtaatcgcttttaagatgagttttctacacctgttttcatactcaattcctggcttgaaatgcttgtttctttacattattccaatgtttcaaggcccagttcaaatgccaccgccccacactgatctagtcactcttactactacctacttgtttcctcctcttctaaatcctttcagttttgatagtatgcattaccctaagtagtgtctgagatcagatagagtgctctctggtttaataactgtttaatgtaaaactattcagctagaaacctgtaggagagggaagaatcttaatgaaagattaaaggagaagccaaaggctggttaaagcagagtattttcagataaaatgcacagtctaagcaccagatgggagcattattgtgacccccctatgtttgcacatttcacatatgtgtcccattctcaccaataatgatggccttcaccacaacttctttgtagattacataacacttgcacataatttatctcatttattcctcaaagcaattttatgagatgggtctctttatcctcattttgtagagaagaaccaaagcctagagggggttacaatgatttgtcctgagtcacactgaagtccattacttttattttctatccatcccagctgaccttacacagtggctcatcctaccctcacagaaaccactcaaggaaggccagaaagatatttctggctttgaattataagcaaggaggctgatttctcctgagaaaaagtgaaagaaaaacttctcatccaagcactctctgccttttccctttttggagcagggagagtgcagttctctgaacaataagattggtttgacacaaaaaacaagtggaagtctgcacatgactttgtgcaagaaatgcatgagggaacagagttggaatatgactgaaatatatatatatatatatacactcacacacataaatatgtatgtagtcatatacatatgaatcataaaatgcttaaatatgtgtaaaaatatgtattgaaaacatgtagatctaccttattttatatatatttagtaaaatttgggaagaagggaaaatctcatcattggagtggaccaaatttgtgttaaacaattttagaaaagacagcaaggtatatatctggagggaaaggaactattagactgaactgtactgagtagattgagtttcatgtcctgggaagaaatggaggctggttggacacatgcttccccatcctgaagagtgcttagaaaaaggcgtgctttctttctcacagaatgaatcattgaggcaaaagctataaaggtatatacagcaaaatagctttgccaaatgtttataccatggatatttccaacaaaagtgtaagagattgtccatttgactgcattcttatcaatacttggtattgtaattgaaaaataataaaatgctagttggaaaagttaaaaaaaattgtttataatgttaagtttagtatgaaaattttctatatatttgtttactaattgcatttctttttttaaaaaagtatatttttaaattttctgttttatctatttttacaatagtgttttaaaatcaacttatgtaagcttcatagtgttttttacctgtttaaacaatgtttgataagcatatataattcctactgatgatgatatataacaattagaaaacttttttgctgaacttgttaattttattaagcctgattatgttttaattgttattctttttcaaaaaaaatgtttaaaaatttgtcccaagcaattgggggtacattttctttaattttctctgttgttacattttccactgaaagcaaatttgcagacatatacatcaatgccaaataatagaatctaccctccatatattaatatttttccaatgtgatatctctgagcagcattgtattgctatttcaaatagtaatagtatatattaggaaagctgaatgattataaacttacagttcattcacaaaatttactaagttcatactttgtcgaaacaattgtagagaaatcaaagttgtctaaaacatcaaaccttcctgcaaagagaagacagttaatgagattataaacatgtattcaatacattcacaagcagcatgaaataaatgacaataaaattagacaaagtgttatttttacacagagtaaggaaaaaagctactgctctcccatacagcacacacacacacacacacacacacacacacacacacacacacacacaggttgacaatacacaaggagaccaagaaaaaatcatgtgatagatacgtgaaaatttaagtcatttttattgcctgaaataatgagatgaacattaataaggtcttttattacagttgcataaattgggctttaatttgtgaccattgagaattctgctccagactaaggattaaatttgtttttattgaacgtaataaataaagattacacattaaaatattatgaatcatgtgcatttagaaacaatcttatcaaggaccagtattgtggtttattagttcttgaaattatcgcctagattactgccttgaacataataagtggtcattatttttttttgaatgaatgaatggtggcaaaatgtagtatttgaaaggattaacttttagataatactagtaatagcatatgtagaaataaacatgcactaaaattatacattttatacaattataattatacaattatagaaaaatatatttatttaacaataaacatctctactttaaaaaggtaacaaaaacagtgtttatttaaattgactttgaattatgacctgctatctataagcaaggtgatgtttttggtgttaaggaaactatatagtttcatagtttggtctccatcaattagtaagtgtaagtgatgccagtagtacactggtatatcttatcaaataacaaaacactgaagacagaataagatgaatatgataggagagaaaaaatggcagagattttggaacacaatgacttttgcttattctatttatgcttttgcaactgattcacagactatgttcctaaaacttaaactagtatcctcctactcttctcattgtgtcatctttgaaatcaccaacaatggtatttcgtatcatgcagagtcatatagaaaactttaatacaggtgtaatatctctgaagtttccatgtttaatatccccatgtgatggcattcactattatcacattttctatagatgttaaggatgggaagttattattatattaaagaagactttggattactaacttgtaatgtttctgtaggcctcagaattcactgtgctgaggagctaacaggatcctgacatttaattgtctctgcctgagcattctgtcaactttggaacttgtatgaggcaagtgtgataacatacataaagacagaacacttctaattttttttttttttttttttaaatacagagtctcctctgtcacccaggctggagcgcagtggtgcgatcttggttcactgcagcctcaacctcccgagttcatgcaattcttgtgcctcagcatcccaagtagatgagcccacaggcccgtcccaccaggcctggctaatttttgtagttttagtagagacgaaatttcaccatgttggccagtctggtctcgaactcctggcctcaagtgatctgcccgccttggcacttttaattttgtataataaaatatttgatacaaacatacacactacatatgcagtataaagaataatactgaaataggtacaatatagcccttaccttaataaagaaatggaacaatatcaatatttctatattattttgtccctattattgatcaattatttattctctccctcttcaacaaagtctttaaattttgtgagctactgtattatagttatgagcaggtactactaatatctaataattgaatgacaaaatatctatgggaaaaaagtaatatcaaaactaatattttaaaatctgttacttctttaaaagtagtgtatatttaaatccaattttaatataagtaatatgcaaaaaatttgagagatccaggagatccagaaaattattctgcaagaagagtaaacaaaatttaccgtaaaatgtacttcttaaagataattggtttttaaaaaatactattctagtcacggttatcctttattctttttttcttgtcatgagcttttcctgatacctactggcagggttctagcagcttcctgaatatatcttaatataatatattttttttcaactcagtggatgttacattaacttcatggcactggaggtctttttgtttatttttcctgagtctgtcaaaccttaactgctcactcaaaagcttgacgttaccagtttttctcagggcattttcaaactcctagttattttaaacagccaccagaattctccatctcacaactttcagaggggatttactccaaaatcttggatttcttaatcttgcatctcttcttaccacttaatttattaaaaaaagaatctctctacaaagctcaagaacataactggttgtcatgaaggagctcctataatatttggtttttattccatgaaaattaataagactataaccagacaagtggagaaaaagacatagaaaacatagaagcatatatagaaattataacgaagcagcatcaaatacattattactatatatatatatatatggcattaaaatatgtaaagataggttgtgctatgtctctgatgactgtctaaagttttgtgactatgagaaatgcagtttttggaaaaatgaagagcagcagtgtctactagatttagaaacattatcttaacaacaaaatgcaaattttgttgcagaaaagatatttcctcagttccaatgccctatgattcagaaaaacctagttgagtaggggctacagccctttgcttgtttctcactagctttgatggggtatataaatgctgtgtagatgagaagggcttgaggactaagaaccaaacagggttgtgtattatctctgttttaaaacaaagtctgttttctctattggcagaaaaggtgggtgtttgtgttcgtgtttgtgtttttgggtcattaaaatacatttaattttgtcaggcagaggacaccacatctgattccttgtaaaaggaagtcataactgctggacacatagagaccaggagagggctaggtactgcagagaaattaaaagaggtataaagtacaatatataatacacctaataatgtattgaagaaaaggtaaaatggttttggctaggcacggtggctcacgcctgtaatcccaacactttgggaggccgaggcgggcagatcacgaggtcaggagttcgaggtcagtgtggccaacatggtgaaaccccgtctctactaaaaatacaaaaattagcagggtgtggtggcaggcgcctgtaatcccagctactcgggaggctgaggcaggagaattgcttgaacccaggaggcggaggttgcagtgagccaaaatcatgccaccgcactccagcctgggtgacaaagcaagactccatttccaccccctcaaaaaaaaaaaatagataaaatggtttcatgtagctgctgaagacgagcaaatcattataagattcctagaattttttttaattaaaagaacattcttatgctataatatggtaagtcagtttagaaactaaacttaaattgcatttaatattatcctgtctttgattttgttgtaaaatgtttcaaaaaatgtataaacactacacaaaattaattggaatatgattaatatagtatacatattaatagagaccctactgaaatttttaaaataaatttgaagtattcataccacaggcaaatgctaggacatttgggacacttagaatttttaagttccaccatagaatccctgtcggcacacaagacaaaaaaaagatatgcttaatgcaagagatacatatattcttatttcagcaacattatatataaatcaaatttctctaaataaataatatttttctaattatgtctcttcattttgaggtatattattcaaagcccatatccaatttttgggtcttctattaacttgtttgaagttaacaaggaacaaaaaagcaatgaaagtccactaggaacagtaaagtttcataacaaatttgataacttagatgaaatggacaaatttctaggaagacacaaagtatcaaatctgactcaagtaaaaatagcaactctgaataggcttataatatgtaagataattaaattagtgatcaaaaacattcccgcaaaaaaagtccaggattatatgacttcactggtgaattcgagcaagtatttaaagacaaattgtcacaaatcctttgaaaacacttccaaaaattgaaaagaaggaaacacaacttattatatgaggccaatattaccctgataacaaaaccagatgaagacatcaaaagaaaaaaaattgacagaccagcaatcttatgaatataagtgcaaaaaatcctcaacaaaatactgtactagcaagccaaatacaacaacagaaaaaaaggattatctatcataatcaagtgggctttatctcacaaatgaaagggtggttcaacattaaaaaatcaatgcacactaaaagaataaagaacaaaaaccacatgatcatctcagtagaaacagaaaaagcattttacaaaatacaacacacttttaagaaacaacacttaaaaagccagaaatacaagtgaactttagcaaccaaataaagtatatttatggcaaactcacatcaaacatcaaacaaatgctgaaatatttggagtcagggacaagataagaatgtctgtttttgctacttctatttagcattttactggaagttcaaaccagggcaactaagcaagaaaaagaaagaaaaggtgtccagattggaaatgaagaagtaaaactatgtcaatttgcagatgacatgatgttttatatagaaagccccaagaaatccctcagtagctattcaaactactaaatgggttcaacagggttataggatagatacaaggttaatatacaaaaattagtttaatttctatacattagcaaacaacagtcagaaggtgaaataagaaaataatttcattaacaatagcttaaaaataataaagtactaagaaacacatttaacaaaagagatacaagactgtacactaaaaactacaagcattattgagagaaatggaagaattccttaataattggaaagacatcccatgttcatggattgaaagatttaatatatatgtaagatggcaatactccacaaattgatttacatatttaacatagtcctaacaaaattccagttgtcttttttttgcagaccttgacaagctgataataaagttcagatgaaaattcaagagacctaaaatatgcaaaaaagaaaatttaacaacaacaaaagaacacagctgaatgacccacactttccaatttcaaaacttactagaaaggtacagtaattaaagctgtacagtactaacataagaatagatatatagattaatgaaatagaatttagagtccagtggggggaaaaactcatatattcatgataaattgattttgacaagggcaccaagacaattcaagtgagaaacaatagtctcttcaaaaaatggagataggacaactggaaatttacatgccaaaaaataatgttgaatgcctacgtgacataacatacaaaaattaactaaaagtgatcaatgacacaaatgcaactgctaaaactatcaaatccttaaaagaaaacatattcatgagcttgtattaggcaatggactattagatatcacactaaaagcacaaactacaaaagaaaaaataaattagacttcaccaaaattaaccattgtgcttcaaaagacattatcaagaaagtgaagagacaattcatcgaatgggagataatgtttacaaatcatatgtcagataagggtcttgtatccagaatatataaagaactcttacactgcagcaacaatacaatgaaaactcaatcaaaaatgggcaaaggatttgaatagatgttactttaaagacgatatataaacgaacaataagcacatgaaaaaatgtccaacatcgttagtcattaggaaaatgcaatttaaaacaatgagacaatgctttacatcccccacaatggctataatgaaaaaggcagaaagtaacgagtgttggtgaagatgtggagaaattgaaatctcatgtattactggttggaatgtaaaatggccaactgctctgggaaaatgtttagcagtttttcataaagacaaacatagagttaccatatgatctagcaatttctctctagaacatgtacccaagagcatttaaaatacatgttcatatgaaaaaatatgtaacaatgtctatagcattgttcataaaaactgaatagtggaaataatttgtatttccatcagctaacatatggataagaaaatgggttatattcatataatagaatatcattcagccataaaaaaatgaagtgttgatacctattacaacatggattagccttgaaaacattacactaagtgaaacaagacacacatgcacacaaaatattgtacaattcccttcagatgaaatgtccagaatgagaaaatttaatagagaaagaatattgattagtatttttcagaggcaaggggagggaggtcgggcatgactgttaatgtatattggttttttgaggactgatgaaaatgttttgaaattagagactggtaatgtttgtccaaccttttgaatacacttaaagctactaaattataaataaatataataaacatgtatctatatataaaatgtgtttatagtttatcatatataattatattagaatttatcctgggaaattgtaataaaaaagactaacaagggaagaataatgaatactaccagattttaaaacatattataaaactacaggaattttaaaagtttacagctggccaaggtggctcataccagtaatcccagcacattgggaggccaatgtggggggatcacttgagtccaggggtttgagaccagcctgggcaagatagggagatcgtatctctacaaaaaataaaaataaaaaaaataatccaggcatggtatgcacacctgtagtcccacctacttgggaggctgaggccagaggctcagcccaggagtctaaggctgcagtgagctatgattatgccactgcactccagcccagctgacatagtgagatcctgtctcagataacaaaatgtttggtaacatttggtacataatagacagatcgataagttgaaacagaatccaaatgtactccaaaacacacacatatagttttgttatttttttcacatgaaaaattattgttgaagagattttgttcagtaatagtgtgtagacatttggttcgcattccatcagagaaaaaaattacatcccttaccaacttcacatattatgccaaaatatatcccagataaaacaaattttttaaagaaatgttttttaaattgacaaattaaaatggtatatatttatggtatacaacattggtgttttgaaatacgtatctatcttggaatgactgaatcaagctaattaacatatgcattatctcacataattatctttttttcatgatgagaatacctaaagtattttttttttttttgagatggagtctctctttgttgcccaggctggagtgcagtggcgcaatctcggctcactgcaacctccgcctcccgggttcaagcgattctcctgccttagactcccgagtagctggtactacaggcgtgcaccaccacgcccagctaatttttgtatttttagtagagacgaggtttcaccctgttagccaggatggtcttcatctcctgaccttgtgatccacctgcctcggcctcccaaagtgttgggattacaggcgtgagccaccgcgcctggccctgaagtctatgttcttggtgatttgcaagtattattaactatggtcagcatttatacaatagatttctcaaatttaaaaacaaagttttaaacataaaataaagtatatataaaagttgtgtgaaagacagagaattgagagaacatgttttccctaatcctcatgaggataccctgtataaacacagtaaaacatagagataacaaataataaaatttgacttgatgaattttataaacctgcattacaaaaatagcagtttatagcatattttaggtaaatgttaattttaatatgtaaagagattttatcaagtgacaagaaaatagcaaacagcctaatgggcaaaggacaaaaacacgtaggtcaaaagaaaaagtaagcttttaaacatatactaaaacgcgtcatcctgtacaaataattaaagaagcacaagggtaagcaacaatgtaatactactcttaccattcagtttttaaacatgtcttttaatatttggtatagaagaggttgtggaaaaacaggcattctattatgatatattgttggagtgtgtgtaattattataattgctttgaagtaatttgacctaaaaaatttgacctatacctttcgctcagaaattcttcctttagaaagacacccattgttagcaattacatttgtaggctattcatgatattgtctgtaatagcaaaagtctgaaattgtctgttagtaggggagtagtccaatatacgatgatatggatatattttcaaacaaaatatgcaaaacaaaatgcatattgtaacatatttgtactttgaaagtacacaaacacttatactcatgcagtttttacttgcatacactttttctggacagatacatagtatctacaaaattgtgagatattattaggaagggcagcagggggttctggaaggaaaaagagattacttttcatatagaaaacttcataggtaaatcattctcaaatattaaaaacaattttctgtggtaaaggaaagcactagttgagagagcagactttgacattagatagccctgtgtttgtgtttggttttgctgcttactaagccttgggcaattactaaatgctctaagcctcaatttcctctttgtaaaataaagagaaaaatggcgatcacctacagagctataagtattcaatgagttaaaacatgtaaagtaacacagagatgtcacagattgatcacttaattaatgccatattatttttattactaatagtaagagtgatagttcaagagagttgggtgtacagtgtctctggcttccagtgagagatgttgtcaagatattcttacaacagcttctggtctagatcagagctttttatccatagtgctgtgataagctaatgtgtcacaatcattgttgtttgtgttctgaataatttgttacttataatactttactgaagtttgaggtttgttgtatgttagagctgaatcagtgttgtacctataaatacccttactctcttgaattatgaaatgattttttgagtctgacaaagaggagtggagtccttatagtacttataggagtggagaacttacagagttctgaaaactgctaataactctgggtatgccagtgagaatgtgtcatgtatgagaaaatcacatggtcacaagctgtaatcttttgctgtggatgggaaccagtttaaagctagtaaagaggaagttccaggtaatctaaaggcctaggagtcattgtgggttatgtttagaatacatgagtctaagttgtctccataatcctaaaagctaataaaattctgggtgtattgggaggccgaggcaggtggatcatttgaggtcaggagttccagaccagcctggccaacatggtgaaaccctgtctctactaaaaacacaaaaattagccaggtgtggtggcatacatctgtggtcccagctactcaggaggctgaggcaggagaatcccttggaccaggaggcacaggttgcagtgagctgagattgtgccactgcactccaggctaggtgacagagtaagactttgtccaaagcacacagacacacacacacacacacacacacacacacacaaacacaccaaaaacaacaacaaaaaaaatctggatatgatcagggaagaaaacaaaacatatttttaccttttatattaacaagtgtttctccctttaaaatatcaaagatagttctggttactaaatctcaagaaagacatgctcttaaaactgggattactaggtcaaaagttacaagcattttaataactcttgatatatacatatatattatacacttacaaacatatatacaacatatactttttgggggagggcaatttacattgctgttagtgttgcacgagtgatattaattatctgcaacacataatgtcatttacaaaaagctcattttctaggcataatatattttgaggttaatgcactgtaattattatcaaatttggacattttccaatgttagttttctatttatatttccctttgtctaaattgcaaatttatattgtactgatgatgatttgtttattaaggtctttctattagatctttttattaggataatttcattacaaattaaaatgatctcttattacttatttgtaagtaaccctgggattttatacagtgaattgtgaattgtggaaactactgtgaatatctaatctgtttcactttataatgttgtacttttgaattatacctattatatttgatgggacaagagaggaaagatgagtgaatatttcttaattccactcattaatataggtgattatagaaacttctaccagaatctgggatatgctcaatttttaacactcatgagtatcactgagaaattttcttttcagagggttttatggataatttactagggtttcgagggaaggtctctgtttctccatgccaaccttttctgaaaatgttagttttcagtacaagtactgattttacccactaaatgttggtagttactgatttctaaactcaactcttctgctaacttgttggtggaactttgacaagtcacttaacttctttgtctcctcaaccacaaaatgaaatgttagtctgagatgtccttaagctccttgctagctgtgcttctttcctgattcatttgtactatccatttcttgcctctagatacacctttggaatatgcaaatgaatttggaattgtctgtattctaacctgagttggcttctctttctacatcattctttaacccttattccagcacaagacaaacagtacaaaggtctcaaaagtttgggaccttagatccagaatgttttgaaacaatattcactcactaaaatatgaacaaagttaaagcaaaatatttaacaacattgttttacctctcaatttttttgagtttcactgccttgtcgtttacaaacaaatataaacgtaccttatgatagagttattctgtaaactccgtaatgcaagatttccaaaaaaaaaaaacataatacaagagttgcaaatatacatattcgggaattcttgacacttttgtcatctagtttaaaaatcatctgagaaagaatgtaatgaattcatttaactgtgagttacattttaaatattttgtagagacacaaactctgaataattaactctgttactactcaataatttaagtggaatgacccttgacagtctgtttgtaataactaacagtgcattttaattattttttttaaattagaaatgacatctctagagttcaagattcttgggagcaaaattgaacttttaaaattggttagtatagagggttatttttcttaatgaaaataaaactgatttgcattttaaaaatctgggtacactttttaaaatgattatgtcagtaatttaacattaggcatatattagagagaattataccttttctttctatctcttcataccaatcttctggtatgttagaaactaggtagtataaaagctaaataattgtaagcctgaaaaatcgaagatttagtgattttaagaatctgaaatttctgtcaaaaaatgtaaagctaattttataaaaataaagttcagtttataagatagcaagaataagacctatcataaaatttacaagcagatttagtaattattaaatactagatttaataagcaggaaacttatcttccacgttcactggctgtttatcttatacttgaactcttccctcattttatccttttgaataatactgtactaaagtgaatctctgattaatatttaaatgtacatggggagaaatgggtaacctaatcagagaaaataattaacaaaccacctcattctcatatccctgaattcttacaaggagacatatattttgattactacaatgtaattccctttgacctcctttctaattcaaagcttattagatttcaggattgaactggctcactaacatttaattacagttcttaaatattttctgaatgtgttctaatgtcctggattttcctaaattccacttttcttctcccttagagtagcaaaagttaactggtaaggattattttccgcttccagacaattttgtgatagagtgcaaagacaaattcttgtgggctaggtaaagtgcttttgtggcagatcatcaacaacaacaacaacaacaacaacaacatcagcaaaagctttttatgcagtggctgaaagacgagataggtctttatgtgttaatgtagaatgatatttatgttttgatggttgagcattgcaattttatttgggcctaaaaatgttataggtttacgaaaagaacatatataatagatgatagatagatagacagatataaattccacatgtgcatttgtatgtttttatgtgagtgtgtttgtaaaatacacattttgtgtaaacatatagattatatgtaagaactataaatggacaggtaattgtctatttttatatgtaatctatctacttaatttctattttattacaatctctatctctatatagcgatttgccattgaagaggaaactactgacttttaaaattcttttttttttttttttgagatggagtctcgctctctcgcccaggctggagtgcagcggcgtgatcttggctcactgcaacctccacctcatgggttcaagcaaattcttctgccacagcctcccgagtagctgggattacaggtgcccgccaccatgcccagccaatttttgtatttttaatagagatgggatttcaccatcatggccaggctggtctcgaactcttgacctcgtgatccacctgccttggcctcccagtgggctgggattacaggcgtgagccactgtgcccggctgacttttaaaattctaattgacataaattttaaagtttactatatttttcatttgcaatcaaagcttatgtaacttttataattaaaaacattaaaaggtagtgatgtgctatactcttcaaatactgcattttataaaactatctgatatatataataaagttataaaacttgttcaaaaagaattaattcatcaaaatttaactagttacatgtttttaaagtacatggtgtttcagaataattctaagcagagatgtgcaaagtttaagacaattttaaacttattaagtgacttaaaacataaaagaaataaacggaattctcaggtttctgtgtaagaaaactaaaatatgtggagaatttaagagtttttaaattaattttagtttgaacaaagcttgtgaaaaggattccaaagttaattttcatataatgaacagaataaaataataattttgaaaaaaaaaagataaaagcgagaagaaaagggagaataaccgtatcaatggctaaacaacattataagaatacaatgatgttgttggaacaggaatagacaaacagaatattttaacaaatagactaaatgacccttttctgtatacagaaaaatccatccttccagcacaggcagggagattgggccgggagctcctttcctctactctctggctccaagaagaacttttccatgccctatttgagaaaatgggctgggcacaagccttgaacaatttgctaatcttataatatccaaataaaatatgtttctgtgaggattgacatgtggttacaaaagcatttacttaaaaaaaaaaaaaaaggaagttagatctccatcttacaccatggtcccaaataaattctaaatatattaaacagttaaataaaatattgggccttaataactgtatgaaaaatttattaaatctcttaaaaaagaactttctaggtttaaaattattcatttattcaaaagctattgaaacctcgttttttcagctagtaggtatacagctttaagacaaaagaactacttttcaaagagcttagaatctagctgaaagcacaactcaagtattgacaataacaattgatctttacattaggggaagaacagattgtagtaaggggaaagacaggagccgtaaccacgtaggcaaacacagaggcaagagaaaacatgagctgagaagttcattaatattgaaggttagaggggaagagatgactgacaaaagatgaagctgaagacgaaggccagaactgagtttgaagtgtcttgtaatccatgtggaggaatttatgctctatcctaagagcagtggaatgctattaaagagttttgagtgaatgatgtcacgaatgaattttagaaaattcaattttactgacttataagaaagacgaactggaagtgactataggcctgagagtctggttagggagacacacaaacagaaaattacagaaatgtgtccgaagagggtgagtttaaggtatcaaggaggatgacatacccataggactccactcatttacaagtcagctgaggtctgtaaggagagaaatcagaagaggattggctggagcaagctgagatatttgtagttaggcttagggtcaaattcccagttctagtgtgctctagatggctggaacacatccaagggaagtgtaaagggaagttttcattgtgaagagctaaggactgagccaacatgacaaagaagtagaaggtggaaacccctgggagtcaaagattcatatttggtgtcctggatctaagatttgtctgaagagaccacatgccaagaggaggtgtatataaagactggggagactaacaggaattctgcaattagggttgggtgtgagaagccggaacattctattgcctattacatagtgcattatgggacacatgtattttaataagcattgtcatgattcatttggaaatcgtagcaaagtaagacttttagataaggctcatcaatggaactttatcttctgtctctcatatactgcataatatgccacataatgatgttctggacaacaaaacacagtcacgtgatgtataatgatgttttggtcaacagtggaccacatataaggatggtggtccataggattataatggagccaaaaagttcctatggttaatgatgtcatagctgttataatgtcatggggcaatgcattattcacatgtttgtggtgatgctggtgtaaacaaacctactgcactgccaatcatatggaagtattgcacatacaattaggtacagtgcctaacacttggtattagtaataaatgactatgttgctggtttatgtatttactatactttttaatccttattttagattgtacttctacttattaaagaaaaattactataaaagagcctcaggcaggtccttcaggaggtattccagagaaaggcattattatcataggtgatggcagctccatgcatgtttttgtccctgaaaaccttccaatgggacaagatatgggggtggaaggcagtgatattgattatcctaaccctgtgtaggcctagactaaggtgtgtgtatttgtcttaatattttaacaaaagtttaaaaagtaaaaaaaaataaaaattagaaatagaaaatgtttatagaatatggatatcaagaaaaatatttttgtacagttgacaatgtgtatatgttttaagctgttataagagtcaaaaagttaaaaaacttaaagatgtagaaagttaaaatgttatagtaagttaaggttaatttatttttgaaaaacattttaaaataaattcagtgtagcctacataaagtctgcaatagtgtatcgtaatgcattctaagacttcacattcactcaccacacactcactgacttacccagagcaacttccactgttgccaagttcccttcatggtaggtgcccttgacaagagtaccaatgtttcatttttttaaactatatttttactgcactttttctatatttagatacacaaaaggttaccattgtgttataattgcctattgtattcagtatagtaatacactatacagacttgtagcctaacagcaatagactatagcatatagcctaggtgtgtagtaggttataccatctaggtttgtgtaattacactgtatgatgtttgcgcaacaatgaaattgcctaacaatgcatttctcagaatatatccccatagttaacatatctcctgtgtgtgtatatatatatgtatttatatattttatgtggttggattctatgtaattaaaaataatcccaaaattaaaatttaacacggtatttcttcatattcctcagtcattttaaattgctgcctaatgttcatccagttagcactttatctttttattttggtatcttgatgcacaaaagttttctttttaatttaatgtaaggagatgtgtcaatatattctttatggtttgtgctttttgcatcttttagtattattcatttttctgttctgagacaataaatatatttgacattataattattattatattctaaaagccttgctttttacatgtaagtcattaatctacatatgattgtatttgggatttcattttatgatctctataggtataattagttaggattatataattaatcatttacccattagactggaatgccatgtggatatcaacttttgtctaggcatagctctattttgagctctttattctgttctacttataaccctataacaataccacactctctttataacatatacgtttgccttaatatgtaattgggaagtctttccctattcttcagaattatcctggcctccttgggcctttttctcttctattatatatcaattatagaatcacttcttaaaatacaattaacacagtacttactgtggatcaaagttgaattaaagctgtagattaacttaagcagtgttgacatccatgagtatggtatatgtctgcgtgtatttagcgtgactttatttttatttatttattttttttgagacgaagtctcgctctgtcgcccaggctggactgcagtgggcgatctcggctcactgcaagctctgcctcccgggttcacgccattctcctgcctcagcctcccgtgtagctgggactacaggcgtctgtcactgcgcccggctaattttttgtgtttttagtagagacggggtttcaccgtggtctcgatctcctgacctcgtgatccacccgcctcggcctcccagagtgctgggattacaggcgtgagccaccacgcctggcctagcttgcctttaataaggttttataatgttcttcatgattactaagtaccctagtgtttttgttcctttggtgcaaggaagtattttatttctttcaaatctcattattttttattagtttattggccagtgcagaggaatacaatagataattattttttagtctatatctaggaaattcgtggaatgattttgttaatattatattgtaaattattttgagttttctatttggacaattaaattgattgaaaataataatacctttcttcttttcaaatctttatgtttttaaatttatttgttcttaaaatttctctcttgttagggcctctggtaaaatatttaagaaaagcaatgctagcagcaattttatgtctttcatgatactaaagtcatgattctaattgcctttaatgaataattattaatgattggtttaagttatattaaagaagttcacttttatttgcagtttgctaagtttttatagtggatggatattgaatattaccaaatgactctcttacttcattttagataaacatctttattattattattactattacattattattattattattattgttattatttgagatggagtctcactctgtcgcccaggctggagtgcagtggtgcaatctcagctcactgcaagctccgcctcccgggttcatgccattctcctgactcggcctctggagtagctgggactacaggcgccagccaagacgcccggctaattttttgtatttttagtagagatggggtttcactgtgttagccaggatggtctcgatatcctgacctcgagatccgcccgcctccacctcccgaactgctgggattacaggtgtgagccaccgcgcccggtcaacatctttattattttaatcttttaatgtggtgaatcacatgaatagatttgcaaatattgtcattctaatgttcttacaatatattcgattttgtcctgttgcattttatttttatacattactaacttagtatgacttttggtttatgttctaaaagagtgtatagatgattgagtttatgtgttttttgaacgtctaacacaattttattataaaacttctttagcttggagttttattattaggtagattttaatgaactgatagagtttttctgttttcttttttgagaaagagtctcgctcttgtcccacaggctggaatgcaatggtgtgatctcggctcactataaccttcgcctcctggcttcaagcgattctcctgcctcagcctcctgagtagctgggactacaggctcctaccaccacgcccagctaatttttgtatttttagtagagatggggtttcaccacgttggccaggctagtcttgaactcctgacctcaggtgatctgcctgcctcagcctcccaaagtgctgggattacaagcatgagccaccgcacctggccacgtttttaaaatagtgatgactttattcagattttctatttcttgtgattaaatttgttaaatttgtttagaaaaatgcccatcttgtgatcaaatttgagttcaatttgtttaggaaaattgccataaaattgttcagaatattcacagattatttttgagtatctactataattcttatgttttgtttgtaatgtctaacattccttgtctttgcaaataataaatttgaccttgttaagactctacttaatctttgcatttttatttcaataattgacacatttttactattttatatctattgtgttatttttccctgttgcttgttttctgactttttaaattgtacttgagactaaatttttctccaactatagttgttttatgcaaaagatttttttcttactttgctttttaatttctaattcaattcatattatttatatttttcttaatttttgaaagcaagtggactttttattatattttttattcctgattttattatattttatttagagaatgtgatctatataatgctttctttcatttttaggttaagactttctctatagtcagttttttaaatgttcatgaatcattgacaaaaaaacattttctaattgtcagatgaaggcttctgtatatgtgcattctattagtttgctattttttcctcctttatcagttgcaaaaagatatgtatcgaaggtttgaattaatattgattttccacttttctaattttgcccattcttcctttatatatttctagtctatattaatagctaaataagctaaatataagctgagtagttttactttccattgtagtattttaccattacatagtgattcttttacatgtataatgattttttttggtcttcaaatttcttttttgtctaatattgacataaatctctcttctgtttgtgtgctgggtttattttttccatctttttgctttcttttctttttctttttcttttttttcctttctttcttctttcttttttttttctttcttttttttttttgttgttgttgtctaggttagagtgtaatggtgcaatcttggctcactgcaacctccacctcccgggttcaagcaaatctcctgcctcagcctcccaagtagctgagactacaggtgtgtgccaccacacctggctaatttttgtatttttagtagagatggggtttcaccatgttggccaggctggtctcgaactcctgaccttgggatttgtctgctttggcctctcaaagtgctgagattacaggtgtgagccactgcacccggcccatctttttactttcaaattttgtacaataggttttcattttttaaataaataaagcagggttttgttactgctgtttacattgttttagaaaatttataaatttgttttcaagtgacatttataatgattgcttatatgtgtcattttattttgtgatttctttattctttttcaaaattattttctgccttcatattgattaaccttctctttcaacctccctccatttttagcctttcttttctgttataaacattattttacttactaaactataatgtaacttgcttatttgattcaaatttaaaattaataaatatacttgttatttaaataatataaacccttaagaagttttaaggattacctcctgtttaacttaaatattatatttgtcaaccagtactctagttattttagttcatgctcaacaatgtctatgtattgctttgtttactagtctttccagtgttccattgctagttaagcacccagaattcagagctgtaacacctgattgatattctcaactgtacaatttataagctgtttgtctttgtgcatattttttgtattttttaaaattactttgtttattttaggtttcatttgctctccttcctgtagtttcttcagtttttcagtaatctgagattttaggttattgatttgagagttttcttcttttctaatctaagcactttgaattaggcacgattctccagagaaacaaccaataggacacacacacagagacacacagacacatacatatatattcattatagaaattggctcacatgattgttaaggctgagaagtcccacaacatgctattcacatccacaaactgaagactcaggaaaactagtgtgatttagtccagtctaaaggcctgagaactgtgaaggggagggagagaagcaggaggacagtggtgtaaggtctgtttggagtcaaagggccaaaacctggagcaccaatgtccaaaagcagaagaaaatgaatgtcctggctcaaacacagagaataaattcaccttttctctgactttttcttctatttggggccctcaaaggattggataatgaccactgacattcatgggggccaccatgttttttttttttgagatggaatttcattcttgttgcccaggctggagtgcaatggtgtgatctcggctcaccacaacctccccctcctgggtttaagtgattctcctgcctcagcctcccgagtagctgggattacaggcatgcgcccccatgcccagctaattttgtatttttagtagagacagggtttctcatcttggtcaggctggtctcgaactcctgacctcaggtgatctgcctgcctcggcctcccaaagtgccgggattacaggcgcaagctactgcgccctgcccgagggccaccatcttttactaagcaattcaaatgttactctaatctggaaacaccctcagagacaaacccagaaataatgtttaccagctgtctgggcatcacttagcccagtcaagttgaaacataaattaatctttacacatttaatattatatattttcctctaagcactgctttagctttaacccagaatttaaaaatgttgcattttcatttagttcaaatatttttttttaaataagtcttcctcttttacctacgggttatttcttgttgttgttgatttaatatcccaacataagaggactttttccaggtatctttttattatttctagtttaattttgtcatggtccaaaattatactttatgtgatttttattgctttatatttttcaatgtttattttatgaaccagaatagggttcatcttcttgaatgttccctgtgcacttgaatagaatgtttatgctgccagtattgagtgaaatcttctataaatgtcaactagataaagttgattgattgtgttggtcatctacatccttactgagtttctgtttctcgttctatcagttactgagagatgagtgctgaagaattcaactgttattgtgaatttgcatacttcagatttatgaatttttgcttcatatattttgtagctcttttgttaagtccatatatatttaagattgttatgtcttcttgaagaattgacccctttatcattatataaggtcactattattactcctgacaatattcctttttgttaagtcttttttgtctgaaattgatatagctactccaacttcattttacttaatgattatatgattgtatcatgctgctaataaagacatacccaagactgggtaacgtataaagaaaaggggtttaatggaatcacagttccacatggccagggagacctcacaatcatgagagaaggcaaaggagaagcaaaggcacatcttacgtggtgtcaggcaagagagcatgtgtaagggaactaactcccctttataagaccatcagatatcatgagacttattcactatcacgagaatagcatgggaaagacccaccccatgtatcaattacctcccatcgggtacctcccattacatatgggaattatgggagctatattttaagatgaaattttggtggagacacagccaaactatatcattctgccctggcctctcccaaatctcatatccttacatttcacaaccaatcatgcctttcaaacagtcccccaaagtcttatctcatttcagcattaactcaaaagtccacagtccaaagtctcatcagagacaaggcaagtcccttccacttatgagcctgtaaaatcaaaaacaaattagttacttccaacatacgatgggggtacaggcattgggtaaatacacctgttccaaatgggaaaaattggccaaaataaaggggctacaggccctattcaagttcaaaattcaatggggcagtcaaatcttaaagctccaaagtgatcccctttgactacatgtctcacatccaggtcactcttatacaagaggtgggtttcccatggccttgggcagctccacccctgtggctttgcagggtacagcccccctcctggctgatttcatgggctggagctaagttctgcggcttttccaggtgcacagtgcaagtctaccattctggggtctggaagacggtggccctcttcttacagctctactaggcagtgccccagtagggaccttgtgtgcgggttctgacctcacattctccttccacactaccttagcagaagttctccatgagggttcctcccaggcaccatacctctgcctggacatccaggcatttccatacacccgctgaaatctaggcaggttctaaacctcaattctttttttttttaattattattattatactttaagttttagggtacatgtgcacaatgtgcaggtttgttacatatgtatacttatgccatgttggtgtgctgcacccattaactcgtcatttagcattaggtatatctcctaatgctatccctcccccctccccccaccccacaacagtccccggtgtgtgatgttccccttcctgtgtccgtgtgttctcattgttcagttcccacctatgagtgagaacatgtggtgtttggtttttttgtccttgtgatagtttgctgagaatgatggtttccagcttcatccatgtccctacgaaggacaggaactcatcattttttatggctgcatagtattccatggagaaataggaacacttttacactgttggtgggactgcaaactagttcaaccactgtggaagtcggtgtggcgattcctcagggatctagaactagaaataccatttgacccagccatcccattactgggtatatacccaaaggattataaatcatgctgctataaagacacatgcacacatatgtttattgcggcactaaacctcaattcttgacttctgtgcacctgcaggcccaataccacctgtaagctgccaaagtttgggacttgcacactctgagtcaatggcctgagctctatgttggccacatttagccacagctgggacacagagtaccaagtcccaagactgcacaaagccgcaaggccctggacctggcccatgaaatcttttttttttcctcctagacctcctggcttgtgatgggagggactgccacgaagatctctgatataccccagagacattttccccattgtcttagtgattaacatttggctcctcattactcatgcaaatttctgcagccggcttgaatttctcctcagaaaatgggtttttcttttctgttgcatcttcgtgctgaaaattttctgaacttttatgctctgcttcctctttaaacataagttccaattccaaaccatatctttttgaatacataaaactgaaagcttttagcaatacccaagttacctcttgaacgctttgctgcttagaaatttctcataccaggtgccatagatcatttctctcaagttcaaagttccacagatctctagggcaggggcaaaatgccaccagtctctttgctaaagcctaacaagagtcacctttgctccagttcccaacaagttcctcatctccatctgagaccacctcagcctggacttcattgtccatatcgctattagcattttggtcaaaaccattcaacaagtttctaggaagttccaaactttctcacatcttcctgtcttcttctgagccctccaaactgttccagcctctgcctgtttcccagttcccaagtcagttctacatttcaggtgtctttaaagcagcatcccactcttccagtaccaatttactgtattaacctgttctcatactgctaataaagacatacccgagactgggtaatttataaaagaaaagaggtttaatgggctcacagttccacgtggctgaggaggcctcacattcatggagaatggcaaatgaggagcaaagtcatgtcttacttattcactatcatgagaacagcatgggaaagaccaacccctatgattcaattgcctcccactgggtccctgtcatgacacatgggaattatgggagctacaatttaatatgagatttgggtagggacacagccaaaccatataaatgatacaactttttttcttgtttaaacttttaatctgtttacgtctttgtatttaaagtgtggttttgtaggcagtatataattgtgcatgtgagcgtgtgtgtgtgtgtgtgtgtgtgtttattcaatctcatagtctctgtatttcagctggtgtatttaaaccattgacatttaaactgatgattaacatgttggattgaagttgaccattttgctagttgttttttatttgttccatttgttttctgtttcttttttttctctcttccagccttctctgtgttaaattgaatgtctttcatgatttcattttacttcttttgtttacttatttttttacatctaccttagatattataagtgctttttagttttttgttgaataaatgaattaataagataatttctctataaaccattgtaaaaggtggaaaacacttttacctcaaccatataattgtttgtataactaaaagatatagtaaatagcataataaagaatttaacagtgtcttgaatatagaaagagctcaatagtagttatgatataagaaactttttctttcactattcttattttatttaatattatctgctcttttaatgaaagtcattccaatatgtctatattactttgtaaatttttaaattatgattttactttctttctcgttctttctttttatgtttttttttaaatttttgttctttgagacagggtcttactctgttgctcaggctggagtacagtgaaatgatcttggctcactgcagcctagacctcctgggctcaagcaatattcctacctcatcctcctgagtagctgggactgcaggtggatgccaccatgcctggctaatttttatattttttgtagagacagggttttgccacgatgcccaggctggtctcaaactcccgagctcaaatgatccatgcccctcagtctcccaaagtgctgggattacaagtgtgcaccaccacgcccagcctatgattttactttcacttagtgaattaaattcatgtttctttttttcttctactatctctttttgcttattctggctgccaaatagctcttcttgcttatttttctgacaaaacttatttttctataaaggtagcttactttcacaagtaacctaaaattaatctttttaataaacagattataaatatttttaatattttgatagtatctttaattattgtgtgaatatatttgaagtgaaagtactaatatatgtaatattaatataaaaaatgccaagttttctgcatttgcatttactgttgcccaattcttaattaaagtattatctcaagtggatatattttatacatggatatttttaatggaaaataacaaaagaactattgttaaaacctactcaagtctaaaacaacatgtatttggagattaatcagatcaggtttaaaactgttaaaaagtaacaaatattccttaagttttcccagatagaatgagaagaagacaaataaattcaagtcatcgagcccaagctaaaattccctggttaaaagaagaccagtgaaatatatttttagaggaagactgaagaaagatattttacagtgagacacaagcaaattatttgcttgatagcagctgcacagttttatgtagatagtatgtataaaaatctattgataatattttaatacaaattttacttgcttttcatgtgataagtaggtgaatgatttctttttccaacagtcatttaataatggtggtcattgctttaatttagtgaggattcttactactctttttaggatttggatgtgtgtggatgttctaatagtcctgaattctggttctagcagtttcagccagttgaagctatgatccgagataaatgtgtactgttactacagaaaactaatttgataccatcttttacttgatatatcttgtttccttttgaacttcttcttagactagctggtctttaagtacaatagtttaagagttctgcagttacattaaaaatataatccttatcttttggataaaaaggcttttaacattaagtccattgcatgtctcttttaaagttatagtcactccacatcttacacttttgtatgtctccattccccccacacacagtccttgccttacaatggccctatttaggatttttgggtttattatgatggtgcaaaagcagtacacattcaatacattcagacttaagatggggttactttgaaaacacacttttatacttacgatgttttcaacttatgatgagtttattgggacacgtttcctttgcaagtcaaggaacatttgtactttgttattagaattagctttggaggctataaagctttttcaatgaatgacaaaagctgtattcattagacttctgtgtagaagattctgcccaggaatcacaattgttatgctagtatattagttccttaattaaacaaactttttttatatgcctattactgtctgactgtggagatagtgggattatgatgatctgtaagagccagtgtttatatagcttggaatataccagagtatacttacatgaatattaatgttatgaaagtaataacatgatggattaaatagttctttataattctcaaaaggctcaatcatacattcatgtccatcattacagttttcaaacactgaaacacattatcacaatcccatttgaagtatgttaaatattttgcccaagagcccatgagtggtaaatgcagacatagatctactatattgtaggtcaaattttctcaacctgagcattattaacatttgacttagatcattctttgttgtggacagctcctccatcattttacgatgtttgcagcattcttggcctgtagtcactacatgcagtagcatctttctccctcagttatcacagccaaaaatgtctctagatactgtcaaatgttcctggggagcaggcaaaatcatctgccattggaaaccactgatgtagccgcctgatgatttctctaatatgttacctaaattttggtagagcgatatttcatataagttaatatgaagctggagttatagcatgtctatataatggaaatgctttcactggagtttatttactttaaatagcttgacaaagagatggcatcaaagaaacaaagcctttgcaatcagaaagaccatttttgaggccagacgcggtggttcatgcctgtaatcccagcactttgggaggtctagcagggtggatcacgaggtcaggagatcgagaccagcctagccaaattggtgaatcccatctctactaaaaatacagaaaattagccgagcttggtggcgggcacctgtaatcgcagctacttgggaggctgaggcaggagaattgcttgagcctgggaggtggaggttgcagtgagccgagatcgcgccactgcactccagcctggcaacagagtgagactccgtctgaaaaaaaagaaaaaaaagaaagacaatttttcaatcccagctctatgtaaataatgcaaagaaatagtaatgttctcaaatccacagaataattaattccttctctctaaatcttctcccagatactaattcaacttcttgaatcaattcaatttcacaggctctctaattggcatctaggtctcatgactgcaatgcctcctttttaagaaaatattttaatcttttattttattttctgcatttcccagtcatacacacaaaacactcctagatatataataaactaatgttttcaatattttgaaccctagtgataaacaataaatatagaagagaggtatctatgtgagtcattttagtgtacgttaaatgtatggggaaactggtatgtgtaatagtgctatctaagcatccaggtatgactagtgaaaaatcaaacatttttctaaagtagaaagatgcaatgaattttttaaaaacttctccctactgtataaaatagtattatattttataatactaaatagagtattaaatcacaaaaagaaaaccatgtcattgcagtaacacactgattataactgatgagaaacaaataattttatatacttctatatttttatagaagtattggtaattgtcttatctttatcaaataatattcttagtgtaataatataagaagtataatgaaaatatttactagaagacaccttatatggggtaccttttaattttaattaaaaattaatctgctgtgagattatatctcaaggaagtatgagtatacttatatacttatatagatacagaaaagtgcacagattatccacctatagcttgataacgtttacaactatacacgcctatgtatccacagattaggatttaagcacagagacatgaggatttttaaaagacctatagtggacacacattttacatggtttgacttcttattaatgcagttattaaataaaaatgaatgatgtaaatattatacatagtattttatcaggtaccataagatatatgaataactacgcaaagttataatgtaaagaatttctttgaatttgggaggcatataaatggaaactttagccaacaattcaaaacattctactgttgtgtgcccaagctcatcttccttagaaaggaacaaagactcaagaaatcacatgatcactctgtctgattaaaatggtaatcttgagaaatgtttcatcatttagtattgtatcatgcatagtttcgaaaacctactttatgtatttatgtccatatgttacatatttttattatagtagccattaatttgtgtatcagaattatgacattataaaataagtattttaagaccaatagcctgtatacagtacacagaaatggatgagggaaaagatggagtaagtaaacgtactgaaaggcaatattgcaacaccctacacaggaaatgttttcaccttgaattaggaagacaaggggaatgaatagttagagacaaataagaaaagtgttatttaggatgaatcaacataacttggttattgaattgataaaaagattaaagtagacagaatttgctatgtttgttaagaatataagtgtgcgtatatagtatatgggttatttgaagaataattatgccaaaataaaattagggaaattataaaggcaaacttttacatttgcagcaggtaaatgggttccagtgtgtgtatattaaaacttgtattaacctgtttcataaatatgacagtttgggcacaatgtcagtttttggcagctggttctcattcttcctaaagccccagttctcaaagtgttagagaagataagaggacagatgaggtcatagcagtaaacccacactgggaactaatgagacaaagagttgtcactgtcttggcagttttaaccaatcacactttccaacatcttttctgatttttttcgagacagggtcttgctctgtctcccaggctggagtgcagtggtgtgatcttggcttactgcaacctccgcttcccgattcaagcaattctcctgcctcagcctcctgagtagctgggattacaggcactcgccaccatgcccggctaattttttgtatttttagtggagatggggtttcaccgcgttagccaggatggtctcgatctcttgacctcatgatctggccgcttcggcctcccaaagttctggaattacaggcgtgagccaccgcaaccggcctccattggtttttctaataatatgtcagctttaatgagcaattattaccctgtgaaaaccacctctgggacctgaaaagacatggattgtgctacctgacacctcacctctaagccagctagctccacaggttcacttgtgattttttattaacctcatagtgatgagattgaatattttggtccacacgtacattgttgtggcagagttttaccgtatgtgacacaaaacgcactctaagaaaaaaagggttattcaaccaattaagatataagattatattttgaaatggagcagtctctgtaagaaaaagttgaactcatatttctaaatagtaatggtcattttaaatgcctgagattccaaaggaaaattatagcagcaaactaaagaatgaaccttagagaatgtttgtatttatgaggtggatgaggaaacaaacaaacaaaaaagggagttgtcacaaatgtaaaggatgaatcagaagcatataattttaaataaaaatatttactgcatttggtaagttggagggagatttcaaatgaagctagaaactgaaatgtcaggactcatgtaaatagaaccgatcttcattatttgcagattccatatttatgaattctctacttgctcaaatttatttatttatttatttatttatttatttatttatttatttagagatagggcctcactctgtcacccaggctggagtgcagtgatatgatcatggctcactgaaacctcaatctcccaggctcaatcgatcttctcacctcaacctcccgagtagctgtgaccacaggtgcacatcaccacactgggctaagttctgggtttatagacctgagccactgcacctggcctcaaatttatgtttaacctctaaatcaatacgtggacactttggcattcattcttggacatatacagagtggtggaaatgtttgagtaactcagtgcgcatattcccagttgaagtccaaggcaatgagcaatgctcttccttcttgtttcagttctcatgctgaaagtaagtctccttctccttctcctttctcctttcttcttcttcttctttttttgagacagggtcttgctctattgcccaggctggagtacagtggcaccatcatagctcactgcagccttgacctcccaggattaagcaatccttccacctcaagcctcccaagtagctggaactataagcatgccaccacacaagactaattaaaattttttttttttttttagtagagacagggactcactcttcagttgcccaggttaacaagcattcttttttttttctttgagatggagtctcgttctgtcgcccgggctagagtgcagtggcgtgatctcggctcactgcaagctccgcctcccgggttcacgccattctcctgcctcagcctcccgagtagctgggactacagacgcccgccaccacgcctggataattttttttttctttttgtatttttagcacagacggggtttcaccgttttagacaggagggtcccgatctccagacgtcgtgatcctcccgccttggcctcccaaagtgctgggattacaggcatgagccaccgcacctggcccaacaagcattcttttcacaacatgtttagtgccctgtttgcctcatttttgtgcttattgttggtgtttaaaatggtcctcaagcatattgttgaactactatctagggttcattggagcaaaacggctatgatgtgccttatagagaaaatatgtgacttatagagaaaatatgtgttagataagctttcagatatgagttatggtattgttggatgtgagtttaatgttaatcaacaatatatattaaatcagtgtctttaaatagaaacacacacaaaaggaaggttatatgttgattggttcatgaaaatgtgtgagcaaaggctcgcaggagcatagccctatttctcctaggagcagtggttcagtattcgctaattcaatgttcacaatgactttgtaaaaaaatgattaccatggataatgagaatcggtatacaaacatatatatacacagacatacacacatcctttttgtgtttaagaagttaaagtagaaaattgtagtataccagtattagttacagtctccaagaatacaactataaaaacatatttaagccattagtaaatttcattatattacaatcagaattcaaataattttgtttaatatttgcttctgaaactggtgcaccatttagctgttttgataccataaacaagtaaattttataaatgtagatatatgagatctttcagttattttgattgactcatttataaaatgtatctttgagtgagtctatattaggatttctccttttctgtgtaaattaagtaaaattcgatactttctctgctaactttatttaaacaatgcttcttgagctctctgttatttgataggaatttagtagttcagagaaatcaattgactcttctacttcaattttttgtctttctgaaatcttgaataaaggctttaaacctgatggcaatacctttatctctaaccctgttcatgtgagagtgcataattgtgcattttgcaatttccttgtctcatttgttctctgttgtttatctgcttactcctaaggctgggaaaagtgataatatatgagtggcccatgtagtaggtagaaaatgagggcaagtccatggatatcttatccatgtcttggtactagtggcatgcaataatatgggcctaccaaggctcctagaagattttttaagctttaagttttttttgttagatacactgccaatatatagaagagactataacatcggaaaatatgagtggttagttacattcaggccttgctgtttgcagccttaaacttcatgtaaaacctcaatgaaacatattttctctacttttaagataaaggatttgaacaattgatctaattctctcacagcattactgtgattatcagaggaataaaaggcatttttagtactctatcttttcttctgtaaaatacttcactttctctgtgtttgaaaaatgaggtccctcatagaacaaggtcagtattatgggagaatgagtcatttaattctaagctgtaacatgttacaataatttgtcttaaaatggttcaatgcagatgtcatagaatgagttcagatgggtctgcagaggcaaattcataggaaactttgttacctctctgtttggatttatgaaactggttctctagtttcattgtatagtaatgcccaaaaagtgaaaagcctaaacttctacttttttcatgtttttcttatgtattagtctgttctcacgctgctataaagatactacctgagactgggtaattctgaataaaagaggtttaattgacacagttccgcgtggctggggaggcctcaggaaacttacaatcatggcagaaggcgaagcaggacacctcctgcctggcagcaggagagaaagaagggaaactgccactttaaaaacctcagatctctgccgggcgcggtggctaacgcctgtaatcccagcactttgggaggccgagacggacggttcaagaggtcaggagatcaagaccatcctgcctaacacggtgaaaccccgtctctactaaaaatacaaaaaaaaaaattagctgggagtggtggcgggcgcctgtagtcccagctactctggaggctgaggcaggagaatggcgtgaacccggcaggcggagcttgcagtgagctgagatcgcgccactgcactccagcctgggcaacggagcgaggttctgtctaaaaaaaaaaaacctcagatctcgtgagaattccctcactaccatcagaacagcatgggagaaaccaacctcatgactcagtcacctccctcgacacatgggtattacaattcgagatgagatttgggtggagacccaaagccaaaccatatcatcttagctgtaggcaaaaaaaatgggatatatctttattctttgactttctagaaatgccactatctcaaaaatataagcctaggagacagagggtgaaggtagggtaccattttctatggtagtggggatgagtgatgcttttttaatcctattagtttaatataggaaatggacaatgatcatgtaaatgaaattaattacataactaccaaatgaaccaaaaagaaacagaaaagggttctgtgagagagaactatggggaagattcaccttaaattagatgtgaatttcctttcactaatttctacttgaattatttaggcatactcaggactcctgttgtattttttaagattttgaatttggatcacctttctcatcacaacatttatcttatttttaatttttaaaaatatttaatttttaaacacttaattttgttgtcctctcctccaaacttttatccaaccaccattcacctttctcaagaagaggagctaccaaaataagctggcggtaaggccaggagggtaataacaaagcagaacagagtgcgtgtgcagaggctactgttccctgctctagatgtgaacctggggacttgtgccacagggccctggagcaagaatcagagttccaaccaagatatctggacctgtcccactcatctcaaggatagattgtgccggcctaaatacattatacctggagagctgctggtgttctaggcctccgggaaaatagcagagctgtgatattaagctgagttcccctatccttgatcctcagggcaccagactttgtagttgaaggcatcacaagcagagaggttctacttgtcactttgcaacaaaactggcaattttttagctgttctagcacctgcccacaaggttactgtgccttacactgctgtgtgactccttcatttattatactcaggcaggcagatctggatatgaaggtgaatagatccaccagtaataaaaaaaaaaaaatactacctaaggaaacccagcagccagagaaaggaaatataagtagaacactcaggtaccaaactgacatttaggcagaatttctgcagctggttgatgacaattagaataaaaataataaagatttagggtaactttaggtttaaatcattttctaagactaaaatgtatgattttgagttcaaaaatttagaaggattcagtgagaatatggtccctatggagatctaaattagtggtccagaaggtgcactagaatatgtatctgaacaagagcaaagctgcaaagagatggtaatcataaaggaaagcatacaagacagaagacagtggcaggcattgttcaatgtgcttttttttttttttttttgagacagggtctcactctgtcacccaggctggagtgcagttgtgcgatctcggttcactgcaacctctgcctcctgggttcgagtgattctcccacctcagcctccccagtagctgggactacgggcatgcaccaccacacccagctaattttggtattttttggtagagacagggtttcaccatgttgtgcaggctggtctcgaactcctgacctcaggtgatccatccgccttggcctcccaaggtgctgggattacaggtgtgagccaccatgcccggcctcaatgtgctttttgtttttaacttagttaatcgttacaagaaccctttgacatagaaattctagagaaatataacatttgaataatgaaaaattttgtagtaaaggaataaagaaaaaacaagctataaaaatgtaatagaagaattctctcttgatgaagaaatgttaagtacagatagaaagagctcatcaagttccatgaaggattatgaaaaaataaaattaaaagatgcattcctagacatatggtaaaactcaattccaagtatcaacagtcaaatttagcatttcaatacaagaggttagaattgataaaaattacatttacaaaatatagaggttaaaggactttggcatcttatctttccactatctaagtatttttctctgtggtgcagtatgagtccaacttacctttgtctaggataataaaatatcaaaataattatttggatgaaatatccctttttcacactgaacttaaacacttttatattatacagtcagcccttcatatctatgggtttcataatcacagatttcaccacagactgaagatattttcaaaaataaataaatgaaaaataataaaataatacaaataaataattatgatgactatgtagcatctacattgtattaggtactctaaagataatttcaagtatacaaaaggatgtgcatagattatatgcaaatactatgccattttatacaaaatgagcatctgaggattttggtatccacagggttactgaaactgccccatatggatactaaaagacaactgtattcatttgccatatacaccaaataaattggaatttctcttttatctccggatactatttattcttaaacacaactattctgtttttattataatggctttatattatgtttgcatatcagataagatcatcttcactattctttcatttataacttttggctattttaaaatttttattctttaatatgagtttgaagtcataacatctaaaaacccctctacctcatcaaaaataaataaataaattcttcctgtagctgtctttgtacttggaactgcatatgttattttgagagaagagttatttttataatactagtttttacatataagaaattgaatcttaattattgttttcatttctggctgattattttctaaaatgttattttcatatcattttcgaagatttataccaattattttttctttccctattgtaaatactagaacataaaaaataataatgattaatactggtgacattgcatactcttgtagtagttctagattaagggaaatgatcttaatacatcgccatttagaaatatgttcaatgttgagttttggtatatttttaaaattatatttatgtgggcaccttctattccagtgcttactttttataccacattgaatcatgcttcccaaacattacctcttaaatttacacctagagtggaagtgaatggggtaagagaagaatgttctttgtgctctggaaagtcagcattggtaacatgaggcacatatgcaatcatatacaggagactgtatcaaaaatggaataagattttcttcctatttagactagccccaggctagtaatcctatatgtatattttgcaacttcccactgaaatacccatgactaaactacagtgtaaattatgacaggcattcaagagtcagacagtatcagggctacacctctagctgcaaaccaataaatttgttctgttgcagaagtctaaatgtgtaggataataactctatttctcagtccagcttcatggatcctgtagaaaaacaatggttcagctatttgtctctttatacagatataagtcttcatcattatcatcatgatcattattttatcatgattacttgattataagctccatgagggcagggatttttctctattttttcatgtagaaatacccagtcactagaaaagcatttgacacataaaatgtactcatgtactcagtgtaaatgctatacacttcaaagtttattatttgcatatgtattttattcacactttcagtaagtatttgtggagcatttcctgggtgacatacagtattctaggaactgcagacaaaatagtaaatagaaaatagaaggtctttgccttcatagaacttgcttcttaaagcagtagttctcagattttgctgcacattggaatcacctaaagagtttttaaaacactgataccagcttctacctccagactttctgatttaattcgtgtctgatgcaacttgaaccttgggggttcttcaaaagttctccagataattgtaatgtgcaccagaatttttgaatcattggcctaatatacaagttggcattaaacaattccaggtttcttacttgagagtgataatagattgtgttacaaaagccaccactttacccactgtgtttagttcatattatattcatatgtttactattaatattattttaattatgtcctatattcttgaaccaaaaaaaagttccttatggtatttttgagaaaccaaccaacactattttctaaaaatacatttatcaaaaaggaggtgaaatatttaacatttcagttgagccagttatacacctacctctattaaatggagatgcaaatattgtttacttttatctcaatcaaatatcacattaaaatgttattctccatatgtatctaagaaagctttaaagaggaattttgagcagttcttgactacttgactgaacatataatctattattgtattttatatggagaaactctcttatttatatgtttatttatttatctggtttccagatgctaaagtgtatgttcattatagtacattatagttcattaaaatgttcaagtctaaattgcactcagcatagtgaaactgctgctatttttcttaaacattatacctcttcagaacagatttgcaataggtactggcccaaactgataacttccttcccttcattttgcataatacagcaattttggtttcaaaatgccaccacaatcttaaatattctgactagctttgctgagtttgcagtagcaacaatgataatacccattgtaaaaacgaaatgcagaaatagtgactgtcaaatcctaacatgttccttatatccacacttcagttttcttaccagtataatctacattccagttaataatttaatgctaatcagctccttatcttctgaaaaggagagtctgctttgaatcataaggcagctgaccttgaaggtaggtttaatatatgcagatttcttatatcacctctaagctttttttactcagagcattttcttggttacatttagctcagagctgtgcaatcatcattttgtctatcctaacagtaactgatttaataacgatagtttttactcttccttagttttggactttacatttatttgtataactagttttaaataacgtagtgttttaatgtgcaaataaaataaatataaatagttcaggtaaaccataaatactagaaagaatatagtagcatctttctaaacaaattctgctatttcacaaggtgcttatgtatttctgtcaactttctttagattttactgtcaaatggcattttttagtagtgatgtgataaagatttaaaattggttccttggactacattttgtgaattgaaattcaacatgaattgagaaatgagctatagaattttattatatataaaactgtaagcaaagctgtattattataataaaactatgtaagcaaagctatagaagttcagtttaaatttttaaaattttcaacaaatcgaggacaggaacatgtttcaaaaataatatcaaaattagaatttttacatgttataataacttcggtttaaatgtgttaatgagttaatgcgattgcatagatctaaactgaacaacaaaggaaagagataagaaaaaataatttttgtttatctaaaaattacacataatctgggctttaggaaaaaaatgtataaagctctttggaaatagaatcccatcataagaggcaatttcaaacttctttgtatatacatggtagtgacttgccttaaatattaaaatacccatctttgtttgttgtaatttgtgaatttacttgttttcccccatcaaaattaggaagaagaaaatacaagatttctatttcaaaagaggaagaatggttagattaggacagtggcagcaaggaaatatgatttttttttttaattgagatcctttttgagaaacaaaaggtggctttactttgaattaaaaagtcatttatgttgggtagagttcttcacttaatggtttcctgcttacactgaaaaatacactgggttgatttagattgttattcttcttcatttagcttttagtgatctcatttgtgtaatcttcatacttgaaaagtagaatatgaaaacaacaagaactatagatgtgctttggagattgatatgtagtgcttttgctagtgaaaaataatctcaaagaaataagtttaaaaaacaaattttcttaactctattttacaataaaatgtttttatattgttattagcattccaaattattttcatgaaaattattttatggaaataacccttattttattagcttgctttctattttaaatcacgctgtgtaagaatgattaaatcaaatataaagtatggaacaatttaaatgacttaatggtcttccagataagatagaaatgtttctgctattatcttgaagaatcaatagtggattgggttgtcttctttaaacatcatgctgttttcactgcttgttatgttgctctaaagaaatttaaatatttcacatgccagttgcttgggagaaacatttttcaagacaattagttgtgctatttaaaattaaccttttatctacaaataatgttgtcattctctctggagtgtttgacctaactagagctaagatggcacatcttagcctacaaaacatgagatttcactaagtaaaagtaatgttttgctcagtttagagaacagatactggaaagcaatgttaagagagattttcagtagttcatagttcatcatatatttatattttttgatacagattaaatttatatatctttagaaaatgtgtgctacttattataaattactgttttatgtattgctatgtataaatgatgtgcttcccaatttaacctttagaagtaaacttaaaagcactcataaatttctgttgaatgtagggtttaataacataggtcttatttatttaaggataattttcttctactatcacttaggcataaaattaatatagttttatttttaactacttaagttcttaatctaatgtagccttaatgaatttacccatgtaaagtacttgatgaagccatcatgaaaggctgcttggctaatatccatcagtccccttgctgaaaataactgaattttaatgtgaatatatataaaaaaaaccggtaactgtttcatgtatctaaggtttatgcaacttaatttaataatttcattttttaattgtgccatagacatgtttattgagttataaaaacaccacaatcacgaatgaatgggaaacacaaagaattagtattaagagtatgctgtttgttttgattatgatgcataactaaaaacctaaaattaactgtaacttaaattgtttctctgtggctttttttttctttctcatccaccctcttcattctcccttctcctctttaaataaataaaaatattctgaatgtagcttaactagttttagaagtagagaggaagattggttataaagaggaatgtaaattaatttataaacacaagttatctcaagttaaaatcaatataagagagcctgtaatctccatgtagccaaaacctgggattaactaaagtactcaatttcctttgtagatcatactaattagttttcagggtaggcacatcttaccaattttatgcacttatcaagagtcatttggatttgttacctagtgtatgactgccatttgttcttgttatttcatttcacaatttcgttaaaaattgtgctatctaatgcaacatgagcattaaaaggcttttattttattttatttttttgaaacaaactctcactctgtcctcctggctggactgcagtggcatgatcttggctcactgcaacctccaccttccaggttcaaatgattctcctgcctcagcctcctgagtagttgggattataagcgcatgccaccacgcctgtctagtttttttgtatttttagtagagatagcgttttgccatgttgctgtggctggtctcaaactcctgggctcaagcaatctacttgccttggcctaccaaagtgctgggattacaggcgtgagctaccgtgcctggctaaaagactttttttttcctccactataaaaaccaagggaaatactgtggaagtagataaaagcaaatcgactaaagtttagacaatattttgaaaaactaaaattctagaagggttctagaatttttgctttggattgccttatgggttgctttaacttttttctccattaaaaaataaaaaactagaaatcaaaggcaatgtatgagacttatgaaaaaaaatttagtaaagaaccccaatcagtgcattcttactcaatgaaaaggtcttggttttacaaacagtagcatccatatccccctatgtaaaataagatgaagtaaagatatatctttttatgactttctgttttaattattttatttgcttaatcagttgggtaaattatgagtcctagaatttaagaaaagagggcttccactgtactttgtactctccttcagagaaaagctaaagaaaccgcttcttttgctaggctgaggctgactgaattccgtgggtgtttctacatctgaatatcattacaaagactacccacttgaggagatatgcttgctattcaaatctaccatatcttctggaaattcttgagttcttactctatgaaatgaagaaaataacataaactaacatgcatggggcacaggtttcttcttgaatgccaactctgattagttgctaattgctacttgaagatctgtgcttagatccatctgtagcccctttcaccttagagtcaaatgcctggatccggtactgtcacccgcgggaacagactagggtagaaggataaaactatgacagcattgttctcctgagctacagccacatttcttttagtgttttccagatgtataaatgagcttttcctatctttttcttttttactttttcttctgttgggacactcccgtcagtgacatccctctgtattggttagttatttcatagattagaaagtttgtgggctctgcacaattcatccctttggttcctatagaaaagaaatgtttgttaactcatttaaaataaggactacttcacgcaaataaaaaccacttctgtctacttctctaaaaactgaataacctatgtctagtcttcattaaagaaagccaaaaaagaaagtttattccaacatattatcttcacaattaagagtatacagaatatgagggcaagaggactattccaatgatcactgtttgatttagtgaatctggctgctaaattgactctaagctattttctttacagtttgtcacatggtttagagtactttaagaggccagccttcccgggtgaaaagtacaatagtttctaagacagagtattcataaggtttgtggtgttaagaaatattacttttctgcaatctttaacaaatgtggaaaaggacattctgaatttataatgtaaatggggctggaattctttcttggaaaatagaatcaataaacatattttcagaagtaaaatatattgattgagaactattgtctaaatattccccaaaccctagatgttccttgtcaaatatacacacagaagatgtactgtgctatatagatgaggattgatgataggaatatgtagatctacacgttagggataattttatttcagtttaatgacatcagaattcaaaagaaatgaaacattatacatgtaacaattattgaaatgcctcccatgtactagcagctgtactggttctgcccttgggaagtttattagcatagctgggacacaggcctataaatagataattaaagagaatattgttaaaggccatattagggttacgcctagggggctgtcaggatatgtcataactccccacatttcaaattacaaaatttgctttactccaaaataaaggtagctttattgtacatttaagaaaacttgaaattgtaaagtgtttatgtgaaatgttaacttacagacttgatttaccaaatttatagcagtaaagtaagtcccatttttcagaatatgaggtatgtgatttcagctccttaaatgggatacctcacattattattacagtttaaaacctatgagattttcttttctatttttaatccttctcttaatgatctcatttattgtctactggaaatcaatttaggaaatcatgttagtccactaagcacttcagataaggctattccatgaagcattccaagattatcacaaggaattgctttcatatgccataaaagaagaaataagcagaatatggcctgctgaagaaggttacagttttacagcccctcccattgcagctcttaagtcactcagttacagttaactttggattagcactcacagattgaaagcaaaacacatcaaaacactcatcacgcactctgggcttgtggtgccacttgtatgtgtgtttctaaatcaatgatgagggtatcagaaccaatactggacatggacatggcaaattacagtgaagttttggacccaacttacacaactttggagtttgaaactatgcagattctatataattcaaatggtgagttatcatctgtttatagatgtaaagaaaagtaagtataattggagaaggtggaagactgagcttccaaaggtggtggctcaatgttttttttgctggagaatttagggcttgcttttaaggccacagatctgagcttttgcacttcattacaaaatttaagttaataatgctgtggctattttgtgttagaggtagaaaaagcctggttttgtgtaataaagtaatgtcagaattctgtcatgggccagttagacaggtaaaaagagtagtctcagctgttattttatttgctgtaaatcatagtaatatgtcatattggcagattggctgtgaaagtatattttctaagcaatatttaaaatgacttatggaacaaagtttccatagaacattagggagtttcactgattgtctacccttttccttataattccagttctcaattgctagtgatgagaaactacatttaaaattactatcaggtttttgcattgaacgcaaatatgaaagggaataaggcttgtattataacctcacctgacaggctaatgtttagccgcacaaagctgttggtatttaattactgtaacattttaactttaaataagacatgagttttttaggggtagtgtctttatgtaatacagcttactattgactttgaatttagacttaatacccggtaaaaaaaatcttgtttaaaatatgttataactgttagaactcctaagatcgagtaattatgtatactttggaaaatgtgtatgtgtgtgtgtgtgtgtgtgtgtgtgtgtgtgttgtttaatgcaagattgagaatatatcttgtactgaggatatcttactattctactgtattgtataatttgtatgactggtgttctggttctatttttaataagcagttccttattagtggggattttaaaaaatagtcaaaaggtgaattctgaaaatttagcacaactatagttaaaataaacctgtagtgcaactttcaggaaatcactgttttgtgtccttatgtttagacttgactagagatatttaatagagtatttcatcagaatcctgaatttaaaaaacactcatgattaagaaatggtagggacatatttgccataatcataacacttatttactataagtgtttaacaaatgtactgaaataacgaatttgtatggctatatccaaagtatggtgtaacttgtttgtttgtaataatgttgtcagcaatatgtaagtatggcactaaacttgaagcaagagttgaatttttcatatttctatatagtctctcagaatacaatcaattccaaacagttctaactttcatattgtcaatatctgttttgttaatgttaccagaagaaaaatgtttagcattttaatcctatgtcacatgactaaccctaagcatattctcattaaaatttttttctacttcatgaaattatatatgacaatatttgtctactcagaaatattagtaagtagaatatatgtaagttacaaaatataatcaggacatgacaacctttagtattatccttttgttagctatacaataatcagttgttaatatacaattttataatgaagttttattacatatatttaatatcttttgaatgcatatagatttttcaagatgtaatccacaatattaactcatttaagaaatattcattttattataaatatctacatttaaaaaataattattccttcagaattatgtattagatgacccactgtatcctgggcataatcctaaaagctggaaaacagaggactaaataagacagataaattctctaccaacatggggcttatattctgtgtgtaaagatgggtaataaatgagcagaccaatgcagaatatacttttcactaataaagttatataaaaaactaaggccatttaaaaagctaaggccaggtgtggtggctcacacctatagtcccagcactttgggaggctaaggcaggaggatcgcttgagcccaagagtttaagaccaacctgggcaacatagtgagaccttgtctctacaataaaaaaaaataaaaactagctggatgtggtgatgtactcctgtagccccaactactcgggaggctgaggtgggaggattgcttgagctcaggaggtccaggttgcagtgagctaggactgcaccactgcagtccagcctgggtgacaaagcaagtccctgactcaaaaaataataataatacttaaaataagcaggggtctaggttctacttgaaggacagatgggaggtgacatttttaaatgtgtgttcagagaaggtttcacacaaaatgtgagactttaacagaaacctggtagctagctcaaagaaacgtttagggaggaactttctttccagacagaaggaacagcaggtgaacaagttctgagatgagagtagccttcaatgacgacgaaaaaaaaaaaaaaaaaaaagacggtattgctggagaatagtgaactgaatgaaaagtggtaccagatactgggatcagagatttcggggagttttacgggggtttgacatgcagggtttacaggctgtgggaagatgcctagacattattctgtatctggttacgacagggttggatgcagagggtgacatgatatgaattactacagcaatatcacttaggtggctttgaggtaacaaacagtagggcagcaagaatggaaggaaagaacttagatagcaggctgttgccataatctagaggaaagatgatggttgattgaataaggatgtccatagtgaaaagttgtgaattaaatatgtatttcaggccaggcgcagtggctcacgcctataatttcagcactttgggattataggtgggcagaccgcctgctgaggtgggcagaccgcctgaggtcaggggttcaagaacagcctggccaacatggtgaaaccccgtctctactaaaaatacaaaaataagcctggcatggtgacacacgtctgtaatctcagctactcaggaggctgaggcatgggaatcacttgaacctgggaggcagaggttgcagtgagccgagatcgcaccactacactctagcctgagcaacagggggaactcaggctcaaaaaattaagtaaataaataaataaaaagtattgtaaacatggacttaccaagggattggttataaaagataaaggagagaatacaataaagactcacagattattggccctgggaaactggatggatccattgactgatacaggggagactgaaggaaggaagaacaagttctaggggaaaaatgaaagacttttgtttttgatatgttaatttacaattctgattagatttcacaatgaagttcttcaataggtgcttgggcatttcatgttgatgcccatgggagacatcggggctagagataaaatattggaattattcatcctacagctaatatttattgtcatggaactgataaacttcccttgggaaagagcatagttggagaactaagccctatggtgtcccaaagttaaatgttcagaaataagaaaggagagcttagaacggaagcagccagccaggggttaaaaggaaagcaccagtgtggggtctccaagaagccaatgaatggagtgttatgagcctataaataattagtaggacaatttagtcaggaaatagtactaactctaactgtaatcttccttttttattgacagatagttctgccccagagacaagtatgaataccacagacaacggtgtcaactgtctgtgtgctatctgtggggacagagcaacaggaaaacactatggggcatccagctgtgatgggtgcaagggtttcttcagacgcagcattcgtaagagtcacgtttattcttgcaggtactttaaatgcccttttaggcaagttatctttacagatgtttcagtttggcacgcaaaaagtaagagaagaaaattcagagttttcgtatatctgtaagtctataaatacaatctctaaactgcggtacaagtaagaacgtgtgggtatgtacacaggatgtattcacataggtgttcttttttatgaaacattttagacttacagaaggtatataaaaaatccacctacctaccacccagcttagaccaatatagttgaagcctttaatggacacctcctctgtcactttttctccctcgtctcctagaggtaactaccattgccatttcatgttatcttttccttgtgtttctttattattttaccacatgttcatatacctctaaacattttaaaatctgcatttaaaaggttttttaatatgagtatttttcttcatgtttattttttaagtgccattacatcctaggtctaaaaacaaaattatgaaagtgcagatgattttggtagtttgttgatatcaatgagtgaaatttaattttcagtcctaaaatttagaatgtatttctcatgccatattttttgtcattaaatttaaatgttttgtcagaagcttatttaactatattatatttgtcacgcatttccagtaggctgttttcttgggtttttttttttgattaatacctagtcaacatcataacacgatttaagtatacatattgcatcttgattcatctgtatgactgtccttgaatgcagattacatttagattgaatataggctattaacaaaaatggttaaatttaacataaaaataactatgttggttctgtcaataaaaggtacgtgtagaattatgttcttttaagaacagattggacatttgggaagaggttaactttctcaaagtcttgccatgtgatttcctagggtgcaatacaagttaatatataactccccaaatatctgtctagttctctggtaattctttagtaatttttccaagatagtttgaagcaggttaagagaaatataaattgcccactttaaaaactttctaggtaaacaaaaaaaagtgtatttagataagttttgcctttatttacattaaaactctaaaggtaaaaggtagatcaatgtccttcattccctcatcaaaaatagttttgtatgaatgtttctaaactaaaacaaatacagaataacctgtaaaccataccttctggagtcaggtgctctgttaaaattgaatgtgtgtgtgtgtgtgtgtgtgtgtgtgtgtgtaaaatgatgatccaaacaactaaatcctacaacttgtgagaatcagagaatcacaaaggctatgaggacttctgtcctttctttatgggaagagtggaaaagggatgctctcagagcagcttttagaggtttaaaaaatattctaacaacagatagagtttaactcctgcaccttcctattaagaatgctactgccaacctagctttctttacatattttagtattcagcaaatgttatgatttttcatttggaaaatggttagtatattgatggaagtttaagggcatggagactttttgaagctcaggttgtgctggtctcaaatgtatctatttccttagattacaaagttccatttctactgtaactgctccatcaaactgaggttgggatttccttcaaaagcacttttaattgctgtttcaatacttttcatgttatgtttttcacattatgtacaatttgtatgtgtactctattagattataatttccttgagtggaggaaacaagtagcattaatctgtttaatccctacaccaggatcttgtatgttgtaggtgcttaataatatgtgtattcaatttttgttattaatttaatgttaattgaatgcattctccttgtgtttttgtcaatctggtcctctctcctgagtctcatcagccatttgttcccaaatgggcaatgccttgttctcactctgaaagcacatttctcttccagctcaatttgttgatgataggctttgcttctcattcaattttaagtggacaccgatagtttttagaagaagtacattttataggtcacaaaatatatgtctttattcttatcattaatcatcaactataaataaacaggtacatatcaatatgtatggataatttttgccagaattttgaagaaatgttagcgtttactgtatgcttaatatttgcccccaactatttgaagtgcattcacacaacaaccttttgtgcaagtccttctctttattttacaattgtaaattaatgttacttaacacccccaagttctgctgagagtcaatggtggaatcaagcttagatttaatttcagagactgtactcttttttatgtgtttgtttgtttgtttggttaagtatacaagtcagttttttagtgtatccacagagtggtgcaacaatcactacagtcaaatttgaccattttcatcaccttataaagaaacctttagtagttactcccccatttcctcccaactccctccccaacaatatgaggcaactatgaatctattttctgtttctacagatttgccttttcaggacattttgtataaacaaaatcatacgatatatgatctcttgtgacttacttcttttgtttagaatagaataggctgccaaggtttatccctgttatagcatttatcagtacttcattcttatttactgacaaataataatattccactgtgcagtcatgccacattttgtttttctattatcagttgataggcatttggatatatctccacttttgggctatgatgaataatgctgctgtgtacatttatgaagaagtttttatgtgtacatatgtttcatttctctgcatacagacctagcatggcatcgctgggttatactataactttatgtttagctttttaagacagtgctaaactgtcttccaaagcagctgcatcatttaacattttaaccagcagtgtatgagggctccaatttttccacatcctcaccaacatttgttttttctttattttgtttacctgtgtgtaaagtcttaccccatgatgccaactgtactctcaatgttgtcctcaatgacctcttaatagataatttgccatttagggtaaacttcagtgggctgtggggtacacttaaaattaatagaagaatatttgaaaagagaaaagcatgaaaatacagggccatgaagttctgacaatagcctccttcatactgaaatcatttagcaataagcaacaaaaacttgaatgccaaagatattcaaaactaggtttggctttcatgactcatgataaaagtggttatgcacagcagccaaaatgaagatagtcattcagttttattttactataaagactaagtgagaggtgaggctcgcgttttcacgcacatgctgattgagagactggaaaggtcatagctgattgttcctataccttctttttatcgaaccaaatttgacaatacatatttaaaatccatttgtctgtttatttgcttcttttgtaaattatagttttctgcaaactgatatatctttatgttataggttcagtcggcaatgtgttgttgacaaggacaaaaggaatcaatgtagatattgtcgattaagaaagtgttttagagcgggaatgaaaaaagaaggtaataataatgatgatgataattaacattattgatgaaaagtgataaacatacacacacattctcattgattagtataactttttacatgagttctaattttcctcaatataataaggaggaatctatgattcctcaagttaaagaatttagcccaaggacatccagttattgagtggtatagccagtatttatctggtgactacctgattatggatatcattctctccaccattacattgtccaaggcaacaaaattattgactaaatggtataccaatattctgttagtgggttgaaattacagatttttttttttttttttgagatggagtctcgctctgtcaaccaggctggagtgcagagtggcatgatcatggctcactgcaacctaccaggttcaagcaattctcctgcctcagcctctccagtagctgggactacaggtgcgcatcatcacgcctggctaatttttgtatttttagtagaaccagagtttcaccatgttagccaggctggtcttgaactcctgacctcaagtaatccacccctctcagcctcccaaagggctgggattacaggcttgagccaccacacctgacacaaatgtattttttgttgttgttgttctcaataacaactgaatatcttttttcttttgatgaacattgaatgaacatctacttttcatgcattcatttatttactaaatacttgttgaacactgcaattttccaaacactgttctaggtgctaaagcttcaatagtgaacatagcagacaaaataatcttccctttcaggaagcttgtattatatcgagggaccgagacaagagactagatgtgctattttagtgtgtactaatttcatcttgaatatattaagtaatctgattatattctcctacattttaaatatgattaatttagaaacaaatgtattgaacacattgtaaacatgtgacagtgtgtaacagctacaaaattttatacttgtcagttttgctgtttggtcatgcctatcatatacaaagagatgtttttcacaactatttcacaaactaaaataatcaaatgaaaccactatactaaagaagtgtaaaatatatgaagcccatctttaacatagttagatttttctttgccattcaatattttaaggatacagaaataccattagttttgctcaggttggtagtgtcgaagacaacaaaaaataaagttcacaaaattaaaggagaagcactttctcatttaaaaagtgatttatttctaatttcataggaagctctatttggcagtttatgggactaattacacacttggtcaattgccttcctccatttttacttgaactccatgtttatccccacaaaagtgtaagcaaataacaatcctatgtttcctttatgagttttacaatttgtgaaatacaattatgttttaaaataggtaaattttatcttttgttcataaaagaatgtgttattttcttaaataaactggaaagtaatttcaagttttaaagttgatatatttctcttttttacactaacagcatagtagcaagattaattagatggaaacaaatagaagcatagttttatgtcaaaaatgatagcactgagattataaatgtttacaatatcttttagcatttttctaaagaataatcatgtaagtgaaattcataaacgcttagctaacatcttaattttttatctctgcatatgcatttccaaataagtcagtttaggttaaaaatcaataacaatttctgtaaaacaaaaagagcaagctaccagtaagtatgattttaaaataaaatattactgattcactccaacttacaaaaactcactctttctttttttttttttccacaaagaagtttctcagaatgcttctgggtagttgtttttttttaattattattattattatactttaagttttagggtacatgtgcacaacatgcaggctagttacatatgtatacatgtgccatgctggtgtgctgcacccattaactcatcatttagcattaggtatatctcctaatgctatccctcccctctccccctaccccacaacagtccccagagtgtgatgttccccttcctatgtccatgtgttctcattgttcaattcccatctatgagtgagaacatgtgatgtttggttttttgtccttgtgatagtttactgagaatgatgatttccaatttcatccatgtccctacaaaggacatgaactcatcattttttatggctgcatagtattccatggtgtatatgtgccacatttactatgacaaacccacagacaactcactctttcttaaaagcaaaaagtcctgtaattcctcctttaacttaatggagtggatatttaatagtaagttttaggtctctagaaattggtggatttctttaacaaaagcatacttgcagaaaaaaaatgatattttaatgccttattgctccagcagaacaaattacagccttaaccgaaataatttaggggctacattccttgtttcccttctctttggttaatgaaagataatttcacctctaaagttttgaaattcaactttgatatctattttattctctctctctctctttttttttaattttattttgagatggagtctcactctgtcactcaggctggtgtgcagtggtgcgatcttggctcactctgaccttcgcctcttgggttcaagtgattctcctgcctcagcctcccaagtagctgggactacaagcgtgtgccaccacgcctggctaatttttgtatttttagtagagacgaggtttcaccatgttggccaggttggtctcgtacttttgacctcagcctcgcaaagtgctgggattacagacttgaaccacacttggcctgattttattctctctctggtaaacatgtgagttaatattttccctgtcactcttccttatatttaaaaatgcagttttcagtaagggatttggggaattacattactcttttttttttttaaccctgaagtaaagaagcagatctagctttctcttagaaacctgtataatatataggatttcttcatctttccaaaatgctgatattcaaacctcaattttctcaggagagactgctccatggtacatcttttgctttattaatgttggtaaactgtcccatggacagtgttttataagagatcataatattgcaatcctaaaatcatcataactaagtttactttccatttttgctcgtgttttatagagaaaagaaaatggaagtttcaaaatctatgactcatattttctgatagtgaatacactcttatctttgacctggtcaatcttataggcaatgctcttcctctagttatcttatagttttattaactttgagagaatagaaaaccaccctattaaaaatacagcgtggcggaactggctgacccaacactttctaacacgcatgctgtcatgaagtctcaaacagcattgttttatgagctctagtgacaaacctgactattgctatttttgaaagtagtggagaatgaaaatatctttcttccaaggtcttttagaaagactttttctcactttttttacttaaaaaaaaaactccttaaaatctatattctaacatacactaaagagaagtgctcaataaatactgtgttttttccccctagctgtacaaaatgaacgtgacagaataagcaccagaagaagcacatttgatggcagcaacatcccctccattaacacactggcacaagctgaagttcggtctcgccaggtacctgtggcacggcagcatcaaaccctatttaataaaatcaaatgtccatgtaggcatcatgctaaaataatctaagttttttcaaaggtgctcattactaaaataagttacatctacacacaattaagagttttactttgaaagtttgagtgggactgctgacttaattttgactgttcttgaacaagactagttttaaatggaaaaataaaacaaatttcagtctaagattgttttttaaaaagtttgcttataagtttgattaaaaataatgaatagcacaaagctctgtaggcagtattttattttattgatggaatctgtacaaccagctaccacaacttttggggagtttggttgatatttgttatcagagcttctttccttgaaaatgacttctggatctttgggaactgctttggaagcagacatttaaatgaagagtcagaattcagaaaacacagaagagagaaaactttattattttaaatttctcaaataacagttctacagttaaaaaaataagtcattagttatatacataaaaataaattatttagtgttgtataaagaaatccttaaatcaaacttactttagcattgcccttattagaaatgttaatattatttttctattataaagcagattataaaattgccaagtagttaatcaggtcctataatgagtcagtgcaactactttcatttttgataacacaagggtaatatgatgaggttaacatcaccgttatcattattacttgaagattgcttgatgggcaataaagcttttagagaatgacctaaaggggagctatgagaaaatattcaaatacagataaagatacactcacacgcatgttcaaaaataagtttataaaaacttttagactgtgttttctttcagcagaaaagctttattacttatatttttatatagtctaaaattacaaatttacaaatttacaaatcttacaaatttattatatgttaagctcttcaacattgctgagtcacacattggttttttaatttaattttgatgggcttccttttaatgcagcgagacaaatagttcttgcttcttgtctccccaactgggtaaactttatgaaaacattttcttcataaacttccacaaattaaagaaaatatcacctttaattcaaaataaaatcaaagagcatattacatatggatactatctatctatttttatagccattttgaattgtgaaattcctcaaaagttggggtaaaacttagtgtacagatttgaccactaacataagatactgttcccagaggatggtgctatatatatgaaatgtttttaaattaacttgtaaacttataggtattttatttttcaatttaaatcagtatttcatttttcaatttaaaatgtttagtatttgtcaagatactgtaacaacaatagtgcctacttctatggcctttacttatcatagtcaaaagaaaaaaaggggaatgttggccatctattattttaaatgataatataatgcttttcttaatactagatctcagtctcaagccctgggtcaagcactgacataaacgttaagaaaattgcaagtattggtgatgtctgtgaatctatgaaacagcagctcttagtcttggtggaatgggctaaatatattcctgccttctgtgaattaccattggatgatcaggtacacatttaaaactttataaatgctttaaaaatgcttcttgaactttgctaagtttatgttctttccatattatttgtaatgcatatgctatattactgtatttggcaaaagataaattaggaggaaggattgggtttccttacccattcaccttgttctatcaagaggcacaactgtttgacttctattttaggggtgtagcaaatttattgattggacaagaactgaacaaaacactcctctgcccttttggaattttaaaagggtcatgtgagggagaaaggtagatagcatgtaactatcattgtgagacaaagtattagaagagtgaatgtctgtgaagcaaatggtggatgttgtgtattggcgtttactgaagctgctatataaaactcctcagaaataccaggtcactcctagacagaaaccacacaggttgtggtgttgtcttggtgggtacttcatgcaattaacgtaaagttttacctttcatgctgtcaattttattctagaatttattgtataaaagttacatgtctggcaaaaagaaaaacatctgtagaaacatgatcagaaatttatagagaaataaaatttacacaacaaaagatagagtgatcttttactaatacttctattttcatattttgtcatatgcccattaggatattttaataaatacttaggaacttgaatttcctaattgtactataaagataagtattttggtttcagattcattttgaaccgttcttactaagtagggtataattttttgtagatgaaaataattggaaaaattccctttctctcaccttaaattaaccatggtaagtgttataaccagtgtatatttatttttaagagagcgtttcacctggtgacaggaaaaaaaaatacagtgaaatctgaaataattcttaaaatgctctgtaactgccttcctggtgtgagtcacgaatattgacataccataaagatagcatggctcagaaggttatgccagtgaataacgctaaattgctaaaacctaccagtctcaccccaagcaatataagtagggttacgttatttatcagttttatatttttattatcattcttctttagaagttgctgacttatatattcagtgatttaaaaattgggaaattaaaatccagtaaccagtgaaaaacagttttaatttgccaactgattctttaatattaacagtataacatttattaattagccacaaattagtaaatgtctgttatgaataaggcatgggaaattagctttcagttgcactataaattacatcatttcatttaattctctcaggagctcggtgacaggtgttattatctccattttacagtttctaaaactgaaccctagatcagtaaaattcattcaataaattcatcaaatgaatatttattaggagattactgttcagttttaggaactgtgggtatttagcagtaaaaatacagatttcttcactattctcataaatgtacactctatttgagaaaggtggataacttaaaaaatgcaaaaattatgagaaagttcattccaagtggagataagctctataaaatgctataaaatggaataggatgagttgttggagaatggggataaaatgagaagagatactttaaactgaggaccagagaagttattgcctgagaccctgaaagacaaggggccaagcccaggagaatctgagaagaaagcactccagatacaggaacagcatgtccaaggttctgagtcaggcagcaacaatgtgaacaaggggtgttgcaagatgaagtcagagacatgagggctgggaggcaaagcactgacccctctcacgcctcccatcacctgtgaggccatgtttgacgagtttggatttcagtctagggacaataagaaaccattcaaagagttttcagcctggactagggtggtagcaatggagatgaaaagaagtggatcactttggcttgtattttgagaagcagcactagaatttactgcagagttagagaggactcaaaatagtctcttgttttgatgtgaacaagcactttggattacggtgtcatttactagatgaagataatggggaagtgttacattggtaggtgttaaatttgtaatgcttcctatacttcctagtggtgatgcccagcaggtaattgagtgtacgaatgaagctcagttgagagcttactgagaagaataatctagaaagcggcagaacccagacctcccatcttttccttacaagaagtctttgctttgcttttgtttatttagtttattacgtgcaggagattatgttttatatatgttttatcgtttagtactcatgagtacatgatgagattttttttatctctactcccattttgtagatgaaaacaaatgagtaagttcaaacgtactggttaacttacacaaggttaaacaggtagtaagtggccgtgctgggatttgaactctggtctgattctgtttcccttgcaaacagttaacttgtctgctttttttttttttctttctgctgccattgtattgatttgctagatagttttaaaatttttgaaaagtaagttctattgacatgctatgatagaaaactggaaggcttaatgatggcatgtatctatgaatactatagtttgttaaacaaaaagtcccaggcttaaagaacactgtaagttaacaagactcatgtcatcttttaatcattatatattataattaattgttaaactgagaatttttcattaaggtggcactgttgagagctcacgcaggggagcacttactgcttggagctacaaagagatccatgatatataaagatattttgcttttgggtaagttttttttttaatttaagaagaaattatgcatattttattcttgcaatattatacagggtctgttctgtatgtaccaagtatttacagacactggcaaatggtgctgtcacttcacaggtttaatttaattgtgtcctcacttggccttatttttccttgccttgactgtatgtaagttcagagtccatgagacaatcagggagcattaagatttaaaaataaaaaagagatgttgctcaataaacataatattgaggtatgttcaaattatatcagaatgaataattagtaaattatatggctgccttatggagtctcaatgtgttttcatatttcctcagagtctgctttttattttacacactttaaaaaaacatgtttacgtcctatgatcttattgcccatgatagcccacgatatgctacaaaatgatcaagtaaaaaagtattggtggtaatgactgaacaatttcgatagacaggaatgctagaagaggctaaggaaggataataggtgtggggtggtggggtagagaagacataaagaaaagacatttgtcttcattaattgctccaatcccgctaccttacttaacttaaacagttaggttttgagggttgagatccttctgacacttactagctctacctctctctggcatgtgtgaaaatatgactagattattttatttttgtgctagatgttttagccccaaatacaaataaattgaagacaatataacaatatttaatattattgcaggtttactatgtaaatgcactggtctaagtacattacatgtatatgtatatatattctctcatttaatccttgaaatagccctaagggattagtactactattttcagcccattttgcaggtgaagaaatggagacagagaaagtttaccaaaggtcacaaagctagaaaataatatagccaagattctaaaccacataatgtgattgtggagactatgccctgaaatgctattaaatacctctcttgaatttctagtaaacatctagaatactgttcttgttatagacctaaatgcaatatacctagaaaacaaaatgcctactgtatacattctagttctaaattgatttacccagaatagttaggtaagctaacctttcataaagaaagagtgaaactcaaaaaaagatagtaactatgtgaggtgaaatatatgttaatgagttttactatggtaattatttcacaatgtagatacaaattaaaacattacattgggccaggcatggtggctcatgcctgtaatcccagcactttgggagacagaggcaggaggatcacttaaggtcaggagttcgagaccagcctggccaacatggtgaaacctcgtctctactaaaaatacaaaaaattaactgggcgtggtggcgggagcctgtaatcccagctactctggaagctgagacatgagaatcacttgaacctgagcagcagaggttgcagcaagctgagatcgtgccactgcactccagcctgggcgatagagactccatctaaaaacacaaacaaacaaacaaaaaatcacattgtacaccttaaatatatacaattctgtttgcttgtcataactccataaagctggagaaaaaagagtgaggctaccattgaacatgctgttaccctgaggattgtctttgcctgcagtgaaagaatttagaatatttatctttttataaaaccagaaaataacaatttaactgttatttttggaagctataaaaattttcatcatattatagctagagaatttctaagttagaaagatctttagggaataggtggtccagctcgctacccaatctctgaactcccttaaagtcagccttataaagtggttatcccacctctatttaaagaagtcctggaagagaaaacatactatcagaggcaactcatgagaattcacatgctaatttaaaaaaaaaaatcaacctcctttacttaggtgtgttaaaactgtctcaatagtgtatgcctagaatgcctagagtatcaaagtgctgtttttaatccgctgtaaacaagaaagattctttagggtttgtattatagtcattagtgaataaaacgctaatagatgtctgacacagagaaaaactaatcattatatttagattttgtcaaatatcagcatgttattagtctgcacttttgtgttatcaccagtgactgatcccgttaaaatgcatgtgatcacattattaatgttcttggtcctttaagcatgcttaagtttttctagcataactaacaacaccactgagagaggaagtacatcactattccttcaagggtagactattttaaacaccggtttgttaaattttaaacagtgctgacaatttggggagacaggtggttattttgttttgttttgttttgttttctctctcataggaaacaactatgttattcaccgcaacagctgtgaagttgagattagccgtgtggccaatcgtgttctagatgagctggttagaccatttcaagaaatccagattgatgacaatgagtatgcttgtttaaaggcaattgtattttttgatccaggttggttttcaaaattccactagagaattaatataataaaaattgaactacttttcaatattagaatatttattgtctcacactgtaattaggttaaatctgtacactgcctctcttattcctttgttagatgcaaaagggctaagcgatccagtaaaaattaagaacatgaggttccaagtgcagatcggtttggaggactacatcaatgatcggcagtatgactcccgggggaggtttggagagttgcttctgctcctgcccacactgcagagcatcacgtggcaaatgattgagcaaatacagtttgttaaactttttgggatggttaaaattgacaatctacttcaggaaatgctattaggtggtgagtacattgaataatttctactttattgattagaatcacactaaatataagtttgacctactgatttttttgtccatatttaattcatctactgaagttgctgtgatgctcctgaatttttttccttctgctatgacataatgaactcaaggttttacatttagaaaatttgcaagacccatcagagagacaaaaatacttgaacagattcaaacccccattcgtttttttttttgttgttgttttgttttttaagacagagtctcgctcagtcgccaggctggagcacagtggcacaatctcggctcactgcaacctccgactccctaattcaagtgattctcctgcttcagcctccagagtagctgggactacaggcacacaccaccacgcctggctaatttttgtatttttagtagagacggggtttcaccgtgttgattaggatggtcttgatttcctgaccttgtgatctgccagcctcggcctcccaaagtgctgggaatacaggcgtgagccactgcacccagcctgaaacccccattcttattagcctccaccacctctattccacagtccctctgacttaaattttcagatccttccaaacatggcaaagagaaacaaatttcctgattttatgacctcttcaaatatatcatggtttttcatgccctgattcatttaaaacctcaaggatactggaattgcaatacaacctaatacatatatatatatactatcttaaaaatgaacattgtgctcctgaaataattaattgacacaaaatagtagaaagggaaaatgatatttcattgttgcaatacatgtcaggaataagttaagaaatcatttattttgcattccaatctagattaaatttccttgtaaaatcattatatttatttttagttttctggtgcataatttgttcctaatgatatctttctgaaatgaaagttgttcatgctattacagtgatcccaaatactataaacttgaggtaagtgattcttggaattgccttaacaacaggcagcgaacctaatgattccaggaaacggcacacaaggtccattattaatacacagcataatatgatgcaacattaatctagccaatgtacagtgaaagctgacattgttcttaatatgccagtggttctgtcaatttatttttgaattcccaaaaagcacttggcaaaaatagcgatatttaagctgtcaatcaaaacatttgtttcaaggtaaacttgctgttcctgattaaatatcactaacacagcatctttttatcttttgtaggggcttccaatgatggcagtcatctccatcatccaatgcatccacatttgtctcaagacccattaactggacaaactatacttttaggtcccatgtcaacactggttcatgcagaccagatctgtaagtttatagactacttttcaaccaagatatttcttaattacccaagaaaaagtggaattgtgggaaagaatctattagtaaccagaaatggcaaaaacttggtgtaatttcccatctgagactcagcagtagaagactgttattcagcttgtcacttattctccctagacataagtttgcttcctaaaatgaaaatgaaagaaaaatctttctacttcataggtctggggagcacaaaagagtatacaagtagtccttgctttgcatggtagtgtgagaccataaaaacgacaatgcaagctgaaaccatgcaagggaatcttaataatcaatgggaaaattatttcttgcttggcaccttcaaaaacgtttgtcaaaatattaagaactctcttaatgtttatggagactaaagaaatataatctttatacttattttgtagaattcaatacaaaacatttcagttggtacactgtaattaaaacattaggaatattgacaatcgaagggttttatttctctataaaaaaaaattgtgaaatgcagtttgaccagttcttgtcaccttctgaaacttacattaggaagtgaggattttttctatgccctgatgagttttactcgttgggaagtttggatcagctttcaacattttatcccttgcattctcaatgtcatggcatgtttctgagaattcatttaatgtgaaattttcttgccggtttcacttattttgggacaccttctcccctttcgacacatccagctttctcatttatgtggacacgttttccttcgctgggttcttggctgcatatttagagactcaaacaacagcagcggcaacattcccatggtcagctacttcttctgtgactgcatttatgttttatttgtatgtcacttccagcattatcactttttattcctttctgcacttccactgttgttggtcaattctaattcaattattcaattttgtaaaatgtgatgtgaatttaccactaggaaacaaggaggcaacacagccaccgtatgcagtttgttttccatgcctgaactgaatagaagatgctcaatgaccaatcatggacagactaaaagttgtgacatgatcagtcactgatcataaagcacatctgttatttaggtagctgtttgcagactgaagagttggcagtggggtctgtatttatgaaattgctcactcttaattgtgagttaccgtggtaactgaaacttgaaccatgttgttgccagactggtggtgtttaactaagccttggtaaccagaattcattcacatcagaattgtgcagtgagggctgcttatgaaaactccttggaatgcaaatgaccatataaatactatagagattgttagtagctaagttaatctattattgtagctttcatgctaattctattttttctaagctactctggtgatacaaatctctaattatttgattaaatatctagattaactgattaattgcttctgaatttactctaattaatcccagatttacctttgatctattgcctctgaacaccaaacctactactaactcactgagatgacttgagttattgtgatgtaactattatgcatacacttattgcctactgaatttacaatagtctttaatagctagctacagcatttttttttcttccaaatgttgtatgcaatgcaacaacaatttaccagtaccacctgacttctaggcattggtagggaacgtagaagccatgggactgcgtgctaccatgccatcttttagatacaagcacaggtagatctttgtgtaaatagtatctgaaaccaaaattatttgaatatatgagagagagaaagaaatgaaattgttaggaaaaaatataaattttagaaaaatatggcataatcttggatttccaatgtacttgaaagacattatttgggaccatccttgcagaatagatcttaccattttcatttaacagataatcaatagcagaaagagaggagcaagcctaataccaaactagagcgtttatggagttgtgtctcttaaagatcagttattcataaactcacaaaataaaacacattaacaacacaataaacattgtaggaatcaactgacaagagagttggacagttctgctggtggttgaatactttttaagggctagtattatagtattttaaaaacatatttgctgaccctagtcttttaaaaatcacattgttactttcatttttattcttgttctttccacatactatttgtgggatttgtttgcaaaagaaaacttggctttactatgctcatttgaaataatttatattttatgcaaagcaggatattaaacacaaccaaaatttaaattcatgcatattttcttggtcttttagagaaggctactgcagtcttagatctggtctaaatagccagaaataattgtaaaagcagattttgatattgatttgtcatttaaactgcacttaaaaattttgcttctaagtaattgctaatccatacttaacaataatataaagctaatgtattaatgaacaccaggtaaaaggagactgttcttgttttgtatataatgttttaaaactgttgagacataagctataaagtttacaaagcctcagcctgatcatcaaacattttctgttagttctgtttactatgtggaataatacaataacaataagcgtgagtactaaaatatttcaagtttctaaaaattacagaataactcctggattattttataatatggttagattttacaatagaaagaactactattctagacaatgaagttttgaaactgtaactttttacattcaattcaattttttatattcagttactttatattcaattactcaggcttgctctttgcatcaaaggggatgcgacaggcaagctcgattgtaatagaataattttgaagcaaaaaaaaaaaagccagtatttttcagatgcttttgactacaacttagatttcagaacatttataaagtatcttaaccttaattttttatgtcatctaatatgtctgaattagtggaatccaaaccaaatatatttttattttatgtgaattttgattataaaaaatataaacattgttttctaatatttgagaaaactgtccttctgttaattcttttcactgcctttttttcctgctaggtttgttagagaatcaaatgcttataaatgctattaggaaaggcagaaaacaccttaaagtaactatgaaaaaaattttttaacatgacctctttctatttaatgttatttggaaagtaaggtgagagtactctctaacagtacgtcatgggccaataatgcattctacaaatcactattctgtgtaggatattttaaaaacatttccaaattacgctaatgtgtattggtgttatgtagggtttaatggggtgaggaagactgactgccaccattagactcaattctctgattctttttcagcaactcctgaaaccccactcccttccccaccacaaggctctgggcaagaacagtacaaaatagctgcaaaccaagcatcagtcatttcacaccagcatctctccaaacaaaagcaattgtgaaaatgtgtttacttcagaacggcactacataaatgtgaaaagttgttgatcttgaaatatctcaagatagcacttttggcaaactcttagccaaggcttcttcattggtgctgttataagatggtgtcctattttcttgtttatacgttcattctgtttgttattgctactatgtaaaactttcacatgcaaccaatgtatatctgagtttgaagatgtttatatagggtattttttccaactgcccctgcattgtgcctgaaccaattgaatcttatgtatgagtttcatttgttttattaatgttaatttaaatctgtaaataattgctttattgtgatgtgatacagaacaaagtgttcgtttttgactgaaaatagtagatcagaaatctcagtttaatataaaatgagctaagtttttaaaaataaattataaacttggagattagaaaaataaagcagttgctgtagaataggctgtatctttttcaagaagaatctcttatggacagtctgtggtaaagaagcaactctttgctttagagttaaatattcctatcttaagtttagaaaaatacaaaaaaccattccaaggatgactggatactttttgaaatctgactttatttgaagatgtatgttaagcaaaaacatgttgcttttatcagttaggatacagggtgaactgtaacaaagaaacccctaaaacagtgactaaatcaagagaggaatctatttctttctcctgaaacaatttagaaaatagttatccattgactagaaattagcacatgcccacagctggctcccacggtagccaggagaattatctataggtggaaagtctgtgtcagccaaagccatgtcactctgagagaactgattctgaggacaagttagccatctaccacccatgtcccttatttggtcctcacaataacactttaggagagatatcattatcgctgttttataaataagggaaactttagcttgagggtttaaggaacataaccaaagttcacaaacataacaagtgagagaaacacattcaagcccaggtctagttgactttaatgaatctttggtgtggaatgaaaaatgtgaacttcttactcatagtgtggtttttaaatatatgcagttgagtgatgattggatactattcatcatattgcctataatatatatttaccgataagcagtgagtgtaaaattgttgtagcttgaataagaaaccacttttgtagttttaatcagactttctcttaaaaacattagataaaataaaagattcaccggatggattctgatgaaaacgaaaacaaagtaaaatgactggcttagcagattctttgaaatgtagcagcccagggatgtaccaaatgtcgaattctagactgaggagtagagttcattggagtcttaaactctctgatatcacttaaagctggagtttattttaaaacaaatgaagcatgggccacctcatgatgcagtggctcctctctggttgaggagagggaaaattggaaaaactggtcgagtaattatcaataattttttttaaaaagaggatcccaaactgtaaaagattgaaataatctttctcaggattttttaaatgtctaagattatgatgtcatatctcccacttaccttataagtaaaaaggttaatatcaagtaacttattagctcttaaagtaaaattgaacttattaaaagctatctatgatttaatagatttaataaaattccttcacgacctggtacccttgtgaaactgtaaaatatatcatatggggggagttttttaactcttattttttgaaaatttactgtagcttctatttcgtgaataagaatgttttgattttgatcatacaaataacttttgtagatttttgtttacttttgggggggttcccttagaagacattaaaaaaaaatactgccttggtctgtgcaggctgctgtaatgaaatactatgaacttggcagcttataaacaacagaaatttatttctcgctgttctcaatggtgggaagtccaagattaagggatcaacaaattaggcctctggatcatacatggcattttctagctgtgtccttatacataaaaggaaaaaggtagctctctcgagtctctttaataaagatactaattctcatgactgaatcaccctccaaaggccccacctcctaataccatcactctggggactaggtgtcagcatgtgaattttgg

SEQ ID NO: 152 - DNA, 18348 bp, Human
ctggctagccataggcagaaaactgaaaccagaccccttccttataccttatacaaaaattaactcaagatggattaaagacttaaaataagacctaaaaccataaaaaccctagaagaaaacctaggcaataccattcaggacataggcatgggcaaagtcttcatgtttaaaacaccaaaagcaacggcagcaaaagccaaaattgacaaatgggatctaattaaactaaagagcttctatgcagcaaacgaagctatcagagtgaataggcaacctaaagaatgggagaaatttttacaatctatccatttgacgaagggctaatatccagaatctacaaggaacttaaacaaatttacaagaaaaaaacaaccccatcaaaaagtggttgaaggatatgaacagacatttctcaaaagaagacagttatgccaccaacaaacatatgaaagaaaagctcatcatcactggtcattagagaaatgcaaatcaaaaccacaatgagataccatctcactccagttagaatggcgatcattaaaaagtcaggaaataacagatgctggagaggatgtggagaaataggaacgctttttcactgttggtgggagtgtaaattagttcaaccattgtggaagacagtgtggcaattcctcaaggatctagaaccagaaataccatttgacccagcaatcccattactgggtatataccccaaggattgtaaatcattccactgtagggaacacatgcacacatatgtttattgcagcactattcacaatagcaaagacttggaaccaacccaaatgcccatcaataatagactggataaagaaaatgtggcacatatacaccatggaatactatgcagccatgaaaaaggatgagttcatgtccttcacagggacatggataaagctggaaagcatcattctcagcaaactaacacaggaagagaaaaccaaacaccgcatgttctcattcataagtgggagttgaacaatgagaacacatggacacagggaagggaacgtcacacaccagggcctgccaggggctaggggacaatgggagggatagcactaggagaaatacctaatgtagatgatgggtggattggtgcagcaaaccaccatggcgcatgtatactatgcagcaaacctgcacattccgcacatgtatcccacgagcaacagatgctcatgatggttgtaaaggatcaactgtattttaaaacataatttaatatatacttttaataaacacattcatattgttcaaactataacccatagatttttttgtttccttttttttaacttttattttaagtttaggggtacaagtgcaggtttgttacataggtaaacctgtgtcctggagatttgttgtacagattgtttcatcgtccaggtattaagcctagatttcttagaaggaaaaagacaccaaaaatatgttcttaaaggtcaagggctgggttttgtatgatagctagaccattatctgtaggatttgagaccctggtcaaagaccataataaaatattaatctttgctgaacacattcacttatctaaccatctagtcaaaatagcttatgcgctgcatttttaaagaataacaggtggccttttgtcattttatgcctctctatctgagccaaactatataatcatttgcattatacctttggctcaaaaacgtttatatgtttaggctatcaaggattatttttaatggttcctaaatcattttaatcctcagaactactttggccaatatttgtctttgttaaaagttaaaggtgagcactcagtattatgtgaaaatgaatgcaatatttaatttttagttttgtcctgttaacattagatgatgcccagatagtaagtctttttggtaatgtaatcagtggatgaggaatctgaccattgttgaaggttttgtatataagaagtcaatacaacattgaccaaaatactaaccagccagagaaacagaatcctaactatttctgaggaaactgtaagtagaacttctgctgaacaaaattgttatttgaattattagattttttctttatcccaagtgatgcatttttaaaggcttagatatttgttgcatattcacctgcataaatgtatctgtttaaattatggcttattcctctaggatttgatttattttattcttttttttgtatggacatgagactcttaattatggaatgacaaatttgtttattattgcaattagtgcctaatgtgaaagtctcataatttcttaactattgaattacaaatttgtttattaagttcctaatgtgaaagtctagtctctgtgactcttctttttgagaaggaatagatcagtaatctagtgacatataattggctgtattaatatgctatgtttaatatttaatatcatccaaatcaactgctgttgaattgatcattattaatacgattgtgaaaccttataggctattaaaacatttatttaaattataaacttttcaaaacagaagtctagaccaaattatataaatctccctggggatgtccctataaaagctggcccagggtcatactgaaggagtattacagtggggaagaacatagcctttggaaatagactagtttaaaatatgggctccactactttctatatatttggttgggcgagtcctcttttagccttaccttgcttatttgtaaaatggataatataatgctacctacttcatagagttgctatgagaattaaatgagataatagtcataataactatatttaactaacgtttatgagatgcccagcatgttaagaactttacttttgttatcataatgaattcccctaacatagagaaatgtactattacaggccctgttttatagatgagaacactgtcttagcaagatagttcatttcacgtataccatgttgaacacacagtacagcacacagtgagtcctctgtatgtgttaattactggtattttcctaggacttggcaacaagcattttgagaaatttattctgcccttgaacatctttgagcccattgagatgttctccaacgcaaacagtaggttaagtgtcctcactttacaatggcaaatcacttaatggaggtcatgtgggttcctgaaatgtttgatgaaagcctctggtttgaatgttacaacactactggttagtctttatatattagtttatctcttcctaaaatatcacggtaaaaacaaggcttagttaaaaactgatttttttttttttttttttttttttgagacggagtctcacactgtctcctgggctggagtgcaatggtgcgatctccgctcactgcaacctccgcctcctcggttcaaggactcttgcgtctcagcctcccaagtagctgaaattacaggcgcgcacacccggctaatttttttgtatttttagtagagacgtggtttcaccgtgttagccaggatggcctcgatctcctgacctcctgatccgcccgcctcggcctcccaaagtgctgggtttgcaggcatgagctaccgcgctctgccaaaaactgatttttaagagatacccttaaatctaatcctatactaaaccagtgggcaaactattagaccagagggtcagatttaggccttgagagttctggtctggttttactgtaaatcaggaactatgctatgtgctctgcatgaattactataaacgggttttcttgaaatattatcagcaactgggaagtcaccacttttcaaagaattccacttgaatccaaagatccaaatattacacattcttcactgtattcaagtcaaatatttctacatatgatctcgaagtattgctcctaacatacaatttctcaataaatatttattgaataatttatttctgacacactaaaaatgaagtgatttaaaactgtcctctacatggcttcccttcaaatatttgaggacaatatcacttctctattgaagctttttcaccagcttaatatctgaagattctcaaacttataatcagtgactacaacatagaaggaagttcaggtgttgtgggcctaataccaaatattgtctataaggctaggtgtggtggcttatgtctataatcccagtgctttgggaagcccaggcgggaagataccttgaggccaggagttcgagaccagtctgagtaatgtagaaacaccctatctctaaaaaaaagaaaaaaaattagccagatgaacacctgtagtcccagctaccctggaagcagaggtgggaaaatcacataataacctcaaatcagtaaatgtttatggaataactattataaacaacatttaaaatcaccatgattactttgaacacacgttatacagagattggatatagagaagtcaaaggcccacacatccctcacccaaatctgggctctcaaaataagcaggcaaaagtcttaaacacaaagcataataaggacacattgttatgccaattagaggctttttttttttgccaattaagattaattcagtatggcttgaaaccaagtggaaaatgttcttaaacaaaaggaatcaaacagtgaaaacaagttaagcattaaaagcttaaacatgttaagcattaaaacatgttaagcattaagttacctgtgctgacatccatatgtctcattttattgcccaatggaatataatcaaacccaagcattcctctacttagcacaaaggtaaaattggcataaaatataagcattatgaaagtataatggattaaccatggcacgggttattcttttctttcaggcaggtccaaaatgtggctgcttttaacaatggcaagtttgatatctgtactggggactacacatggtttgtttggaaaattacatcctggaagccctgaagtgactatgaacattgtaagttactctggggaaaaactctataaaactaaaagatgctattatttaaaatcataatgagttaaagattttatatgaccaattaaaaataaacagtaatattcatttattagatatatctaaaaatcaactaaaatttaaacttttgggtttgcttcctcagagtcagatgattacttattggggatacccaaatgaagaatatgaagttgtgactgaagatggttatattcttgaagtcaatagaattccttatgggaagaaaaattcagggaatacaggtatatataagcttcttttcttccttcctttctctcttttttcctttccttctttcttcttccttccctctctcctttcttcctccaacttttccttcttttgttcttccctttttcctccttttatttcttgctaaaaatgtaatgtcttgctcattctggaaatgcaaaaataagctatattttcagtcttcaaggagatcatcatcaagccaatgaaatagataagtaaatgagtgattataataatatgtgataagctcaagctacaactgtacataggatattaaactgaaggttttaataaaattacctaactcagctaagggagtcaaggaaagctcactctcagaaacagtaactggatgaagatctaaggatcaggaagagttagccagggtgtgtgttgcagaggggaagatggggaaccaattcaaggctcatttcctaaacacatacaggctaattttcactagtactattaaaaatttaccttttactcattgtagaaatgttatgaagtacaaaaagaaaaaaaaaagattactcgtaattttaccactcacagtttaccaaatttaacattgtgctgaattacctgagaatataattttttcaatagttttattgagatgtaactggcatataataagctgctcatatttaaggtgtgcagtttcataagttttggcatctgagaaatcaactccctgagaaatcatcaccacaattacgataagatattcaaaaataatcaactcaatcaggcaaatgtatttagtgctagtcatatggaagactgtttctagcctcacatttatcctagaataaggaatacatttataaagtttataaacattttcttccttaggccagagacctgttgtgtttttgcagcatggtttgcttgcatcagccacaaactggatttccaacctgccgaacaacagccttgccttcattctggcagatgctggttatgatgtgtggctgggcaacagcagaggaaacacctgggccagaagaaacttgtactattcaccagattcagttgaattctgggctttcaggtaaacaaaagggacaattaaaaataaacactgggctttaaaagcataggcatttgccccttctaatccagtcccattttaacaaattacactccaagtaggaggataaacaagtcattttcattctaatccattcttggattcttccatgtacctcattcctagggtagcttttccttcaaacttttgtgatctcaggagtctccattagggatttccagaaagtgattttccaaatggaatgaacaatatggctgaagcaaggaaactcacagcccctggaaaattccaaaggaatgtccatatggattcaagagagaagtaaaaacccatttaggggtaggagaacagcaatctgaatcatcatcaataggaggggtggggagagtgaaattcagatatcatggagagattatcatgggcttctctcactggtcttcttgtgccttattcctggaaattactgatggaggtagagaacagaacaaaacctggctgctgatgctaaggcatgaaagtgttccaagagttctaggagctgaaaggaaacctgtgtgtcccaggtgtagcgggaaaagggaaaatgacatgagtgaagactgaggtgcagatggggcagtagtggtgatagtgagagccttgggcctcattctgagtgcactgagaagttttaaaaagaggagtggcataatacagttttcattttcaaaatatcatgttggctgatttgtgaaaaataaaatagagaaagataggatttatattaaatgacatggaacacagcatacacattattattaaatctgacatttcatttcagggatagaaataattcccacctacagatactatcttgtttggattcaattgtggctgcaatgctgcgcttcagaaatgatgtcagttgtttataagaagctgccccaaagggcacctgacatccactgatggtctataagcatcaatgtttagagaatccagttttctgtatcccaaagggatcattagctataaatgcttgaattttagaaacaatagcaaggaaatgtattcactttcattttgtctttttcctttcagctttgatgaaatggctaaatatgaccttccagccacaatcgacttcattgtaaagaaagctggacagaagcagctacactatgttggccattcccagggcaccaccattggtaagtaatggcagtcaaggccaagtggtttacttctcataaacactttcccagtggttatggtaggcatgttagcaaccacactaattgctttccattcatttaatgcctccaacaacacaatgacatagggacaattataattcctattatatgggaaaacaaaacaaggggatacagttcgtgcaaggttacatggattattaccaatagggtagctcaggcagtctgactcccaagcacatactctgaagcattataccatacagccactgacctaagtttattctattcatttgaccatatttatggggcaggctcctatgatgtatcaaaagaatacagaaataaataaaatagatgaaaacttctgcctttgtaccatttatactctagagataggaggcagagaaaataaaaaaggttaaaaagtaaaatgtaatatattttagataatgctaaagctatggagagaaaataacccagggaattacattagagagcaccagaggggttcacagaaattgtagattggtaacacaagcactctttgggtaaagtcatgatgaaggtcagagagtgagtcatgtgcctacctagtaggcatcagatgttccaggaagacagaatagcaagtgagaagaatctgaagctggagcacacctagtttgttcaaggaacagcagtgaggctatgccttgtgtggatgaatcaaattgagaaagagacagagagagtgagagatgagatcacagatgttggggaggaaagactgttcggggctctttggctgttgtagggattttagctttcactctgataaaaaaagaaaactgcagaataattttgaatcgaagagttacatgattcataacaggatcccttttgttgccaggggcaaagagccaggagcagagaaccaattagaggactcttatagtacccatgcaggagatggtggtgacctggatgaagggtgttcttggaaaaaccattcttccacaaatagaaccagactacatattatatagttgtctatatctgaaagggttttttttaggccattcttgagtatcatcgatatgtcattattgacagtgggagggccttgcctatgtagctatactgcagcgttaaacttgataactacttgatcacatcctcatctgccagtatactactgcttacaaaattaattcattactgaatgtatttactatgtatagatatttgaattctcttgggtccttatttatcaagcatttactatgtgccaagaatcatgataaattctttctttacatgatttacttcctttagttcctaacaatctaatgaagcactcaccactatccttgtatttcagagagggaaacagtggttcttagagattaggtggcttgtccaaggtcacaaagctaataaaccacagagccaggattcaaattgagtttggtcatatttaaatttctactcttaacctttccacttatatactctactcatattaagtgttaattaattatctcattgtaatgagatacatttaaattcataaaaaatataaattcataaagaaattcataaaaaaattttttgtaaccatatgagtatcctaaatttggtctattttctaaggtcagataaaggtttatgataacttttaaaacgttccagcctcatgtccccatagaaaaatctatgaaaataaaacaaatataccaaaatctaatcactgagccagcagagatgccaatttctcaggctgtctcaaacaccatccttagtaagtccaaaataatgtcacacttataaaaacaaacaaaacaacaacaacaacacacacacacacctttttcaccagttccttgttctttttcaggttttattgccttttccaccaatcccagcctggctaaaagaatcaaaaccttctatgctctagctcctgttgccactgtgaagtatacaaaaagccttataaacaaacttagatttgttcctcaatccctcttcaaggtatgcaattctctttaattaagtgaatctaagacccttgattgcccatggattttaaagttatagaaagagaacagagttataaaaagagaacaatcatttttatatccaaaaatggaactgttcgcatctgtattatttcttccatagcactgaccatgtttgaatctccttacagcctgcgagatccccctttctttctttgttcttcatgtgagtcagcaatgcctgggagtagttttgctttttcacagatggtttgtttattaagcactctacacagttgtgtcaaggctgtgattccactccaggaggagggaagatgaaataaaaacaaaacaaaatagtcaaatgagaagactaacccacttgggccagagagactggaaagaggagggaaaggaaggggagggaaagggagaaaaggaggaaataaatcagtgattgagtgaggcaaacaccttgagatctctcatggctttcccttttggctttcctaagagctccttcatctttaaatgggcgatctcataagtcagtggtgtggatttcaataaattataaatattaagtgccttatgcagtaggcacacatgttatggaattaatcgttttgtttgacaatgcttaataccctaattctctcacccagtaaaaccaacacacacacacacacacacacacacacacacacacacacacacctctctctctctctctctctctttcctttaggggaacggtttagcctcaggttataaaatataaggattccatttccttctatggttttgtactattcatctcttttcattctgtattaatatgtatgtctaaagcctaagagaacttacctataggcaaactacatttggaaaacttttattaaaatctaaaattttttgatggcccagaaatatttattggctacattgattgagaacttatttcctactcatactcagattttctgataggcaatgcagacgtagattaaaatttagaaaagcaatagacctcaagttagaggcttgggtaaggattctaggtataatcgagctctaattagcccaagaccctaactcatgttaacctcatgtttcctcgtgtataaaatagagatgacaaaatatctgccttcctcaaagagagttggggcaaactctttcaattcttatactgagcctcattgcctctgtaaaggctttgctgaaaatatggccaagtcaccatttctcctcccaaacttttcacaatttattgctgaaatctcacatcttggcacttcattatgacagtctgtcatgtgtttttaagattttatcccacaactcctatcaccccaactagattgtaactctttgtgtcttatacttcctctcagcagccagtacagttctcagtgccacaatagatacctagtattgatatctgtgctgcccatttcacaactttattagggaattaactaaatgaaagtattggaaattcctaaaacaacatgtaagaataagaatatatcatcatcctcatcacacatgtataagtagattagataaactagtgagtcttttctgcagcttgattgctacaaccctctaatagtgcctttatttttcagtttatatttggtgacaaaatattctacccacacaacttctttgatcaatttcttgctactgaagtgtgctcccgtgagatgctgaatctcctttgcagcaatgccttatttataatttgtggatttgacagtaagaactttaacacggttagtatgcatttcaatttctatattttgagcaacatctttgattacttgtttcattgccacttagaagtggtactttatgagaactaggagtaggttcagaactgcgatatcctgataaacatgagagaaatcacaaatcattgctcccaatttaatcacttccagcatccttccatcaccccagttgcccctaaaccaaataaacaacatgaagaaaaaacacaattcactactcacttatgaccacctaaatactaggtgttacatttaaattctgtaagagaaaggactgaaccatatattttagcaggctcctttgtgagaaaaatgtctagatattgaataaatgttttcaataaatatttctaatgctgacagtcattttgataaatcttacagactatatttctgagcaactatttatgtaagactttgcccatattctttttttgagatagagtctcgctgtcacccaggctggagtgcagtggcgcgatctcggctcatagcaagctccgcctcttgggttcacgccattctcctgcctcagcctcccgagtagctggaactacaggcgcccgccaccacgcccggctaattttttgtatttttagtacagtcggggtttcatcgcgttagccaggatggtctcaatttcctgacctcatgatccacacgcctcagcttcccaaagtgctgggattacaggcgtgagccaccacgcccggctgactttgcccatattctttatctaccttttcattcactttgtattgagttggagtttcaaaacatatggacaaaatacactatcatagttaagagtatggatttagatcagtttaaattcaaaccctacatttggaactgacttaaacgtctctgtcttgatttcctcatccacaaaatgggttattgggaagatcaaatgagctagtatgtttaaagcatatagaacattgtacaaagcatatagcacatagtaatagcatataaggttttctactactattcatagacaactatctcccctccaaattgtcactttagttatatacccttgaacacctaagaaaattacatctattgataagaaggtataattctatgaagtgttgtggttacttgtcattccatatgtggagtttaacagagagtagcctgtcctcatcacacgaacaaaaggcagaacaaattactgtattccattagtgagagtcttataagaaaaataatagtaaaataagacaaaggaaacaaaggaaattagagatttcatcttctgcgtaataatttgcagaagaccatcttcagtctccaatgaagatggccaatttgtttcactatggccacagtccgctatattaatggcattaagagtcactatgaagtggccttctgcaactggagaaaggaacttcagtttgttgcttggggttctgcaaagcaagaggcctgtgtgtgaatatttaacctacagcactctagcactgggtagagaagcataaaagctgagaatttagactcagagacccaaattaaagtatctgtctccattctgtgtggatcttggacatttctttaaacttctttgtgccccaattttcatgttgataaaatggaactaataagttctcctcattaggcagctacaaattaaatgggttaacacatgcaattgcactttgcaaattctgaagtgacatacaaatgtgttgttcatatccttccagtaaatgctacctttaaacacttgacctgaatcagaaaacataaatctttactgtttttaagaaactgagtatgtgtcttagtatgtatataatatgtgtgtctgttgatttctagagtcgcttggatgtgtatctatcacataatccagcaggaacttctgttcaaaacatgttccattggacccaggtattcttttccaaatgctgttaaaatgtattttgtgagtctcaacccttttcactttacctaaacacattcttaaaatatcctgctgagtacacctggaaggtaatttttctggcactgactaccatacaaaaataactatgaatttatttcaaagaagaaaatgctttttaatttattttattattattatactttaagttttaaggtacatgtgtacaacgtgcaggtttgttacatatgtatacatgtgccatgttggtgtgctgcacccactaactcgtcatttagcattaggtatatctcctaatgctatccctccccccagcaaatgctttttatgacttggtatgcaagaaaaattattttgagtgaagctgcatttaaacttacataaataccttgtcctagattattaataatcttttggaatgagaaaaatgtttcttaataattgtttaaattgaaaataaactgcttggaaatgtttgaattttatttttcacaatataataatttttatttgtttgcttttaatttctctatgttaggctgttaagtctgggaaattccaagcttatgactggggaagcccagttcagaataggatgcactatgatcaggtaagcttcttaaagatggaattattcacattttgaacaacaatactaactatttaaatgttaaagaagaaattatgttaactgcgcatctgttttccaaaggaatgttgatgttctgtctctcattctcccacatgactatgcattcctgctctggtggctacgctcatttaaagaggtttacaaagctgccctcaaagtactacacccctgtgtgtgagagacttcccaggacttaccactacccattgccattacacagacctgtcccatatcccagatccccagcacactgtcctctcctttctgaagtactaatacctgatataataagctaataattctaactgttcatggaatttctggtcttcttaaacaataccctttcctttgttgacagccagaggagtgatttcaatgggatatattcccaaatagaagaaaaagatgccgtgcttgcaggtcaaggctggaaatattttacaataggcagaggcctttggcataggcagacatattaagcagtcctcacacttgctgtaataagaatccagactttggagcttatcttatctgcagtcaatatgagtttgggcagtcatttcttcatctctccacccaggctcaggaagttgttgacaggatttagtgctataatatctataagctcttagctcagggtaagctctcgggttatcactgactatttttgaacaagggaagcaccctatagtattttgtaaccttctcttcttccttttcaccacatccaatttttccatccaagtagtagctgaacaactctactaattttcatttgtttccatgacttaaaatttagaaggaatttatatgttttaacaacaatgtcttatgtgtagagaaggtgccccccaaccttgattttgcatttttgatatctttaaagttttcagaatagcatgagatcaaacttttgttgaaaacattttttcctccaccatcactttctcaaatctccaaaacacacaggcttgctttgagtctctctttctactggactctaatactcataatcagaggacttcatcttagaggaacaagaaacccagtccccaagtccacccttcttccaactaaaccaataatataccaggttggtctttaactaactgaagcaatgacactaatttaagagccagggccagcatctagaaaactctttgaataataggatgtaagtaaaataagctgggtttataattatgaatattctccacacactcccttttctctaatatttaggaaatataatagaaatcatgaaaatattagggaaaattacatatcataaaatattttgctatggcaagttggctattacacaaaatgtgagaatacagaaacttttagtatattggattactattcttgaaactatgatctaaaaaaatctaacaaaattctctctgggcagcaagaaaatttgagataattctcttattcctttttctgctttgtaaacctctttaaaatctatgtgtgaattgtgattttcgagaaacaggacatggggatgataataccctttctcagaatttgaagcaacattttgtaaatactcaggtaagtattcaacaattacagctccataactgaaacaactgacctatcccctgaccataactgggaagtcaatacaaagccaaaataaatgactcaggacattttgagatcatattttagagtgtttgggtagaaacaacctattaacaattagaatctaatcaaatccatttcccttagcttgagttgcaatctatgttcttaatttgtaagacttactgtccaaagccttgctattcagagcatggtttggagccaatggcatcagcatcacctatgaatgcagaatctcaggctgttccccagatctactgaaacagaatttttacttcaacaagatcttcaggtaattcacaggcccattagaatttgacaagcacttatctaaaacatattgcattcactttgctctgtggataaaggtggttttctctgtgcaatcattgctagaattcacttataaaaccgccagttaatgttatacactctacttgaatagtaagtactgggtttaaagtgtggttacctaaactctggttctttctcttgtgttttctagtcccagcctccctactacaatgtgacagccatgaatgtaccaattgcagtgtggaacggtggcaaggacctgttggctgacccccaagatgttggccttttgcttccaaaactccccaatcttatttaccacaaggagattcctttttacaatcacttggactttatctgggcaatggatgcccctcaagaagtttacaatgacattgtttctatgatatcagaagataaaaagtagttctggatttaaagaattatccgtttgtttttccaaaatactttattctctcatacatagtattttcataatgtttgacatgcagtgcttctttctgtaattttgactttagaaatatattggcatcaacaaacttccatttgtcattttgaatttttttaatttaaagaaatttgatttttcacctggaaatttatctagaaatacttgagagaatatatttctggggaggtgaaacttctcattttcccattcagtttctcttctgaactcacttatatatgagctgtgagccataagtgtttctaaaggacagtgttggcttcatattcgctctgcttatgtacacttgatactgagtatattgctttctattgttgatgaagctaagtctttccatctgtgtagtggggcctatcacttgctattttgcatatttaaccccatggaaaggccaattgggatataaactgaatcaactcactttcacttcccagggagtggagagcaagggtagtttgggaagcagcagatgaagtcaaccctgagtcaggaatttgggaagaaaagggtatgctctattattattattattattattattattattattattgttctgccctcatgtttttgggtcttgaccaccaaataggcaccaactaaccaaactatttttgaaatctctgccacagtgctggaaaccacaggatccagaaacatccccattgatatatcaattaggatgtacaactgccatcagtaacaacaaaaaaaaaggctcacccaaactttcaaaatttctaaacacacacagccttaccttggaaattttattaaccccacaaatttgtgacctcatattttatgcaattaagttattcagatcacacctattatactatgttacggtttgatgtataaaatataaatgagataaggaatatcttgtacccagcatagtgtataaaacatagtgagtattcacaaaaacctgttaacaatgtttattatattgtcacatccctcaacctttgttaggaagccccaaacttaatttgttttaagcaagaaattgctaaaagaagataacttgggagactttatttcaatatttcagtgaactttgttgttagactttactaaactgacatgaacatgtcggtgactagttacaaatgttcatggtggtggaagcagttgaggactcagatgttttatcaactctacttcctcgagaaaagaacaatcattagattcttgcagtctcctatgctattccagctaactgcctttcttttagtcggtactcagcagatacaggaagttttggtttggattttgaacacaattaaatactatcttattgctcctacagcagctttgctatctcccatttgttaatttgaactgtcaatttatcagctaattttcaagagtttatttctatctgcctgctgtaatcacaattttcaagtgtttatttctatctgcctgctgtaatcactccttgggcaacctcctgccatgtcaaactcaatcatttcaaactcaaattcatcatccccacatctctgagccaaataagtgtcaagttaatgaagttctcccagtaaccagggagtgagactctggaatcaactttgaataccgcctctcctctagttatcctttccctttgtaaaatagaaactgttaaacatagataattttagacagaacagtttaataatcccctttgtatgcattactcggtttcaactattatcaatacatagccttctttcataatctggttttatctgtatctctagccacttctctcatcttaatttgaagcaaatctcaagcatcacatatttcatccatgaggatttcaggatgaattactaaaagataaagcctctgttttaacataataatactgttcttacatctaaaattttaaaaatatctagccagtgctcagatttccaattatttcattaataatgtttatttatgaaatgttttatactttgtttagattgaaattcaaataaggcctttatcttttattacttgatgttgtctcatgtttctttagatatacaggtccatttgcccttgcccttttttttttttt

SEQ ID NO: 153 - DNA, 21044 bp, Human
ttctaggccctcaaccaaaaccctaaaggaagatacactttctccaattcaccactgggaaaaagtttatctctttaccaagcgtccttcacccaccctgccacctccagtactgaaagggttgcaagctacaaatgaatgggcattaggaatttgatagttgatattcctcctccaaaaaagcctagatactatctctcacttacccagctgtttaaacacaaaccaagttgttttgctttgtttactctcaacctggaaccactcttctctctccccgattatccctccctcagttctcattcctattttcttctcctgcttagcttgttcagttttcttgtatagcttagtaatcagatacttatgtaacacttttctttcaagaaactcacagtccataactaataggatattaataatcttttccagttatgtgagaattacttgccctagtccctttttatactttataaaaagggaagaagggaaacactataaatgacttgtgggtcagaactcttttgtcctattattcttttttttttttttttgagacggattcttgctctgtcgcccaggctggagtgcagtggcgctgtcttggctcactgcaagctccgcctgccgcgttcacgccattctcctgtctcagcctcccgagtagctgggactgcaggcgcccgccaccatgcccggctaattttttttttttttttttttttttttgtatttttagtagagaatggtttcaccgtgttagccaggatggtcttgatctcctgacctcgtgatccgcccacctcggcctcccaaagtgctgggattacaggcgtgagccaccgcgcccggcctttttttctattattcactgaagaatcaccagcttcttggagagtacctgatacatagcgtgtattcggcaaatacctgcttaattgaattcggtatttattgcatttctagatgctataagcttgagactagcagaaagtgatgcagaattcagaatgggtgatatggcaaatgccttattaaatatagggctcggcgcggtggctcacacttgtaatcccagcactttgggaggccaaggcgggcagatcacaaggtcaggagtttgagaccagcctggccaatatggtgaaaccccgtctttactaaaaatacaaaaattagcggggcgtggtggcgggcgcctatagtcccagctactcgggaggctgaggcaggagaattgcttgaacccgggaggcggaggttgcagtgagccgagatcgcaccactgcactccagcctgggcgacagagagagactccatatcaaaaaaaaaaaaaaaaaaaaaagaggatatggattgtattccataaacagttgaacctcttattcctactgccctgatagttggtctggctcctagaaattcagatattttcttccctccaggtgagattatgcgaagaaaggaacactggcaaaattatttccctgattttcttctctcaggctgtctttccctcccctttaagattgtgtactccgtctcaaaaaaaaaagaaaaaaaaaagattgtagacccagcctataaattcataggatcaagaattcttactaacactctttctaacaaccttaaatctctgatagtagcacccacttgacttcgttttgtatggatagatttattctaatctctctgtagattgttttaatcccaagcagatgcgagagcataaaatagtgtatttgccctccctccaggcttttctggtagtattttgtctgtgaaactaagaggctctagctgctattagaagagggaaggagtaaggatgagcttttgaaaaaaaaaaaaaaaaaaaacccagggtggagagagtggaaggatgtggttttaagagaggggggagggagggcgttattgtctgtggggcgggggcgggggtagttctgataacacagaattccgagagatcacaagattgcttcaggggggtggggtggggtggggtggggctgggggcttgtcgccctttcaggctccaccctttgcggagattataaatagtcatgatcccagcgagacccagagatgctgtaatggtgagactttggatccttcctgaggacgtggagaaaacttgctgctgagaaggacattttgaaggttttgttggctgaaaaagctgtttctggaatcacccctagatctttcttgaagacttgaattagattacagcgatggggacacagaaggtaagaatgatataattactggttatttttgcttgtttgggatacactcagaaaggcaaatattaatggtaatctccttgttctattttctcctaagtcaccaagctatcttaaggccttttcatttcgtctctagcctgcactgctgccgcttcatcagttctctttgaatgtcatacagttctgttcaccttatcataggaaagtcacccggagaagttgtgtttgcttctcaggtttattttaggtaaccatatgccactgaggacgagatggttgagtgtttagaggatcgggctgcttggttgtatggattacaagtgtgggtctcagagccagtgtgaagacttctctggaagcattagaccttgaaaaggtctgtgtttgggggcacaggccagggtctggccatctgtttgtcctataacatatggggttcgtggatgctaaggagaaagaattccagttgtccttcctattagggttaaaatcgtgagtgcaggacatactaaaatattgagtgttgtatatgcattatttgcagggagaaaggcttttcttttttttctgattgagttttactcttgttgcccaggctggagtgcaatggagcgaccgcagctcaccacagcctccgcctcccgggttcaagcgattctcctgcctcagcctcctgagtagctgagattacaggcatgaaccaccgggcccggctaattttgtatttttagtagagacggggtttctctatgttggtcaggctggtctcgactcccgacctcaggcgatccgccggcctcggcctcccaaggtgctgagattacaggcatgagccactgcgcgcagcaagaaaggcattttttaccaagataaatttaactaaaaataaggggccaggtgtggtgggtcacacctataaccccagcatttgggaaaccaaggcaggaggatcacatgaggcctggagtttgagactagccttgggcaatatagtgagatcccatctctacaaagcagaaagaaagaaaatgtaggaaaataagaaagggatggaaaattatgagactaaagaagaaaaggctctcaaagatagtgaatgatgagaggagacagaagagatttttactaaacggaaaaagatttaacagagcattgcactggcagggccctccggggtaccgatgcttagctgggactgagacatctgggaggctgcaggcaaggtcacttctcctgctgaagctcccagcctgctgcctaatctgcccgacctgaaaggaaaggagtttaagatatgaaaggttgaagggattttgggtggtggggtgggggggaatggcgtagaagttggcctcaggtataaaaattgagctgccccaaggtagaaatggaaaatgtctcgcccggctgaattattccaggcaaggtgaagatgaccggttctccccactaagaaatgtctcttatatgttgggttcgcccttatatgttgggttcagagtaagtactttcttcccctgcgcgggagttagggatagcagaactgtatttaataaacgaagactgaaatggggccaggatgcagtgagtagatccagtaggttacatggtcctgagagataagagactcaaagagccacccagcagtgaagacacaaactaccaccccctccaccaccaccactgggcttccgtggagtctggggtacagatcagactgcactgtatttgtttccagaatggtcaattcttagtaatcctacccgagactgtctttttctctgccctcccagttcgtgagtggaattctatgcctacatttgcctgatgcaagtttttaaatatttccaaactgaccaacccagtttctcttaacttcttccttccccaattttctttcatttttaccaagttaacttcacattcttatctccagataagttctttagtataatctattcctttgtcttccccattaattacctaaatctcattggatgttcttttcataccactcataactcaaattctcctaatacagctccataattaataagaaacagtcatcaatcacaagttttaaggactattctctcctctgtcttccctccctccaggtcaccccagctctgatatttgccatcacagttgctacaatcggctctttccaatttggctacaacactggggtcatcaatgctcctgagaaggtgagtgccaggccacaataattagaatttagaatagggaagttattcctttaagtagggtttcaggaattcagaatttaaggccaggcatggtggcatctgcctggagtcccagctactcctgaggctgaggcttaaagatcacttgagtccaggagttaaacaccatcctgagcaacacagttagtgagggtccctccccaaactaggggattttaagacaaactttgtatctatcctgtccaagactgaagatggagacaatattggtggggaaaattagtggggtcatctaatcgaagcacaaagctcacttactcccggaacgctgggcggtgctgttcttcctcccactctttcacctcatagtgatgcacatcctgtattatcccttaggggttagttacaaagaagctgggttcccttagcagagggctggggtagactgtgaacatcggtgctgccacctactgggattttcaggacaaatagaattactattccagcgagagttaacataaattccaatacgttatctgccccttccattcctgtctatttattcccttgattctctaggaaggaaatgatccctaatgtttgtcttttgttctcatccaactgtaacagtctgttcttccaccaacccttttattttgcagatcataaaggaatttatcaataaaactttgacggacaagggaaatgccccaccctctgaggtgctgctcacgtctctctggtccttgtctgtggccatattttccgtcgggggtatgatcggctccttttccgtcggactcttcgtcaaccgctttggcaggtattgactagaaactgggcaaggaagtgggctctaccagccacattgaggacaagtgtggagagttagggcagggaggtgatgatgcctttgaataagaacaccttgaattctaatcaagggaaacctagtccaactggccccgaatatgactgcccttgcttggagctctactaccctggagagctcccacccagctgtgcaagagatgaactgtgagtgattggcctttgcagtccagctagggatagttcagaattattccctagtaaactcaactatggggtttctagaaacatacttaatttacaaggtccgaagttgtttacttgtattataaatgtttttattattttacccaggattggtaggaattatttttgtctatggcaaatgtggataatgacaaaaaaaaagtcttattctatagaagcttaacaatatgttttagaaggtagaatatattttcatttatgactaatgaaggaactgttttaatttgccaattaggcacggtgtggtggctcacccctgtaatcctagcactttgggaaaccgaggcaagtggatcagctgaggtcaggagttcgagaccagcctggccaacatggcaaaaccctgtctctaccaaaaatacaaaaattagccgggcgtagtgacaggcacctataattccagctactccggaggctgaggcaggaaaatcacttgaacctgcagtgggggtgcagagggtgcagtaagctgagatctggccacttcacaccagcctgggcgaaagagcaaaaccccgtctcaaaaaaaaaaaagccggtgccgtggctcacgcctgtaatcccagcactttgggaggctgaggcgggcagataacaaggtcaggagatcgagaccatcctggctaacacggtgaaaccctgtccctactaaaaatacaaaaaattagccgggcgtggtggcatgcgcctgcaatcccagctgcttggaagctgaggcaggagaatctcttgagcctgggaggcgcaggttgcagtgagccgagatcctgccactgcactccagcctgggtgacagaccaagactccgtctccaaaaaaaaaaaaaaaaatgccaattagatattctagaaatgcaattggaattcacatttaaaaatcggtaaagcaacctgttttacttgattatgttgttcttttgtttttttaccccccaagaaagagggtcttgctctgtcacccgggctggagtgtaatggcccaatcatagctcactacagcttcgacctccgacctcagctccctgagtgcctgggactacaggcgggcaccatcacacctggttcccaactagaaatgttctgataatagaaagtgaaaaacaaaagttagattaaaaaaaaaagggatgatatgagcctggagaagaacagaataatgaggacagaggagaagttaggagcctctcactttgctaattctactttgtctttgattaaccttacaggcgcaattcaatgctgattgtcaacctgttggctgtcactggtggctgctttatgggactgtgtaaagtagctaagtcggttgaaatgctgatcctgggtcgcttggttattggcctcttctgcggactctgcacaggttttgtgcccatgtacattggagagatctcgcctactgccctgcggggtgcctttggcactctcaaccagctgggcatcgttgttggaattctggtggcccaggtactctagaacttctcatacttaatgagtgttagtttcatgggtcattaaaaaagttaacataggtaaagcactgaagaatatctggcacatgttcaattacatatggaagttttagataatagatagtagctgaagaagcaggctgaggccgggcgctgtggctcacgcctgtaatcccagcactttgggaggccgaggtgggcagatcacgaggtcagcagatgaagaccagcctggctaacatggtgaaaccccatctctactaaaaacacaaaaaattggtcgggcgtggtagcgggcacctgtagtcccagctactccggaggctgaggcgggagaatggcgtgaacccggtaggcagagtttgcagtgagccgagattgtgccactgatctccagcctgggtgacagagcaagactccgtctcaaaaaaaaaaaaaaaaaaaaaccatgctgagtagagaaaggaaaagaaacacaatttgtttattttttcacatggtaaaagaatgtatgattttctgaactttttgtgttttaatgaacttgtggcctgtgaagtatggggtttatagcattatctttgtgtggtttctagatctttggtctggaattcatccttgggtctgaagagctatggccgctgctactgggttttaccatccttcctgctatcctacaaagtgcagcccttccattttgccctgaaagtcccagatttttgctcattaacagaaaagaagaggagaatgctaagcagagtgagtatccttcacaccttactacatgaattatatggttgtggtttgttttagggatgattgtactggacctactttctgttacactctttccctgcctctcagaatccaagtgaggagggttctgattactcctgagtaaaattttcagcccctaaagaatgaggtgaaaaggcgggtttaggaatggatgctatcaggcagggtgtgatggctcatgcctgtaatccagcattataagaggccgaggcgggtcacctgaggtcaggagttcaagacctgcctgaaacaacatggagaaaccctgtctctactaaaaatacaaaattagccgggcatgggggcgcatgcctgtaatcccagctacttgggaggctgaggcaggagaatcgtgtgaacccgggaagtggaggttgcagggagctgagatcatgccattgcactccagcctgggcaacaaaagtgaaactctgtctcaaaaaaaaaaaaaggaatggatgctacccatcacctcacctcgtgcggccctttcctggctgccttacaggaagaatgaatttggggcagcacattctcttttatcctttcctctttcttcttttcaccagtcctccagcggttgtggggcacccaggatgtatcccaagacatccaggagatgaaagatgagagtgcaaggatgtcacaagaaaagcaagtcaccgtgctagagctctttagagtgtccagctaccgacagcccatcatcatttccattgtgctccagctctctcagcagctctctgggatcaatgctgtgagtgtgatactttagggtcaaacgtgtcttaaagtatttcacttaaaatgccgggcatggtggcggtgtgcctctgtagtcccagctactcaggaggctgaggtaagaggatcacttgagctcaggagtttcaggttgcagtgagctataattatgccactgcattccagcctgggagacagagtgagactgtgtctctgaaatttaaaaaaaggaaaaaaaaaaaagaccctggaaggacactggcaacttcagagtgaactgactttaccagtctgtttttacaactagtatagcgagcatggtagtttaaagagggcatgatagatgatagtttaaagagggcggcacaacggaagctagcatttggcaggtagcccttgtattccatgcaaatatcagcttcctgcatttgactgtggattgtaggaagagagtattcctgtgccttctagtcaatatggatattaagagcacccttgtcccacctttttaaatactgattcatcccctaagggttttcagatagtctttgatcaatgggattaaattattttgtaacaaagcattttgcaaaacttactattttgagcattttgatgctcaaaatagtaagttggttcttggaacttttctcctacctagcacaccaggatatttgtatttgaagtggcagtgcttcttatgaggggttagaggctgttatgtcagaatctatgaggagccaagtgtggtggctgctcatgcctgtagtcccagctactactcgggaggctgaggtgggaatatcacttaggcccaggagtcaagcctgggaaatatagtatgaccctgtctttaaaaaaaaaacttgggaggaaatacacagtagttagaaaaagcctcctaggtgattttgatgaatcccagtctcaaatttcttcatttggaaatgataatgtaggccacacgtattactggagaaaaatgtgctcccgagactttccagagcagcagagctgggactaggcaggtgaggcagctacgtgcaagtgtagccctgagaatgagcacctctttaaagaatgtaccttgcgttagttctgtgcctgtttaaaaaaagaaaaaagaaagaatgaaagaatgcacctgaggcaactccctagctgcctcaccacagtccaggccctgcaaaacaggatcagtaaaagatcacctgtgagaaatgacaagtgatccgtgagcagtctgagggacagactcctgccatttcagagtatggtgtgtacattctttttttttttgaaacagagtctcactcgatcgcccaggctggagtacagtggcacgatctcggctcactgcaacctccacctcctgggttcaagcgattctcctgcctcagcctcccgagtagctgggactacaggcgtgtgccaccatgcctggctaatttttgtatttttagtagagaacaggtttcaccatgttggccaggatggtctcgatctcttgacctcatgatccgcctgccacggccttcctaaatgctgggattataggcgtgagccactgcgcctggcccatcctttttttgaggtgaagtcttgttctgtcacccaggctggagtgctgtggcgcaatctcagctcaccacaacctccatctcctgggttcaaatgattctcctgcctcagactcccgagattacaggtgggattacagcccagattacaggtgcccaccaccataccttgcttattttttcgtatttttagtagagaatagagggatatcaccatgttggccaggctggtctcaaactcctgacctcaggtgatccacccacctcagctctctctcctaaagtgccggccttacaggtgtgacccacctcgcccggcatgtacattaattattgttggactaagctggctcccaatttagtcaatgagtagattttgcgctaggtataatctcacccaaagctggctgcatcagaattatgggggttgggattcctgagtcagctgaatttgagaatctctgtgtaagagacctgaaagttgtctgtaaaaaaataaatctgatgcacagcaggcttggaaatcacttttccaacctactttgcacaaatgatgatttctaatttcccttatgggcagatgggtaagaggttgcattgtatcatgtttacctagcagagtaaactatttaggtgagatgatgtaggggttaccttgcttggtgacactagatagcaaagtcattttactatgagaaattttattgagatgagtacatgtacattaggtttttgacgtgtagacattatgttaaggaaaagaattggcatacctatttattgcttgtttaaactgctcaagtaattacttttgcactagcctaatatatttccccacaagcttgacgccatcatataatatgttgagatttcttaacagtgttaattagccctagagcagcaggtttttcaataatgactctacaaatctcagtttcaaaacacaattatcttattttagaaaatatgaatatacatagtttacatcttacgtactagggatttaaagagttgtttcgtgagaaggtaaatcccaatgtagaggtccatattcataaaaaagactaataaatattgctatggaggcaaatactctgggtgaaataaactgaagtgaacctcggtaacctagataatgttcccttgttaacttgaggtctgagtccagtattttaatatctcttaactatggtagttatagcaactttagattttagcacagtgcctagcaaacaacataataatttatttaatatatattaaattgcattagtagctggtattatttcataaaacacttcaaaagggcctaggcctaggaaatacagcccaacctctgcttattcaatgagcaggataaggttattcaattagttcactatcaaattgagacatcgatgtccctatcaatgttttgagagtttggggaagagccaattaaaaaagcatttagctgggcctgatggcacatgcctataatcccagcaacttgggaggctgagaggcaggaggatcacttgagaccaagagtttaggaccagcctgggcaacagtgagttgctgtctcaacttataaaaaagaaaccagttagtaggaattacacctttatgtaagttagtgaagtggacataagcaagaggaaatggaacagtgggaataagcatttttagaagaaacaatgtaaatgagtagctagaattaagaacatttagagagagaaaggagggccaggtgcggtggctcatgcctgtaatcctagcactttgggaggccaaggcgagcaggtcacttgaggtcaggagtacgagaccagcctggccaacaaggtgaaaacccatctctacttaaactacaaaaattagctgcgtgtggttgcaggcacctgtagtccagctactcaggaggctgaggcaggagaatcgcttgaatctgggaggtggaggtagcagtgagctgagattgtgccactgcactcctgcctgggtgacagatccagactaggagataagatacagaagataattcatttgcagaagggatattagtattgaacgaaaacctagaaaaaggacttcttacccactgggacttttaagtttatttttgagggttctgtgtaactggtgtgcagaattgcatcaaagctgcatgttttcttttctcctaggtgttctattactcaacaggaatcttcaaggatgcaggtgttcaagagcccatctatgccaccatcggcgcgggtgtggttaatactatcttcactgtagtttctgtaagttggatggtttggtaattttgaggggagaaaagaatccttgctacagatgttcaaagatggattgcatgaccctaccatcatttagttacctttttgttgcttaattttcctttgggaaaaagagataaatttaatgttggatgtagtcttcactcttcaagcaaatatgggatggatgggaaaggagggagtatagaagggactatatagtatgctttgaacttggaattggaggaaaggtgcttggaaaaactctcaagctctgttactccactgtttttacactaaaacaacaataatcaacagaagttatctgtgatccccagaatatgtgagaatttttccccgtgaggtgtgcaatcagttccgtagtggacaccatctaggtgtcctgcgattttttaattatgacactgtctacctggagatagcatcagatctcacaggttggtggcccagttcccaagactgccccccactcctgatgccagtcacaagctccaggttgttttacctgtgcttctgactcaccagctgtagatcaggattcccacgacatcctctttgggtttgattaatttgctacagtggctcacaaaactcaggaaaattgtttcctagtttgatttaaaggatattttaaagcacagaaatacacaaccagatgaagagattcacggggcgaggtctggagggatcctgagcatgggagcttctgtctctgtggggttggggtgcactcctagcacatagatgagttgttgctgaccttcctgtcagcttccacgggttcagatatctggaagctccccataccctgccttttgggccttttatgcagacttaattggttctccatgattgaagcatggacaactgttctgacctgtgattggacaaaaagggaatgatctgaacccagctgggcctgtctgcttagatgatttgttggcctctctgtagcgtttcttcctctagggtgtggggcaggaccctctctgaaatgagggttttatgacccacagtcagattagcgtcctgccaagtgggagggcaggagaaagtcagagaagaattctgttatctgaggcctgctcctgaggcctgaagcatcccaacattatgacaaaagactctaccaagggctatggggattttgagccaggacctgtgaatggcacacaatatgtatgtatataaaatcataaatcacaggaggggtatccataacaagtgtcctgctgttggtaaggcagatttcaagtagctcagatgctgttttcatggaaaggaaaactgaagtttcatgtcatattcttcttccagctatttctggtggaaagggcaggaagaaggactctgcatatgataggccttggagggatggctttttgttccacgctcatgactgtttctttgttattaaaggtaggtgctctttgggtgaaaaaaaagggagggggaaagaagagaggttacagttgacttctgtgacacaaggggtgggttgttaaggttgcagtttgtcaataaagtcagaggagagaagcaggatgcccagagtttaagaaacatgggtcgtcagagaactggaggtaaactgttagaatccttacatttatagaacattattatagcttataaaataaattatctaatttaattcttagaataatatcaaggtaatcacacttaatagatgatgacatggtctcagtacaaagtgacatatatgagatcatatagatgggattgaaaaattcaatcctcagctgggcgcggtggctcacgcctgtaatcccagcacactgggagggtgaggcaggcggatcacctgatgtcgagagttcaagaccagcctgaccaacatggagaaaccccgtctctattaaaaatagaaaattagccaggagtggtggtgcatgcctctaatgtcagctacttgggaggctgaggcaggagaattgcttgaacccaggaggcagaggttgtggtaagtcgagatggtgccattgcactccagcctgagcgacaagagcgaaactctctctcaaaaaaaaaaaaaaaaatccaatcctggctgggcgcagtggttcatgcctgtcatcacaacactttggaaggccaaggttagaggattgcttgagcccagaagttcaagaccagcctacgcaacatggcaagaaactttctctacaaaaaaacaaaaaaaaattttttttttgagacagggtttcactctgtcaccaggctggagagcagtggcaggatctcagctcactgcaacctctgcctcctgggcttaagtgtttctgctgcctcagcctcccaggtagctgggattataggcacgtgccaccacgctcagctaatttttgtacttcttagtagagactgtgtttcaccatgttagccaggctggtctccaactcttgacctcagataatccacctgccttggcgtgagccacagctcctggccaaaaaaaaaatttttttttaattaggcaggtgtggtggcacatgcttcaagtccaagcgatttgagaggctgaggtgggaggattgcttatgcccaggagatcgatgatgcagtgagctattgtagtgccactgccctccagcatgggcaacagagtaagaccctgtctcaaaaaataaaaataaaaataaatccaagccttttgactccacagccactctttgtattgtacgtcagggacaggaggagcttgccgttaattgcttccgggaacctagatactaggttacactgtctttaaatttaattttctctgttccttgctcttacaggataactataatgggatgagctttgtctgtattggggctatcttggtctttgtagccttctttgaaattggaccaggccccattccctggtttattgtggccgaactcttcagccagggcccccgcccagctgcgatggcagtggccggctgctccaactggacctccaacttcctagtcggattgctcttcccctccgctgctgtaagtaaactcaccttatcttaaaaccagcctatgtaagctgacatgaagatactccttaataatacagtagtctgggcctggcatggtggctcatgcctgtaatcctagcactgtgggaggctgaggcaggtggatcacctgaggtcaggagttcaagaccagcctggccaacatggtgaaattcaaaaattagctgggcatggtggtgcatgcctgtaattccagctacttgggagatcgaggaaggagaatcgcttaaacctgggaggtggaggttgcagcgagctgagatcgcgctactgcactctagcctgctcgatggaagcaagactccatccctaaataaataaaaaaatacagcagtccctcctcttcttcagtttcagttacctgtagtctaaaaatattaaatggaaaattgcagaaataaataattcataaagtttaatttgcggccagacacagtggctcaagcctgtaattccagcactttgagaggcctaggcgggtggataacttgaggtcaggagttggggaccaacctgactatcatggtgaaaccctgtttctacaataaatacaaaaattaggccgggtgtcgtggctcatgactgtaatcccagtgagcgagatcacaccattgcggtagcacacacctgtagtcctagctactcagaagactgaggcaagagaatcacttaaacccaggaggtgttcatggtgagctgtgatcaaccttctgctctccagcctgggtgacagagcgagattccgtctcaaaaaaaaaaaaattcataaatagagatggagttgcccaggttagtctcaaactgctgggttccagtgatcctcccaccttgacctcccaaagtgctgggattatgggcgtgagccaccgcactcggcccagaaacacagattttaaaaataatactcaaaagtccaaaaatactcagtagacatttggaagcatctaactgtaatgaaatggaatgacagaaagaaaactagagagaactacagtaagttagcaatggaatcataagcgaatctgaagaaacctgttttcattaaatatggaagggttatagcttgaagcctattggaaatatgaatgtgaaggaaattgactttgtcaatgaccagatttttatatcaaccttccttttttctgtcctttctctagcactatttaggagcctacgtttttattatcttcaccggcttcctcattaccttcttggcttttaccttcttcaaagtccctgagacccgtggcaggacttttgaggatatcacacgggcctttgaagggcaggcacacggtgcagatagatctggaaaggacggcgtcatggagatgaacagcatcgagcctgctaaggagaccaccaccaatgtctaagtcgtgcctccttccacctccctcccggcatgggaaagccacctctccctcaacaagggagagacctcatcaggatgaacccaggacgcttctgaatgctgctacttaattcctttctcatcccacgcactccatgagcaccccaaggctgcggtttgttggatcttcaatggctttttaaattttatttcctggacatcctcttctgcttaggagagaccgagtgaacctaccttcatttcaggagggattggccgcttggcacatgacaactttgccagcttttcctcccttgggttctgatattgccgcactaggggatataggagaggaaaagtaaggtgcagttcccccaacctcagacttaccaggaagcagatacatatgagtgtggaagccggagggtgtttatgtaagagcaccttcctcacttccatacagctctacgtggcaaattaacttgagttttatttattttatcctctggtttaattacataattttttttttttaactttaagtttcaggatacatgtgccgaatgtgcaggtttgttacataggtatatatatgccatgatggaaatatttatttttttaagcgtaattttgccaaataataaaaacagaaggaaattgagattagagggaggtgtttaaagagaggttatagagtagaagatttgatgctggagaggttaaggtgcaataagaatttagggagaaatgttgttcattattggagggtaaatgatgtggtgcctgaggtctgtacgttacctcttaacaatttctgtccttcagatggaaactctttaacttctcgtaaaagtcatatacctatataataaagctactgatttcctttggagcttttttctttaagataatagtttacatgtagtagtacttgaaatctaggattattaactaatatgggcattgtagttaatgatggttgatgggttctaattttggatggagtccagggaagagaaagtgatttctagaaagcctgttcccctcactggatgaaataactccttcttgtagtagtctcattacttttgaagtaatcccgccacctatctcgtgggagagccatccaaataagaaacctaaaataattggttcttggtagagattcattatttttccactttgttctttaggagattttaggtgttgattttctgttgtattttaactcatacctttaaaggaattccccaaagaatgtttatagcaaacttggaatttgtaacctcagctctgggagaggatttttttctgagcgattattatctaaagtgtgttgttgctttaggctcacggcacgcttgcgtatgtctgttaccatgtcactgtggtcctatgccgaatgccctcaggggacttgaatctttccaataaaccaggtttagacagtatgagtcaatgtgcagtgtagcccacacttgagaggatgaatgtatgtgcactgtcactttgctctgggtggaagtacgttattgttgacttattttctctgtgtttgttcctacagcccctttttcatatgttgctcagtctccctttcccttcttggtgcttacacatctcagaccctttagccaaacccttgtcagtgacagtattttggttcttagttctcactgttccctctgctcctggagcctttgaataaaaatgcacgtagctgaggccggatgcggtggctcacgcctgtaatcccagcactttgggaggcctaggcgggcggtcaggggttcgagaccagtctggccaacatcgtgaaaccctgtctctactaaaaatgcaaaaattagccgggcgtggtggcgggcgcctgtaatcccagctacttgggaagctgaggcgggagaatcatgtgaacccgggacgcaggggttgcagtgagcggagatcgcatcattgcactctagcctgggccacagggcgagactccgtctcaaaaaaaaaaaaatgcacatagctatcgagtgtgctttagcttgaaaaggtgaccttgcaacttcatgtcaacttctggctcctcaaacagtaggttggcagtaaggcagggtcccatttctcactgagaagattgtgaatatttccatatggattttctattgttactctggttctttgttttaaaataaaaattctgaatgtacacgacattatgggcttatttactttttgtccttcctgtaaccacaaaatgagctctaaatcctgacttggctactcagtgcctgttgactttgagacttgtatgagaccctcatactcatgagactgtgttcttagagtctcatacataagagaatagcaatatgtgtttattatgtagattaaatgaaaaagctttcgtggccaggcgcggtggctcacgcctgtaatcccagcactttgggaggccaaggcgggtggatcccctgaggtcggaagttcaagaccagcgtgaccaacatggagaaactccgtctctactaaaaatacaaaaattagctgggcatgatggcgcattcctgtaatcccagctacttgggaaggctgaggcaggcaaatcgcttaaacctgggaggcggaggttgcggtgagcagagatcgcgccattgtactccaccctgggcaacaagagcgaaactccgtctcaaaagaaaacagctttcatttgttgcttttcatacttgataaattattttgctttctttccccactgagaactagctattttgtttgtttgtttttctcttgtgttctttttacttcctcctccagtctttttttttttttttttttggagacagagttttgctcttgttgctcaggctggagtgcaatggtgtgatctcagctcactacaacctctgcctcctgggttcaagccattctcccgactcagcctcccaagtagctggtattataggcatgcgccaccacacccggctaatttttatatttttagtagagatggggttccaccacgttggccaggctggttttgaactcctgacctcaagtgatccgcccacctccgccttcccaaagtgttgggattacaggtgtgagccaccgcacctggcccagagtgatcttttaaaattgaatgttactctgctgcttaaagccttccagttacatcttaccacttaaaataatatccaaactccttcaccatgactgacaaatctagtgaccttaggtcccagtttaaattgccttgattcattttcacaactgccctatctgcctaaaagccttgcctctccaatttcacatcttgttatatgcattttttttttttttgagacagagcttcattcttgttatccaggatggagtgcaatggtgtggtctcggctcactgcatcctcagcctcccgggttcaagcgattttcttgacttagtctcccaagtagctgagactacaggcataggccaccacacccagctaatttttgtgtagagatcgggtttggccatgttgactaggctggtcttgaactggactcacgtgatctgccagcctcagcctcccaacgttctgggattacaggcgtgagccaccacacccggccctaagtgatgtttatttaaagtgtcagtctgggtcctatcagaagacaaaaatgacacttttttttttttggaaataatataaagaatatcaagctataggccgtgcgcggtggctcacacgtgtaatcccagcactttgggaggctgaggtgggtggatcacctgaggtcaggagttcgagaccagtctggccatcatgctgaaaccccgtctctcctaaaaatacaaagaaaaattagccgggcttggtggcaggcgcctgtaatcccagctgaggcaggagaatcgcttgacccagggaggcagaggttgccgtgagccaagatcgtaccattgcactccagcctgggcaataagaacaaaactcctttaaaaaaaaaaaggtataagacaaaatgcagtttcctagagctgagggagattatccaagaaatgacaaacttggaaggaaggccactgccatctcctcaaaactgacgtgcacaccttattggagaatgtagagtttcagtctactggagagcagagaagtctggtagtttgcctgggtcagtgctggtgtgcagtccctgggcaagcagggaacacacag

SEQ ID NO: 154 - DNA, 38684 bp, Human
  misc_feature (1)...(38684): n = A,T,C or G
ctgtccccgcttccccgggctgggccgtcaaggcggggactgggagtgtccgcgtcccccccagcgacccccggttttagttaccccctcgcccaaaggcagggagaagtggaagatctgggcctagatagaagcaggtgtcatgcacttgacatgactgatgactacaaactttggacgattatttttggggggaggatgggggacggagatgagtctcgctctgtcgcccaggctggagtgcagtggtgtgatctaggtgcgctgcaacctccgcctcccgggttccagctattctcctgcctcagcctcccaagtagctgggattacaggcgtctgccaccatgcctggctaatttttgtattttcggtaaagacagggtttcaccatgttggtcagactggtctcgaactcctgacctcaggtgatccacccaccttggcttccccaggtgctgggattacaggcgtgagccaccgcgcccggccggattcttctttgtgttggattgcacacctgtacccgtctcctcactcccccatcgttgatttcctctccccaccctacccctgcaattaaagtgcattttctttggaaactttttctagatctttgaaataattggaaacctctggtcttgctatgcgttagtcacaagtcagtgtgctaggacagtgatacgcagaagaaaaagacaggcagtagctggtgaaagggaatgctgagttctcccttgtgaatagggacccccccgaccccccaacacacacacacacacagacggccacgctgctaggcttctcacagtctcccaccctgagcaaccctggggatttgctgctaatgcaaggaacagtgcctaacacaggctcccagtctctgcttgtttaaagatgcatgagattcagaatcaatcactaaagtaactggatttacgccacagcaaatagaactgggagtatgttctgtaaagatgaaaacctgtgggacttgtgagactttggattttggccacttgcgctggtgtgccctgtggcagctgaatgagtgccaaacatggggggctgacagtggcctggccttgagatggccggacccggaccagcaggtgtgactcattttccctgccctgcctggaaaggggttcgaggtatttaccaccttcccagtagtgatgaatacacagaaagtaacatccctaggtcattctgagctccttaaaatggaaaataagaggccggacacgatggctcacgcctgtaatcccagcactttgggaggccaaggagggtggatcacttgaggtcaggagttcgagaccagcctggccaacatggcaaaaccccgtgtctactaaaaatataaaaattagccgagcgtggtagtgcacgcctgtaatcccagctactcaggaggtggaagcaggagaatcgcttgaactcgggaggcggaggttgtagtgagctgagatcatgccactgcactccagcctgggacaagagcgaaactccgtctcaaaaaaaaaaaaaaaaaaaaaaaaaaacagaaaatgagaaactttccccaaacagtattacacggtgacttgggcaaaactgactctccaccaagagacacttgactgtagttttcctggcagggagagcatctttgaggtctctagtggcccaatctgttgccctcagattacctggtgtcatgtagggtggaggacagctgttgtttgccacgcgttcctgacagaaataacccttccagtcattcaccatgagcctgactggtagagactttagcaatggggaaataccgtagactgttccatcaggacaatgctgggcctgcagtccccagggggcacccacttacttagccaaaccccagacgtttcatttaaaagcagaagtgaaaggaagaccaggttcctgaaagggttattctgacttaatctggctataaaaatgctattggctgttatttggcatggccaaagtgcacccagaatgtcttctctctccattcagtgcacgcgttactttggctaaaaggaggtgagcggcactctgcccttccagagcaagcatggagcaacaggatcagagcatgaaggaaggggtgagtgtgttgctcagggaaaggggccaagagcaggcttggctgccagggcctgtgcagccttcctggagagtcgctggggggctcctggtgttgcagagggaactctgtgttgggagggattatggtggggagagggggaaagtcttgtccagcaggtggtcttttatagggaggagagaggtttagagacaagtgctctgtggaaatcattctactggaacagcctttaacagcaggatctgtaactgaatggaagagacccaaaggattcatttgtcccaacttgaaccaaacatgttagctgcaaaatccttctatggttggtgagatgtttcgctctgctttcgttttgcttttggcttcagggcagttaattttttcagcaagtaacatagctgagctgcatgaaagcaagataaactcagaaaaggcgttgcttgatttgaatttagttcagatctgtcacgtaggtttcctgccttttagatcctgaggctcccttgttttagagaggaaagattttcatggactcctgcaacgtaattgcagtttactttctagattcccttgattgaggaaaatgcataatgtcagaaaagtaacactgacttattaacactttataagaatttgcatttattcatcacaatagcatctgcttatatttggagtggaggaaggatagtgcacatttttgcaaaacagcatttgttcaggcatggatgtgagaccctcaccataggcagactggaaacatgctctgtagcacatagattaagagtgggtcttgggaggctgaggtgggtggatcacctgaggtcagcagttcgagaccagcctggccaacatggtgaaaccccatctctactaaaaatacaaaaattagccaggcgtggtggcaggtgcctgtaatcccagctactcaggaggctgaggcaggagaatcacttgaacctgggaaacagaggctgcaatgagctgagatcacgccattgcactccagcctggtcaacaagagcgaaacttcatctcaaaaaaaaaaaaaaaaaaagagtgggcctgggaagtagcagcccccaggattcattcctgctccatcctattctagctgtgggacttgggtaagttctttaactcttcagtgcctcagttttctcatttgtaaaatgggagtaataaccataccgcctcatagggtgctggagcaattaaatgagataatgcatgtaaagtacctggcacagagtgagttccccgtaaatgttactacttttctttctctctctctcgcttttttttttttttttttttgacacagagtcttgctctgtcacccaggctgaagtacagtggtgcgatcaaggttcactgcaacctccaccttctgggctcaagcgatcctcccacctcagcctcccaagtagctgggattacaggcatgcaccaccacacccggctaatttttgtatttttagtagagatggggtttcaccatgttggccaggctggtctagaactcctgacctcaggtgatccgcccgcctcggcctcccaaagtgctggggttacaggtgtgagccaccgcgcccggccatcgtaaatgttactacttttcaatcattctttaggctggtttctccacctccgcgtgatttccatttggcactggctaacgcttcgttgtaggggctgtcttgtgtgttataagatgtttagccgcgtccctggctctaccttctagacgcagtagctccctcccccaggagtgacaaccgatgtccccgagagggcagaatccactcccagccctcaactgagaggcactgctttggagtctactcagccccttcgcttgggtcatcttgtttgtcttacaactaagaaagtgttagacaaatcaagtgtcatcacctccattttatagaaaagaaacggaggtgatgaggacttaggtgtttggggtccagggaggtcctccgctgtccagagaaaggcacaactgccacgttccccacgtccaccaagtccagctgcagaaaggaatggaaacacccccacgtggcaggccctgaaactgagtaacacattgcgaaaggaaatgtttcagatggccacatgcgagaggcatgggctgacccagctgcctgctgcctcagccctccagggaaggaagcctcctctgggccagagggatgaaggtggggatgggcttcccgctcctgagagcagcctgccccttggggagaaagctggggcgtgctgggcttcccaaaacactctgaaggaagcgatcccaatggtctgtaagaatccgggaaatcattaagtgcagccgagaggggatgtaggagccaaggagaaatgcgggggcaggcgaaggctacagaggctgcgcggtcctgggaggagggcgtctggcagtatggagccagctgcctgcccctcagtggttgtgtggcagtggcctcactggccttttctcttctttttctttctttttcctttttttttttttttaattttgagacagggtcttactctgttggccaggccagagtgcaatggtgggatcatagctcaccgcggccttgaagtccggggctccagcaatcctcccacctcagcctcccgagtagctgggactacaggcatgtagcaccacccttggctaatttttaaatattttgaagagacggggtctcactatacccaggctggtcttgggctactgggctcaagtgtgccttctgcctcagcctcccaaagtgcttggattgtaggcctgagccactgcactcagccctgcttttctcctatgtagagggcaaacactgacatctatcagatgtgcaccaaggactttctgccaggaagaaaagactgttggtctgaaagaaaaaaaaataaaatggattaggaaaagaaaaaggtacaacaaggtattttacaactacataagaattgagggccaggtgcagtggctctggcctataatcccatcagtttgggaggccgaggcaagcggattgcttgagcccacaagtttgggaccagcctgggcaacatggcgaaacttggtctctacaaagtgtacaaaaattagctgggcatggggaccgtgcctatagtcccagctgctctagaggctgaggtgggaggatcgcctgagcctgggaggtagagtttgcagtgagcagagatagtgccactgcgctccagcctgcgtgactccagccagagtgagattctgtctcaaaaaaaaaacaaaggattgttgaataaagttccccacctcaataaaaagatgccgaagtgctttggaaaataaagacacatttttgtggagtggctccaccagcaactagttgagtatcctagagcaactgacacccctctgtgctctccgggtcctcactgatattcatttgtaattaatggattaattaacacatttgtaacacctactacagaccaggcatggtcctaagtgttctataccagtgaactcatttattcctgtggtggtatcattatcctcaaaaaaaaatttttttttgaggcagggtctggctctatcacccaggcaggagtacagtggcacaatcacggctcattgcagcctcctgggctcaagagatactcctgccttgtttttaaattttttcgtagagacgaggtctcactatgttgcccaggctggtctcaaactcctgggctcaagccatcctcctgcctcggcctcccaaagtgctgggattataggcatggaccaccaggccaggcccattatccccattctaaaggtgaaggaactgagaagctcagggagttgcccaaggccacacagcccagcagagccaggcttcgagcccacactcctgggctccagaaactgtgctccaaaccaccgcagcggctgacgatgctcatctctccctgcccctcccactacctgtttgtgaaactgagttcaacagtgtgataaagtgacatagcttgaagtactgatcctccatgagcgctaactactccggggtgtttgcattctgactgcagattcctaacaaggaaaagctttgaactgagagaatgtctctctgacaacagaaacttcaggatggatttctaagggagatggtttgggcttccttcccagtgaccttgaatcgtaccctgtcagaaggtcagccttgaggattgtcaacctaaaaaaagaaactgtagcaaaatgaatgtagagagtgtactggggccaaggttgaggactgtagccctgggaaacactgggaagtactttggagagcataggagaagttcaagtttttaaagaaaaaaggacaaatcaggagaggagtgattacaaacggtgtttgttaggaattctcactggtttagagaaatgacattgatttagtgataggctatacatttttttttttttttttgagacagaatcttgctcttgttgcccatcctggagtgcaatggtgtaatttcagctcactgcaacctccacctcccgggttcaagcaattctcctgcctcagcctcccgagtagctgggattacagacgtgtgccaccatgcccggctaacttttgtatttttagtagagacggggtttcaccatgttgtccaggctggtcttgaactcctgacctcgtgatctgcccacctcggcctcccaccaaagtgctgggattacaggtgtgagccaccgcgcctggcctacattgttgactgtagagtatgcgctgtggtgtccggtgtatggcattgttaggctaatttactgctacttggtggcaacactcagtgtagagtccacatagcaggcagatgacttagctcacgtgggaataagatgtgactgctgctgtatttcagtgctttgctggcccggtcatttaaaggggtacacatcccccaaaaagtttcttttctttcttggggtggtcgttattactaaagtctcaaaatgttctctgtattatgaaagggaggaagctggtttactgacagcatgaggaatgtggtttctggttttccctgaagcacagctcagcgtcttggcaacctccttagcctctaaggagagaccctcccggtcacggctgggggtcactggggcttctcattttaacaagctggccagagacccgcacatcctcttcagcccctcccttttccttatgccctaatccagcccagtaccaaattctttttgttctccctcctggaaagcaaaaaaagaaagaaagagggcttaagccttctttctactatgtgccttttaaaatgtagtactgcatctttattgagaatatatctcaataccatacaatttcacccctctaaagtacacaggcccaggctggcactgtggctcacacttataaaaccaacactttgggaggctgaggcgagaggattgcttgagaccaggagttcaagactagcttgggcaacatagcaagaccctgtctctataaaaaatgtaaataggccgggcgcggtggctcacgcctgtaatcccagcactttgggaggccgaggcgggcggatcacgaggtcaggagatcgagaccatcctggctaacacggtgaaaccccgtctctactaaaaatacaaaaaattagccgggcgtggtagcgggcgcctgtagtcccagctactcgggaggctgaggcaggagaatggcgtgaacccgggaggcggagcttgcagtgagccgagatcgcgccactgcactccagcctgggcgacagagcgaagactccgtctcaaaaaaaaaaaaaaaaaaaaaagtaaataatagcctgatgtgttggctcacacctgtaatcccagcactctaggacccaaggcaggtggatcacttgaggtcaggagtttgagaccagcctggccaacatggtgaaaccccgtctctactaaaaatacaaaaattagccaggcgtggtggcatgcacctgtaatcccagctatccgggaggctgaggcaggagaattgcttgaaccgaggaggtggaggctacagtgagctgagattgtgccactgcactccagcctgggcgacagagcgagactctgtctcaaaacaacaacaaaaaaaatttaaataaataaagtatacaggctgggcatggcagctcacacctgtaataccagcactttgggaggctgaggcaggaggattgagaccagcctgggcaacaaagtgagactctgtctctacacacacacacacaaagtacatattaatatataaaagtatacaatttatcaccaaagtgaaataagccaggcacgggaagacaaacactgcatgatctcacatgtggaatctgaaaaagttgaactctctaagtcgaactcacagggtgagaagtggtgtctcatgctgatttttatttgcatttgcctcatgggatagcaagtctttttaatttgcatcctcagtagtcctcaaagctggtacttttaacccctaccgtggcccgttccattacccaagtgcccatctgctgtctgttggcctctgcagtaacctggtctcccttctgctctgcacgtagtagctggagtaatttatttatttatttattttttttttgagacagagtcttgctctgtttcccagactggagtgcaatggcgtgatctcggctcactgcaacctccatctcccaggttcaagcgattctcctgccttagcctccctactagctgggactacaggcatatgccaccacgcctggcttatttttgtatttttagtacagatggggtttcaccatgttgctcaagctggtctcaaactcctggtctcaagtgatcctcccgccttggcctcccaaactgctgggattacaggcgtgagccactgtgcccagcctggagtaatttttttaaagttcaaatccttccatcccactccttggctacagagcacatggagggaacagatggagtgaatatggagtgaacacccagtcttttctgtggccctcaccccggtttgccctcctttccccacgctccagccacactggccaaattccagatgctcaaaggttctgagctccgcctgcctcaggccttcccacatgctgttccctctctctgaatcactctcttctccctcctctcctcagctgaaatgttgctccccagacctctctttttaaccactcctgtgtttttcttcttagtacttactacagttacagtttattacattctcatgtagtttcttaatgtgtgtctttaccattgacaatagtctgctgggggcagctgtcttgcttacccgagggtactgtgcttcctggagtccagttagctggtcatgcatatttgtttaatgaagttggctggaccggcagggttagcgagaacccacctagaataactttgctactcccaggagagtgagccatgatttctactgcgcccacagaatgtgcctgtggcttgaattcagggaggcagtgaaagaatggagggtgaattgaatgctctatgctcagagactctatagcctgatcatttagtcgctctgatctctcctccatagtctctctgatcatttttgctgggatcccatcaaagcggtcagggagctggctctccatggtgcctggcagaacccccaactctggggcatgagccctgggaaccagccagctccaccagctgggctgtgcttgttggctgtgctgctggccagaaccccacccctgaccccaaaggacttcaaaccttagggcactcatcagactgagggagtggtcaagagctgcacttggctgtgtgaatgaagctggttgcactttcgtcttactgagaagagaattagaaaagaattttttttttttttttgagacagggtctcattttgtggcccaggctggagtgcagtggtgcaaccatagctcactgcaaccttgaattcctgggctcaagtgatcctcccacctcagcctcgtgagtagctgggaccacaggcgtgtgccaccacacccagctaatttttaaaatttttttgatagagacaggatttccctatgttgcccaatctggtctcaaactccagggctcaagtgatcctcctaccttacttagcttctcgaagtgctgggattcaagcgtttgccatcacactcagatagaagggattttttcttttttctttttttttttttttgagacagggtcttgcactgtcacccaggctggagtgcagtggtgcgatctcagcttactgcaacctctgcgtcccgtgctcaagtgatccttccacctcagcctcctgagtagttgggattacaggtgcacatcatgcccagcaaatttttgaatttttagtagagacgaggtttcaccatgttgcccgggctggctgagaactcctgggctcaagcagtctacccatctcaacctcccaaagtgctgggatttataggcatgagccgtcgtgcccagaagagaattttttaatcaacattttcttcccttcccctcacccccacccctctctctttgtctgtaacaaaatcaagcagtagaacagctataggggagggatttttgtctgtcttgtttgttcaccgctatatccccaacacttagagcaatgcttgttcacattgggcgcccaatatgttgaatgnnnnnnnnnnnnnnnnnnnnatctctcctccatagtctctctgatcatttttgctgggatcccatcaaagcggtcagggagctggctctccatggtgcctggcagaacccccaactctggggcatgagccctgggaaccagccagctccaccagctgggctgtgcttgttggctgtgctgctggccagaaccccacccctgaccccaaaggacttcaaaccttagggcactcatcagactgagggagtggtcaagagctgcacttggctgtgtgaatgaagctggttgcactttcgtcttactgagaagagaattagaaaagaattttttttttttttttgagacagggtctcattttgtggcccaggctggagtgcagtggtgcaaccatagctcactgcaaccttgaattcctgggctcaagtgatcctcccacctcagcctcgtgagtagctgggaccacaggcatgtgccaccacacccagctaatttttaaattttttttggtagagacaggatttccctatgttgcccaatctggtctcaaactccagggtggatggaaggccacaaaagagtccagatctgtaaacatggtttctgcaggaggtgtactgtttacgcgacatctcccaggctgtctcattgtcaagagtggactttcatccccaaaacgttcatcaggaaagaatttgtgaggattctaaaaaagattaaaaaaaaaaaaaaggacatttattagcagatttcataagtggaaatttataggctgagagaattaagtgaggtacttaagaaaaccacagtcagcaagaataaaaagcataatatatttttctaggccagaagcccaagaaaaaaatcaccttagttatagtacaaaggcacagagtgcagcctaggacacagccatgaaagaaagctgcttgatcgaatgctcctcaagcaggtcactcatctcagattatgtgataatgcaaaaactggtaataaaaccaaactctaatatgtctttgctaagagattaacattaaatgccaaagggagaaaggaatacaactgaggatgttctagaaactttctgacaagacatctatgcctgctctgtctgaaataaaaactacaaaatactattcattacccattatacatgactaagtctgaccaatattttggtaaacattataaaagaatatgtcatgcaatttaaggtaccaaattcagacacaatttagaatggcaaagggaagtgatcctcctaccttagttagcttctcgaagtgctgggattcaagtgtttgccatcacactcagatagaagggattttttcttttttctttttttttttttttgagacagggtcttgcactgtcacccaggctggagtgcagtggtgcgatctcagcttactgcaacctctgcgtcccgtgctcaagtgatccttccacctcagcctcctgagtagttgggattacaggtgcacatcatgcccagcaaatttttgaatttttagtagagacgaggtttcaccatgttgcccgggctggctgagaactcctgggctcaagcagtctacccatctcaacctcccaaagtgctgggatttataggcatgagccgtcgtgcccagaagagaattttttaatcaacattttcttcccttcccctcacccccacccctctctctttgtctgtaacaaaatcaagcagtagaacagctataggggagggatttttgtctgtcttgtttgttcaccgctatatccccaacacttagagcaatgcttgttcacattgggcgcccaatatgttgaatgattgaatggctgaatagacgagtgaatgaatgaatacacagagcgaatcagatgggaggtgagccaagcctattgtgtgtgcatatgtgtgtgtggggggtgggctgtgtgtgtgtggggtgggctgtgtgtatgtggtgtgtgtgtggggtgtgtgtgtgtggggggtgtgtgggctgtatgtgtgtatgtgtggtgtgtgtggtgtgtgtatttctgcctatgtgtgtggggggtgggtgtgtatgtgtgtggtgtgtgtgtggggtatgtgtgtggtgtgtgtatgatgtgtgtgtggtgtatgtatgtgtgcatatgtgtgggggtggggtatgggtgtgtatgtgtggggtgtgtgtgggaggtgtgtgtgtgtactggaggcatgtgggggtgtggggtgtgtagtgtgtgtacatgtagggggcatgtgtgcgtgtgtgtatgtagtgtgtgtacatttggggggcgtgtgtgcttgtgtgtatgtagtgtgtgtacatgtgggggggcgtgtgtgtgtgtagtgtttgtgtacatgtggggagtgtgtgtgtagtgtgtgtaccatggggggtgtgtgtattgtttgttacatgaggggcgtgtgtgtagtgtgtgtgtagtgtgtgtattgtgtatgtagtgtgtagtgtgtgtagtgtgtatgtagtgtgtgtgttgtgtgtgtgtatagtgtgtgtgtattgtgtgtgttgtgtgtgtagtgtgtgtgtgtagtgtgtgtattgtgtgtgtgtggtgtgtgtgtactgtatgtgtgtagtgtgtgtgtgtagtgtgtgtgtgtgtgtgtgtgtgtgtgtagtatgtttttgctcttcaccagggctccttgcaggtgctgctcttcagaggttcactccaccccatctggggccccatgacaaggcaggaatgatcattgtttctctccctttctggctcctcacttacctctctcaagacatcctctttaggccgggcacagtggctcatgcctacaatcccagcactttgggaggctgaggcaggaggatcgcttgagcccaggagtttgagaccagcttggacaatataatgagacccctgtctctataaaaatatattttttaattagccaggcatgatggcatgcacctgtagtctcagctactcgggaggctgaggtgggaggatcacttgagcccaggaggttgaggtcacagtgagctataatagcaccacagcactccagccagggcaagaaaagtctctgtctcagaaaaaaaaaaaaaaaaaaaagattctctgtagatttagataccgtgggatagtgcttgtcttgtcactggagggccaagcatgaacctgtgttacctgtgaaagggggctctctggccaggcgtggtggctcacgcctgtaatcccagtactttgggaggccaaggcaggcagatcacgaggtcaggagattgagaccatcctggctaacacagtgaaaccccgtctctactaaaaaatacaaaaaattagccaggcgtggtggcgggtgcctgtagtcccagctatttgggaggctaaggcaggagaatggcgtgaacccaggaggcggagcttgcagtgagccgagattgcgccactgcactccagcctgggcgacagagcaagactctgtgtcaaaaaaaaaaaaaaaaaaaaaaaaaaaagaaaggcggctgtccatcagagtagatggaagaaggtcctttgatggcaagtcagagagcagcgtcccaagctctctccaacagcagattcacctctgcagctagacatggtcgtaattaatcctggcaaacactctggtagggagtgtgattgtcctcatttcagagatgaagaaactgaagatcctagaaattaagctgaaaagtggcaacaggtagattcaaaactgaggcctgtagattttaagcccgcagctctttccatgtctgtctcctgctcttcattactaatgaatttcctcttgtcattaaagattgtctgaaaggaaattttcagtggccaaaatagctaaaattttctctttttctctttgattttctgggagtttatgtttgagatggtgcaagagcacatttgctgcagttggcaaatgccccacgtggcaggaatgtcacaggagcaattcaaacagctgcagtagctgcagtgttagagaagtaggtttcagcttctctctgatccagtggttctcaaatggagcacttccccaccaggggacacttaacaatgttggaagacatttgggttgtcgcagctggggagaggggtgctactggcaccatgttcacaggatgctgtaaacatcctgctgtgctcaggacagcccccataacaaagaattatcagaccccaagtgtcaaaagtgccatggttgagaaagcctgtaacccaaggtgggttgagggtaggtttcaaggaatggagtagtctcaagactatggatcttcagattctgttacatctttctacgaaaccgaagtaaagcgggagggccctggaaccctggggctgcttcctgacctaagctgtgatctctgcagaggctgacgcttgtgcttgccctggcaaccctgatagctgcctttgggtcatccttccagtatgggtacaacgtggctgctgtcaactccccagcactggtaggtcactgtggtgagcaagatgtggggaggacgtttggagcagcccattgcctgggtgggactggccagcgtggggctgttcacgcagtgggtcctgaagcaaagggagagggaaacaccctccggacacagcacagacccgagggaactcgcagacacaggtctcttgggatgggccaggtctggatggacacacagtgggccgggctctaggagggggctcagatcttctgtggccttgctgtttagagggaatccgggggggccaggggtctcccagctgattggaaaattggagtcatccctttctggctgagaaacacccagggtggtttgctgctgagaggcttcccagccctcccggtgggtgcccacccttctcactgctcctgaagctctgtcctgcctcccatcaccccccggttaataaggttggtctctgtgtgcccaggttatttcattgggtgtcctaacagctaatgttcttcttgcaaaaccggatcaaattattttggtgttctgttttgctttgtctcctagctcatgcaacaattttacaatgagacttactatggtaggaccggtgaattcatggaagacttccccttgacgttgctgtggtctgtaaccgtgtccatgtttccatttggagggtttatcggatccctcctggtcggccccttggtgaataaatttggcaggtaagggaaggtgaatttttaattccctgaaactcatagacccccatcagagctaaaatacaggcctacaactgaaatccttaccatgagactaagataataaccactgtggtcatttttcttttttctttctttttttttttttttttttttttaatttttgagatggagtcttgctctgtcagccaggctggaatgcagtggcgcgatcttggctcaccgcaacctccgcctcccaggttcaagcgattctcctgcctcagcctcctgatcctgggatcacagatgtataccaccatacccagctaatgtatttctagtagagacggagtttcaccatgttggtcaagctggtctcaaactcctgacctcaggtgacccacccgcctcagccccccagagtgctgggattacaggcgtgagccactgcgcctggccggtcatttttattttctaatggggtcagaaaagaagatcagacattgacagtgtttggggacctaggcagggtctcaggggttagaagcaggggtggccagggatctacaggccctcgggcagacccggaaggagccgtgtgtgcttgtggagacccaggacttgcttctgctcatactgcccttttgccccacagtgtcatctaggacatctctcttgtgacaccagcctcgtgaacaaaggggtcagggctgtatctttgcccctatttctagaaacattagaaatgccatattttatttcaaaaaagtgtccttaagatgtcacgctcccccgtataaattccatggacattatggaagacctagttagaaagagaattttagaggtccccttgtccaacccgtctagggatgaggagcacgtggggctgagtgaggtcacagatctagtgagcccagagtaacccagactctgactcctcctccagtatttcaagaaaagaatctgagaataaaaacacacagctgggcgcagtggctcacgtctgtaatcccaacactttgggtggcagaggcgggcggatcacctgaggtcaggagttggagaccagcctggccaacatggtgaaactccgtctctactaaaaatacaaaaattagccgggcatggtggtgggtgcctgtaacccccctactcgggaggctgaggccggagaattgcttgagcctgggaagcggaggttgccgtgagctaagatcgcaccatcgcactccagcctgggcaacaagagcgaaactccgtctcaaaaaacaaacaaacaaaaaacaccgctgcagctttgggatctaacatcctcttgagagattagtgttgaacccacagttttccctgtgggccctcatggagcagaacatccctccagtcagaatcagacctgccggacacttcttgagttaagagcacgccgcttggcccacagatggagctgaaggttgctaattgagctgtctacttaggagtctgataaacactatttggctatttgccgttttcttaagtatttgtgggtgttatttatttctttattttttgaggtagagtcttgctctgacgcccaggctggagtgcagtggtgtgaaattggctcactgcaacctccacctcctgggttcaagccattctcctgcctcagcttcccaagtagctgggattacaggtgtctgccaccacgcgcagctaatctttgtatttttagtagagacagggtttcaccatattggccaggctggtctcaaactcctggcgtcaagtgatccacccacctcggcctccccaagtgctgagatgacagaggtgaaacactgcatgtggccagtgttatttaaatagcaactaacttttattaatgagttcctatgtgccaggcactgtcctgactgtgtttagaggtactattacaatcctcactttatttttatttatttatttttgagatggagtctcgccctgtcacccaggctggagtgcaatggtgtgatctcagcacactgcaacctctgcctcccgggttcaaacgattctcctgcctcggcctcccaagtagctgggattacaggcgcatgccaccacacccagctaattttttgtatctttattagagacggagtttcaccatgttagccaggctggtctcaaattcctgaccttgtgatccacccgccttggcctcccaaagtgctgagattacaggtgtgagccaccgcacccggctaatccccactccattttaaagatggggaaatggtgcacagagagacactgtaacttacccaagatcacacagctgggaggtggccaggactccaacccaggatgtttcacttctgagcatgagcaagtaatgtctacactctacttttgttacttagggaaaatatcttctcaatctgttgctttatttttttaatcatacatatagtaccttttttatgcaaaattttaaagtcttcaagtggtcaaatttatagattttgcttctcaactgaggacacttacaaagcaaacactataaatatatatgtgtgagacagggtctcactctgtcacctaggtgggagtgcagtggcatgatcacagctcattgcagccttgaactcctgggcttaagggatccttctgcctcagcctgctaaatagctggaactataggtgtgtgccatggtgctcagctcattttttagtttttgtagagacagggtctcactaggtttctctggctggtctcaaacttctgggctcaagcaatcctcccaccttggcctcccaaagtgctgggattacaggcacgaaccgctacgcctagcctcttctatatttttaaaatttatttcacaattttgttcttccagatagatctggtgttttattttgtatatattgagtgatgagagaaaactaattttattttatttttccaagtggaaagtcagttgctttcaaatttatcttagttattcatgctcctttactcttccatttaaaattttaagtcagcttctcaaaatcccggaagaaagattctgactggcattgctctgaatttataaattaacctgaggaaaactgacatctctacaatgttgaccttgcccactcatgagcaaactagagctttccattgtcttcaggtcttcttacatgtcctccaataaagtttcatcgtaaaggaccaaggatttagttttctttatcctgggagtcactgtggttccttgtctgaagtttcatgtctttgtcatcagttctgagactttttcagccaatatctctacaaatattgcccctccccgattttctccatgaagttcctccgtgtctttgaatctcttatatttcccatcttcttacctctctcgggtgctttctaggtaatttctgcaggtctaccttcctattcattaattctctcttcggatgtaataaacctgctacgtttttaatgattatatttttcatttcaataagttctatttattcgtttttaaaatctactttctatcattgttttagataacttttatagttttttgttctttcctatagtactatttttattttatttttttatttttttgagacagagtcttgctctgtcacccaggctggagtgcaatggcgcaatcttggctcactgcaacctctgcctcccgggttcaagtgattatactgcctcagcctcccaaatagctgagattacaggcacctgccaccatgtccagccaattttagtatttttagtagagatgaggtttcaccatgttggccaggctggtcttgaactcctgacctcaagtgatctgcctgccttggcctcccaaagtgctggaattacaggcataagccactgtgccctgcctatttaaaaaatatatatataaatatatataatatatataaatatataatatatattaatatataaatatatagataaaatatataatatatataatatataaatatataatatatataaatatatataatatataaatatataatatatataaatatatataatatatataaatatatataatatataaatatataatatatataaatatatataatatataaatatataatatatataaatatatataatatataaatatataatatatataaatatatataatatataaatatataatatatattatatataaatatatataatatataaatatataatatatataaatatatataatatataaatatataatatatataaatatatataatatataaatatataatatatataaatatatatannnnnnnnnnnnnnnnnnnntataatatatataaatatatatagtatataaatatataatatataaatccaatatataaatatataatataaatatataatatataaatataatatataaatatataatataaatatataatatataaatataatatataaatatataatatataaatatataaaatatataaatatataaatatatgtaatattaacatataaatatatgtaatataaatatataatatatattatatataaatatatattatatattaatatataaatatataatatatattatatattaatatataatagagtaagaccctatctcaaaaaatatattttaaaaaatatttttaaaacatatatatatatattttttttttgaaatatggtcttactctgtcgcccaggctggagtgcagtggcacgattgtggctcactgcagactccacctcctgtgctcaagtgatcctcctctctagtagctgagactacagggatggggtcttgctatgttgctcagtctggtcttgaactcctggcctcaagccatcctcccaccttggcctctgaaagtgctgagattactggcaagagccaccatgtcctgccattaaaaatagactttattaaagagcagttttaggctcacataattgagaagaggctatagagacttcccatgtacctctcctccaatacatgcatagtctccccctttatcaacatctctcaccagagcgctgtatttgttacaaatgatgagacctgcattgacatatatcatcacccaaggttcatagtgtacattagggtttactcttgatgttgtgcattctatgggttttgacaaatgcgtaatgacttgtatccaccattatagtatcatatagagtagtttcactgccctaagaatcctctatgctctgcctagtcaccccctccctcctctctaactcctggcaaccaccgatccttctactatctccatagtttgcctttcccagaatgtcatatagttggaatcacatagtatgtaggattttctttctttctttttttttgagacggagtctcgctctgtcacccaggctggagtgcagaggcacaatctcggctcactgcaacctctgcctcccatgttcaagcaattctcctgcctcagcctcctgagtagctgggactacaggtgcacgccaccacacccagctaatttttgcatttttagtagagacggggtttcaccgtgttggccaggatggtctcaatctcttgacctcgtgatccgcccacctcggcctcccaaggtgctgggattacaggcgtgagccaccgcgcctggcccagattggcctcttttactaatatgtactgaaggcttctccatgtcttttcatggcttgaatatttcattgtctggttgtaccacactttatcggttcagtaccagaggacatcttggttgcttccagcttttggcaattatgaataaagctgccgtaaacatccatgcacatgtaagtttctgtgtagatatacgttttcagctcctttgggtaaataccaaggagtatgtgattgctggatcatatgagtacagataagcatatgtttaattttataggaaactgccaaactgtcttttaaagtagatatatcattttgcattcccaccagcaacaaatgagggttcctgttgctccagcatttggtgttgtcagagttctgggtttttgttcttctgacaggtggtaccttattgtttaatttgcatttccccgataacacatcatgtggtgcaccttttcatatgcttatttcccatctgcgtatcttggtgaggtgtctgttaagatctttggcccatttttaaattgggttgtttgttttctttttaagttttaagagttctttgtacattttggacaacagtgcttttagatatgccttctgcaaatattttctcctagtttgtggcttgtcttttcatcctcttaacagtgtctttcacagagcagaaagttttaattttaatgaagaccagcttatcctttgtttgtttgtttctttctttctttctttgtctctctctctcttttccttcattccttccttccttccttttctttttttccctccttccttcttctctttttctttctttctttttgcaataaagctttattgtgatttattattgttataaaattacagacaattgctcaggaggggtgtactaccttaaaatgtccacctccctccttgatatgccactggttcctatctttagcttgttctttgtgaattgacctactattctgagaggccctttcacgtgagcaacttcagaccagaattgttggtttacctcttcctccctggaatttcatcagtccagttgacgctgtatgtattttgaggctgtgttggaatcgtctctgtttatgatagttatatcttctttgccattatttcttttacttttatgtaatgcatataacacctctgtgttttatgacatttttatctcaaatcatattttgtcaggtattaagactattacccaacttccctttttgtctttattggctaaagattttatattttctaaccttctgtctttcattttaaggatcaattctttctttcatggattatgcctttggtgttatatctgaaaagtcatcgccaaacccaagactgtctagatttttttttcctaagctatcttctaggagttttatagttttgcattttatatttaggtctgtgaccactgtgaattaatatttgggaaaattctaaggtttgtgtctagattcattttcttgcatatagatgtccagttgttccagcaccattttctttccttttttttgttttttgtttttgagacagggtgtcactctgtcacccaggctgagtgcagtgacacaatcacatcttgctgcagcctcaaacttcctagctcaagcaatactcccgcctcagcctctccagtagctgggactacaggagtgcaccaccaatagtgcccagcaaatttttgaattttttcttttttttttttgagacagagtcttgctatgtcacccaggctggagtgcaagtggcataatctcagctcactgcaaactctgcctcctgagttcaagcaattctctagcctcagtcttctgagtaactggaattagaagtgtgtgccaccatacccggctaattttttttttgtatttttagtagaggtggggtttcgttgtgttggccaggctggtctcgaactcctggcctcaggtgatccacccgccttggcctcccagagtcctaggattacaggcgtgagccactgcgcctggccaatctattatttttttctagagatggcgtctcactatgttgcccaggctggtctggaacttctgtacacaagtgatcctcctacctcagtgtccaaaagtgctgagattacgggcatgagcacggcacccagcccagcaccatctttttgaaaagactgccttttctccattgcgttctctttgctcctttgtcaaggatcagttgaatagacttaacgtgggtctatttctggactctctgttctgttccattgatctatttgtctattcttttttttttttttctttagacagagtctcgctgtgtcacccaggctggtgcagtggggccatctcggctcactgcaacctccgccttccaggttcaagcgattctcatgcctcagcctcccgagtagctgggattagaggtgcgtggctgtagtagagacgacgaggtttcaccatgctgaccaggctggccttgagctcctgacttcatgtgatgccgcccgccttggcctctcaaagtgctgggattacaggcgtgagccaccatgcccggcctgtttgtctattcatttactagtaccacgctgtcttgattactgtagctttatggtaagccttgaagtcaggtgatgttggttctccaatacagtactatttggattccttattttatgacactaatcattttaaacattttatagtccagtctgattctgttgtctgaaggtgtgctgttagtataagcggctctcacgtgtggcaagtttctcagtgtttaggaatgctggagctccactcgctgacagcttcgtccatcatgagggtcctcatcatgagggctccattgcgagaggcccctccagagaagtttgctttgcttctgtcaggatctccagggtaggcttgttcctgacttcaatgggaaggctttccaagttttattaagtgtgatgtttgatataggttttaggtagatttcctttatcagcttaaagaagttcttctatttatagtttgttaaggctggttttaaaaaaaatggctgggcgcagtggctcatgcctataatctcagcagtttgggagactgaggtgggcagatcacttgaggccaggagttcgagaccagcctggccaacatggggaaactccatctctattacaaatacaaacacttagctgggtgtgggggcacgtgcctgtaatcctagctacttggaaggctgaggtacaagaatcactttgacctggcagaccgaggttacagtgagctgcgatcactgcactccagcctgggtgacagagcgagactctgtctcaaaaaaaagaaaggaggaaagaaacttaggccaacttttaaataaacaaaaatttaaaaatcataatggtgttaaattttattgacttcttttgctgcttctattgagataatccgatgttttcccccaatataatgtttgtttacttatttatttatttattttttgaggtggagtctcgctctgtcacccaggctggagtgcagtggcacgatctcagctcacggcaacctccacttcctgggttcaagcaattctcgtgcctcagcctcctgagtagctgggattacaggcacctgccaccagtgggccctgctagtttttgtatttttagtaaagacagtgttttaccatgttggccaggctgatcttgaacacttgacctcaagtgatctgcccacctcggcctcccaaagtgctgggattacaggcgtgagccaccatgcctggccccaatataatctttaatatggtgaaatacattgaaatatttttgtatatgctgttgaatttaatctactaagatttcatttaggattgtggcatccacgttgacataagtgagatggacctatacttttcttttcctctaatgtccttacccaggacaattttggggttggctttcaagattacaccaaaattataaattagctaatgatttcaaaaaccctttactatatcttaatacagagccctttctccattttcaccactgacgccctctggactgtggtcatttccatttgctccccacactgagcgtattcccacaccaggccatgcacttgacctgtatcagtctcaggtcccagagagctaaacgcacagcagtaaagctgctgtaactgctggagcctatgcagaggagacactccagaaacatttcttgaatgaaagagtgaattcttcagcaaaactaactgatattttgtcctctgcagaaaaggggccttgctgttcaacaacatattttctatcgtgcctgcgatcttaatgggatgcagcagagtcgccacatcatttgagcttatcattatttccagacttttggtgggaatatgtgcaggtaaacaatgctatgctgtattgccattctgtgagggtcgtcaaggaggaggacaacaggttcccagggactagaaccaatctgtgatgtctgaagcgtgtagaaagcgttcctatacctctgctgtgaaacagatggttgagccctacctggttctcaggtgcagagctttactgtgatgtttcctacaaagaaacatctttgaaagactgaaatgcagaatcttaacctgggaagtgtcattccaatccaatcctttatctcaatattttctcaactgcaggtcatgaccagttagtgggtggtgatgtctgtttagtgagcagcattttctttttaaaaatagaatagctgagtgcagtggctcacacctgcaatccagctactctggaagccgaggcgggaggatcacttgaaaccagcctgggcaacacagtgaaaccctgtgtattagtctgttttcacactgctgtaaagaatactccccaagactgggtaatttataaagaaaagaagtctaattgacttacagttccccatggctggagaggcctcaggaaacttacaatcatgatggaaggggaagcagacctgtcttacatggcagcaggcgagagagagagagagagagagaagggaaactgccttataaaaccatccgatctcatgagaacttggtatcacaagaaaaacatgggagaactcgcccttatgatccaatcacctcccatcaggtcctcccttgacacatggggattacaatttgagatgagatttgggtgaggacacagagccaaaccatatccccatctcaaagataaataaatatatatataaatcaataaataaaatggaagaggcagtgttacgtgtagtaaagataagtattgcccacttttgtttcacatacacacacacacacacacacacacacacacacacgagaaccaggttgcagtggaaaatgtatttctgtattttttactgtgggtgagagtcaaaaaagcttgagaaacaatctaatgtatgaattccactaccagaaaggtgctaacagtgccacattttaagttttatagggcaatttaaagtttgccaagggcgtactgagttctattcctgaaatgcccacctgctgagcgggtgctgactcgctgagtcctctcatctaacaaactgggaggtgttttttcctaatcccactctgttgcttccaagcctaggctgccaggctgtacagtggtgattttagaaaactctcccataattgcttcacactgaggagagatgaggggtagagccgtgccagtggctttccctgagttggcatccttagtaggcagtatttctcactgccaggtggggagaggcatctaggatggaagctctcagggtcctacaggtgcagagtgggccccttgagggagcccctcccaggtgcctcactgcctccctccagtcactttcccaacattgccaaggaactctcatttgttccttccaaacgcagggatagggacaaatggataatttggctggctgtccataaacccctcagctaggattaattggcagtaacagagacgtgaaaaaaagatgagaagacatttcccaaacagagactaagtcatgccaaagggaggatggtgagccccatggcaaacttcacttagtgctcggctttccctgagagcacctggctgggtctctgccatcttttttttttttttttttttgagatggagtttccctcttgtcacccaggctggagtgctgtggcatgatcttggctcactgcaacctctgcctcccgggttcaactgattctcctacctcagcctcctgagtagctgggattacagctgcccgccaccacacccagctaatttttgtatttttggtagagatggggtttcactatgttggccaagctagtctcaaactcctgacctcagcctcccgaaatgctgggattacaggcgtgagccaccatgcccggccggtctctgccatcttgccctgacctgtgggttttctctgcagtgggctcaacattttgaaaaatacattcctaaaagttgccaccagtaagcaggtccaatcacttttctattgaccattaacaatacagaattgtttccagcagagaaatattaggctccaatagataacaaatcagttaaaaatcccagcctttactctaaagtcagcagttctcagtttttggtctcagacccctttacacacttaaaattattgagggctccaaagagcttttgctcatgtgggttacattgatcaatatttactgtattagaaatggcaaccgagagacatattaattcattttttaaaataagcctattacatgaagagtggccttgtttgacatttttgcaaatctctttaatgtctggcttaatagaagacagctgaattctcagatgtacttctgggtcaggtcagttgtgatgtggcctggcaagaagtctctggaaaactcccatatgctcatgagagagagagaatgaagagcagatatcatctctggattattatgaaaatagttttgatctcacagacacccttaaaaggtctcgggatccctgggtcctcagatcacggcttgagaacactggccattaggggcataatccatttgccaacagtttttcacatacctccagcaagtcagcaaagtggatcatcaagctgtgtgctgcttagacactcattttaaaaccacgcatatggccgggtgcagtggctcatgcctgtaataccagcactttaggaagctgaggcagttggatcacttgaacctgggaggcagaggttgcagtgagctgagatcgcannnnnnnnnnnnnnnnnnnnnnnnnnnnnnnnnnnnnnnnnnnnnnnnnnnnnnnnnnnnnnnnnnnnnnnnnnnnnnnnnnnnnnnnnnnnnnnnnnnnnnnnnnnnnnnnnnnnnnnnnnnnnnnnnnnnnnnnnnnnnnnnnnnnnnnnnnnnnnnnnnnnnnnnnnnnnnnnnnnnnnnnnnnnnnnnnnnnnnnnnnnnnnnnnnnnnnnnnnnnnnnnnnnnnnnnnnnnnnnnnnnnnnnnnnnnnnnnnnnnnnnnnnnnnnnnnnnnnnnnnnnnnnnnnnnnnnnnnnnnnnnnnnnnnnnnnnnnnnnnnnnnnnnnnnnnnnnnnnnnnnnnnnnnnnnnnnnnnnnnnnnnnnnnnnnnnnnnnnnnnnnnnnnnnnnnnnnnnnnnnnnnnnnnnnnnnnnnnnnnnnnnnnnnnnnnnnnnnnnnnnnnnnnnnnnnnnnnnnnnnnnnnnnnnnnnnnnnnnnnnnnnnnnnnnnnnnnnnnnnnnnnnnnnnnnnnnnnnnnnnnnnnnnnnnnnnnnnnnnnnnnnnnnnnnnnnnnnnnnnnnnnnnnnnnnnnnnnnnnnnnnnnnnnnnnnnnnnnnnnnnnnnnnnnnnnnnnnnnnnnnnnnnnnnnnnnnnnnnnnnnnnnnntgatccacctgcctcagcctcccaaaatgctgggattacaggggtgagctacagtgtccagcaggaggaatttaaacttcaaaagccaggccaggcacggtggctcatgcctgtaatcccagcactttgggaggccgaggcgggtggatcacctgaggtcgggagttcaggaccagccttgccaacatggtgaaaccccgtctctactaaaaatacaaaaattagccaggcgtggtggcgggcgcctgtaatcccagctactcaggaggctgaggcaggagaatcacttgaacctgggaggcagaggttgcagtgagctgagatcgcaccactgcactccagcctgggcgacaagagcgaaactcgcatctcgaaaaaaaaaaaaagccactttgctctgattctcgtatcagaactggctggctgggaggtcctagtggagtcattttaaagacaaaaatagagattgctttccaccaacgtacaggtaaccccatctcttcacaaacctcctgaggtttgaccctttattaatatccttcaccaagatgctcttgctgctaagtggctcttgttaagtggtgaggacacagcctcccacttcagctcccaggaggccttcctttcctctgcagccctttgccctgggcctgtgaggtgttgctccctcttcccacctagacatgctaagagctgctttaaagactgcccctctttgctctgcaaatgaggaagaatcgatattaatgaactgtgatgtctcttttcaaatactgagcagagacatctgtgggtagaattgccaaacaggaaaacatggcctcaggtaccctcctatctcagttctatcaaataccccgccatcaacagcagctccaacctctgctcactccaaactctgttcctgagagcctcccttcagagacccacgtccctgagcctccatttgactcaggatttggtacctgatacttggactagtgaaacttcctctccatccccagcctctggatgtgcttttaggagaattaaatagggcaatatatgtgaaaatactttggaagctgcaaaattaaattctgcctatgtttttttaattgacatcaggcaacacgtcattctataaaatagagtaagttttccctccaccagattcaagtatgatgggaatatttacaagtttaaatactggggattcagaagtagtccaggcattacagaaatcccagaaatgcagatattccgtaatatgtgttgacattttaaatgcttatagagacatataacttgttcttaaaggtgtatgaaactatctctgcattggtttatttactgttcctataaggtaaagctgggggctaggggtcctgggccatacacacatacacacacatacacacatgccatatatatacatacacatacacatgccctatacacacacacacacacacccaggccacacacacacccacacacacacatatatatacacatacacacacacacacacacagaggccatatatatatatatgtacacacacatgccatatatatatacacacacacacacacaccaggccatgtccatatacacatacacacacacacacagaggccatacacacacagacatacacaccatatgtaaatacacacaggccatatatatcatgcgcgcgcacacacacacacacatatacatatttttagtggaaacggttccactatgttgcccaggctggtctcaaactcctgaccccaagtaatctatcctccccacttagcctccccaagtgctgaaattacaggcacgagccatcacacccagctgccttgccttttatgaaacagaccctcctcaaaaagcagaaacgtgagtgggtctagactcaggccagggagcgggaaggccgtagatccagctggccagtgtccccagatgatatgggccaaagcaagggcccctgtgcatgagctcctttgatctgtttctctttccttaaagtataaagggctaagaattaaaagaggtgtttgctttctcctttgcagttttgagagagttctggcccaaataatgttattgctaagaatagtatacttgaagacagcttgtccctgccagactaattttttctgatggtgtttctatttcacctcctcccaggtgtatcttccaacgtggtccccatgtacttaggggagctggcccctaaaaacctgcggggggctctcggggtggtgccccagctcttcatcactgttggcatccttgtggcccagatctttggtcttcggaatctccttgcaaacgtagatggtgagttcaggacatctcgggagcacccccaccccttcaccactacccttggccccctccttgtgttccaaagccaccaccacaggacaggactttctgcagactggtctcttctaacaggctggatgtccttggggggcccatcctgtcccgagccaacatagcaggccatggacaaaggcgcgataagggactggccagcgtttactatctagtccctcttaggagatggatgaggtggctttgagtgatgggcttccctgcctgctcagcagctgtccatatggaggcccgtggcatagcaatgacagccaccagtgtgccaggctctgtgcttggggcggacccagcatcagttcataggaccctcccagcaacgctgctgcctgggactcagtgattatcccattttgcagaccagaaagagaagtaccaggagtgagggtggcctggccccatgggggaggtggtgaggacatcccagaccctgcctccaccttccccaagacagcctggggcctggcatgcggcaggtgcacagacacctgtaaccggggttgtttttgcacgactttccctttaaactatcatcagtcatcccgtcagccaaaacataagccagttcccgccagggttctacacaccgtctgcaagtcagtcaagtggatcatcaagctctgtgctgcttagacactctctgtagaaagtgcttaccgtgagccaagtgccaagtcttttttagtaactcatgtattcctcagaacagccctattaagcctgtaccagtatcatacccattttgcaggtgcatcacaggtacagagagattggaagactggtccaaggtctcatgaggatgcagacccagcggcacagacctaggtccctgtttaagtaccacatgctcctgcctctccttcactcctgcatgtgttggggacacttacgccaaggcgccgcgttctcattaggagctgggaccagaagtgaataagccaggttcctgtctcagggagctccatagcaggactcagaaccacacacggccctctaggcatttgtgaagctctgtgcttcatttttttgctttgcctctagttttgcctttgcagtaccaatgcagccagcccatgtgtcccctctatgtggaatgttaacgatattcccactgtttctggtgtcctttctgtaatcagagctgccgtgaccattccagttcaggcatcctggtggcctggcttctctgggcatagagctgggagtgggcagttgggtcaggccgggtatgcccagctcctccagcccctgcaagactgtcctctgaaggacacggggacgttctcaccagcacatggtattaccggcctcgtcggtgtggtctgtctgatgggcgcaggggtgcgtcgctgctgatccctgctgcaggtgtttcccgagtgtccaccgtcgggagttgctgttcttagggctgggaaagctgtgccctcctggagcctgcaccccactcaggatgacggggctggggccggctctgcagagggcgccttcggggtggtggggaggccgctggtgccagctcgctgccttcctcccaggctggccgatcctgctggggctgaccggggtccccgcggcgctgcagctccttctgctgcccttcttccccgagagccccaggtacctgctgattcagaagaaagacgaagcggccgccaagaaaggtaacgagggctctggcgggggcggcctccaggttctgctccccagccctggtccgacggtgccgcttctccccagccctacagacgctgcgcggctgggactctgtggacagggaggtggccgagatccggcaggaggatgaggcagagaaggccgcgggcttcatctccgtgctgaagctgttccggatgcgctcgctgcgctggcagctgctgtccatcatcgtcctcatgggcggccagcagctgtcgggcgtcaacgctgtatgggccgggctgcggctcgggagctggggagggctcggggggcgcggggcgcaggtcctggggcgccgggcgtgggtcctggcgccgaggccgcctcctccgggcagccgcccagccccgcgcttgccttgcagatctactactacgcggaccagatctacctgagcgccggcgtgccggaggagcacgtgcagtacgtgacggccggcaccggggccgtgaacgtggtcatgaccttctgcgccgtgagtgtcctgggagctgcccacagcctccacccaaggcccctcgggccccacgccccagcctcggcgccgccaaaagggcagcccgtggccccaaaacgtggaggaccagccgctactacagaaactctgtgtgggaggtggccccgcaccagcccctcacacttggggctgccgagccgcaccgggcccggggccaccacctgaccgggatgtaggcgtgcctggaccaggcagcgcccactgctgggtggctccgagcccgggctacccggagtgaggctcggccacctcgggatgggagcaggctccgtgggggcagcgtctccggtgcatgcagacatctggcctcccgagggcaggaatcctgaggctcagggttgtgggattaggaggccctagagctgagtctcaagggtgggcagctggggtcccgcatcacagccacagccgacttcccgctggctgcccaagggcatgtcttgcacatgtgaatgtgagtgtgcgtgcacatgggtgggcacccggtccgcccagctctcctcacagctgccccattggagggggctggagggaggtgaagctgggcctctcccgcctgagccctgccaccctcctgtaggtgttcgtggtggagctcctgggtcggaggctgctgctgctgctgggcttctccatctgcctcatagcctgctgcgtgctcactgcagctctggcactgcaggtgaggacaggccagggtcccaggagcccggagctgcaccaggaagaccagtgcccctcccatcctgcgcctccacctgccttaaaataaaaggggtcacaatgagctgttttagcaaatacaactggccagacatctggggaccgtgtgtcctgccagctcatagcccacgttcagctgatttcccagtggctcatcgaggtggcactgctgggggaggagccaggtgccatcctccacccaccagggcaggttggccgccccctggggtcccgtcctagcttgtctgctccaggtgaaccaactgctttctctccacaggacacagtgtcctggatgccatacatcagcatcgtctgtgtcatctcctacgtcataggacatgccctcgggcccagtacgtacccaaagctggcctcagggtgtcacaaccccccctggtcccagaagctccgggctggagctccttagagataccagggatggccaatgcagcctggaaatggcatctcttcccccgtccaccgcaagggggtgggtggcacataatgagagcgaaatggtaaaatggtggtgtgggtgggaacacacagactgtgcaggcagcagagtgggcctaacgggtggttgctggcctgccatccctgtacactgccgtttgccccctacgtgctgccccacatgcccaagagtcctggagacgcctctgtcctggggccagctacctggtgggtctgcatggccaggcctgggatgctcgggcccgctctgccttcagggaggctgctctcctccccctacaggtcccatacccgcgctgctcatcactgagatcttcctgcagtcctctcggccatctgccttcatggtggggggcagtgtgcactggctctccaacttcaccgtgggcttgatcttcccgttcatccaggtgagtggggcccggggcccacgctcaccaccagatccccatgcagtacagtgcgagcccctgggcaaaccacgtcccacacgtgtcacctgcccctcttcccgcaggagggcctcggcccgtacagcttcattgtcttcgccgtgatctgcctcctcaccaccatctacatcttcttgattgtcccggagaccaaggccaagacgttcatagagatcaaccagattttcaccaagatgaataaggtgtctgaagtgtacccggaaaaggaggaactgaaagagcttccacctgtcacttcggaacagtgactctggagaggaagccagtggagctggtctgccaggggcttcccactttggcttatttttctgacttctagctgtctgtgaatatccagaaataaaacaactctgatgtggaatgcagtcctcatctccagcctccccaccccagtgggaactgtgcaaagggctgccttgctgttcttgaagctgggctgtctctctccatgttggcctgtcaccagacccgagtcaattaaacagctggtcctccactttgctggttcagccttcgtgtggctcctggtaacgtggctccaccttgatgggtcaacctttgtgtggctcctggtaacataacaacaacagttactatagtggtgagatggaaggaatcaaattttgccagagaaactaacttggtggccccgacaggtcttccggggccatgggcatttgtttagagccaaattcatcctcttaccagatccttttccagaaatacctgtctaggaaggtgtgatgtcagaaacaatgacatccagaaagctgaggaacaggttcctgtggagacactgagtcagaattcttcatcctaaattattttgttagtggaaaatggaattgcttctgtgtagtcaataaaatgaacctgatcacttttcaacaagacgtgctgctgttctttgagcaagtagaaggcaggaggaagttccctgctcattcaggcagtgttttttttgtttttatttttgcttttttttttttttttaagacggagtctcgctctgtcacccaggctggagtgcagtggtgcgatctcagctcactgcaaactccacctcccgggttcacaccattctcctgcctcagcctcctgagtagctgggactacaggcgcctgccaccacgcccggctaacttttttgtatttttagtagagactgggtttcactgtgttggccaggatagtctcaatctcctgacctcatgatccgcccacctaggcccctcaaagtgctgggattacaggtgtgagccactgcgcccggccacttcaggcagtttgactgcacgagtgtcagttccttgagggcaggggcttggtcagttttgtttatgcctgaatccccagcatctcgaagagggcctctggaggctgaggtgggaggattgcttaagcctgggaagtagaggttgcagtgagctgaaattgcaccctatactccagcctgggcaacacagtgagatcccatctcaaaaaaaatttttttaattgggcatggtgacacgcctttggggtcccagctatttgggaggctgaaatgggaggatcgcttgagcctgggaggtcaaggctgccctgagtcatgattgcatcactgcacaccagcctgcatgacagaatgagaccttgtctcaaataaataaatacatgtaagattgaggaagcttccaaatgtcctcacatatgtaatgaaatcttgaggagtcttaaaatcttgagactgtggtgggggaggaagggaaaaggaacagggtcttgatatggtttggctgtgtccccacccaaatctcatcttgaattgtagctcccataattcccatgtgttctgggagggaccctgtgggagataattgaatcatgggggcaatttcccccatactgttctcatggtagtgaatcagcctcatgagatctgatggttctgtaaggggtaacaccttttgcttggttctcattctctcttgcctgccaccaggtaagacgtgccttttgctttctggcatgattgtgaggcctccccagccatgtggaatggcgagtccattaaatctctttttctttgcaatttacccagtctctgatacatctttatcagcagcatgaaaatggtctaacacaggtctctccccaaaaatatagagagctggaggtttttcttagagatatgaataaagggtgtgagtgtgagtgtatgtgcaaaaatatggataaaaccttgaaagtgctgaatggcctgtagcaagaagtgatgtcttctcatagatgggtggcagaggctggtggccgggagagagagcagtgggacttgggagcactttttgtgggtatgtaatggagattccaccagcaacaagctaaaccactcacaagcgggcccagaggaagtaaacagaacactgtggttgaaccatccttggccttctgcagcaaggatctgcagcctggaaggggcacagaaacaaccaaagatgaaggctctcagagctgaggagaggccaggtcagaatatcagaagtcaagaaactgcagcacctctaacacaggggaggctatgaagttcatggttctggatgtctgctccctgggttcaaaccttggtcctgccacattagttgtgcaacttggaaagttacttggcttttttgtatctcagtcttctcttctgttaaatggcactaataataaatgtctcacatgtccattgtgagaattaaatgactttatatgtttttggtgtttggatcagtgacatgtatttagttttcttaggtacttttcagtgcttgggaataagcattaatcttgaggacaaataaactcacaaataagatacagtgagaggccactctgcatgtatactaggattgagcaatctagt

SEQ ID NO: 155 - DNA, 12535 bp, Human
gaaaaggcaagcattggccgggcacggtgtctcacgcctgtaatcccagcactttgggaggccaaggtgggtggatcacctgaggtcgggagtttgagaccagcctaaccaacatggagaaaccccgtctctactaaaaatacaaaattagctgggtgtggtggtgtgtgcctgtaatcccagctactcgggaggctgaggcaggagaatcgcttgaacccaggaggcgaaggttgcagtgagccgagatcgctccattgcactccagcctgagcaacaagagcgaaactcagtctcaaaaaaaaaagaaaaaaggcaagcgaagcctcagaagagggtcctcagtgcctacccacttcttagtcccctgctatcttctgccacactatagggacctgcttttctttcacagatttggggtcccctccccctgccctcagccccactcccttggccccagagacagtaggagaccctctgctcccctgagcccgggcctgtctcgcatttcccgtggagatgagcaacaaggggaaacgtgggtcttcttaaagaactttcctttccgccctccaccaccttggcaaggcagccagatgcatctccgaagtccagctcactcaggccagctctcttcacagactgtcttccagcaagaggcaaagcagagatgagacctgcacgtgctctttgtggcagagctggccttatacgcactcctgggtgaataaacagggagacatctcctaagaacaaacgcttctcagaaacagtatagtctaaactcatactgaagggagaataagccagccacgggctggagagacccccgcctacattactaagtaacaggaaaggctaagatttggagccttcctccggttcagatctatcccgggagtaatggaagatgcttgcctgttgacaatttttttttattaaaaatcccacccaggaggtctctcctgataggaggggaccatcctatcctctaaggcaaattccagcttcttccctgaaatgtacatccgctactgagcctcagaatgctatttgttccacctacttccacagttttaaggtcttcagcaacaggagaagacagcaggaaaacttgaagtgcagttggctcccgctgagatgtcactagcagaaaaagggaacacaagcaaaaggcaagattctaaagacagaggtgacaccttctgctccaaacatttggagggtcacctttccagaagtcagactcgaagtcctgaattctggcatgaatgagttctcctacgtgtagggggtggcctggaaagatcttaatttgtaagttgacaggtaaggggccttcagttggagaatcttgtcacctgattctcaaagccaaaaatatcttactgtctgaaacatgaggtcttgagtagttcaacttgacccatgcagacataatttgagagacgccaaggaggattaggaaaaaatgtatctggtcttactcaactctgaacattgcatgagtcaaacgttttcctagctctctgtttgtgtgatgggtccactctgatggattcttggcgatgtatctttcatgaccaaaattcaaaagaggccattcgaagtggctcccacaaaagctgctgcagagccccagacattcagaagccaatagtgaaggggccaaaagccatccctcaatgttcactgacactttgcgagccttggggcaagttggcgatgtcaaaacatgtttttagggcgtgtttgccaacatacaggtcttgggcaggattgcagacctctgcagatggtaccaaagtaaagggggagatggtagctgaataatctcttatcatccctaaagtgcaaagtgaaatgagagtggatttttccttccaaatccacttggagtgagtcccgaaagactcacttttgcggcaatccccacaatgacatcactggagcggaggttatataatttaaagcaaccacatctccacagcacttcccagaagagaaaactcctccaaaagcagctctcactatcagaaaacccaactacagttgtgaacgccttcattttctgcctgagtaagtaaatgaccaccttttttttttcttttatgagagtacaatatgagaggaaatctgtgtctcttagaaaaacaaaaaacttccttttacacctacctattggcaaaattttccacttctgtgagggtactttttaaaaataattctaaatcaatttaagagacttttatttcatgcctagtttgggtcttaattgcttttccagaacaggaggaggagggaaaggttttagaactcgtaggaaggttccagtagctccttatatcaaagtcaggtgaaacatgtcagggctgaatgcagccaccagagttcgcatggactgaccagttacagcctgcaaattctgaatcataaaaattaaattagtctctctgggatggcttacaagatttcataagaccaataactggttgggttattcgtggcttgaaagtagcatcttactatgtgaccgtgctgatggtctttaacatctgtggctgaatttccaatgcctttaacatcaccatgctgttgaaattggagttaatttgaagaattaactaatttgttgaagaaagtcacactgtctcatagcctaggttaaaatgtgcagaattcagaaaataccacacaggaattacagaattgccatctcttgtagacttgcccagtgccccttctgagttcttcaaatagggtcacatattactaacaatatccagagatattgtttattgagcacctactatgttccaggcaaatatcagagctaaagctgaaaactggcaaaggaagatttctcctctctagccaactttataaacacagacagcagcaggtgaggacaatccctttaaaaataagccccatgtgagcagacacatgctgtggctgcagtggccccagccacctccccgtcctggggatgggggcggtgtccactgacctaatcaggttcgagctaaagtccctgcgtagctggtcgtctctggcttcctgggcagggtgcagcctcacccccgtgctggtttcctaaggctgctataattaattatcacaaagtgagtggcttaaaacgatgcaagttattatcttacagttctggagatcaggagttcaaactcagtctcgctgagctaaagtcaagatattggcttggctttgttctccatccccatgattcaattatctcccaccaagtccctcacacaacacgagagaattatgggagctacaactcaagatgagatttgggtggggacacagccaaaccatatcagtgctcaacaccctcccatctcttctcaaactctcaatgccccagcccctccaccacaggtcaggacctcgcctcctttctccctgagaaatcccaaccaatcgccggggaattctacagattcccacctgccagcctctgtcaccatagacctcagcttcctggccatcatcagagatagctaggagagggatggtcaggccatgtgtgtgcacactgccggggcaccccaatagtcaaaaattatttcccccaaaaattagtatttacaggtagaaagagagaggaaagaaggaaggaaggaaagaaggaagggaaggaaggaaggaaggaaagcaggatgggagggagggaagaagggagggaggaagggagggatggaggaaggaaggaaggaaggagggaaggagggtagggagggaaggagagaaggagggaatgaagggaaggaaggaaggaaggggaaaaaatccaacaaaatggttatattatattgatggtgttataaagtagttctagataaaaactattttcaaaaaagtctttaaatatatatgcatacacctatgaatattaaagcaaaagaaaacatgtttatgttaatcaactgaacatttaaaaataagataagcaaaataattgttcttgttgtatattcacatgctacagtttcttgtacctgactgataccctgtcactggcatttttcacaagaatgtattttcttcagtggggtcttgttatttttaatttttccatataattgcctgaaatcttttttccacaaattttacaattaacaaatttaaattagtaccttcaattgactcttctcttgaaccataatatattgagaaaatgttccctgtgcaggttctgagtgataagctctcagcaaattctgccaggcagaggctgttctcaagtccaattctttgcatatggaattgcataaatattttagcccagatattttcacaggtgctgtctttgtgccttagtttggaatgtagtggtgcgatcttggctcgccacaacctccgcttcccaggttcaagcaattctcctgcctcagcctcctgtgtagctgggattacaggcgcctgccaccatgcccggctaatttttgtgttttcagtagagacaaagtttcaccatgttggccaggttggtcttgaactcctgacctcatgtgatccacctgcctcagcctcccaaagtgcagggattacaggcatgagccacaccgtgcccagcccacacgtatttttttttaaccagattaaacctttcaaataagttgtacctacttataagttttgaatgttttgtcagattcagatactgcaaaaaaaaaaaaaatcattggctttctcaatttcatctcatttcatacagaacatgaatttatccaattaaaaagattcttcccacaagctgaaatgttccagagctcattttagaatttcaaaattaactcttgtacagcatttgattttgatcattttctgatacattttataatttttctgcataccagctttgttttcaatatttataattcactaaaagctttgaaagttgacgttttgctgctctattcattgaataacttgactaaatatttccaactgatttggaacaaaattcaacgaaaatttatagatctgttttaatacactgtttaataacattttaggatgctgagactcaatgtccactaaaattgattgataatgggaaaataaaagagaaaacacatgtgaaagtccagttttttaaaaaaattcatgaacaactttatcacaagtttgtagttcagtaaatctgtgcatatgttttaacattttgtaaattttgtcacgtacgtctataaatgtcaatttatagaatattgacatttatttatatgcaataacaaattgtgtgtgcaccatgacctgttccaatcacatttctgtttcattagtgtcttaatttagtaggaatattattgttaccatgacgctggactccaccacaatttgtgttttatcctcacaaaaatgcaatgactttatttccaatgtggaaaatttaaacaacttaaatagcattcacaaaaagtcagttgtttcactttgccagaatgaatgtcccaaagccctgcttggcttccatgagctgaatgaaagaatgaattgtgattggaattaacaggtttttctgtctgaagagtccgaggatactggtgttgagctggcaccattttgctttctgtgatgttcttcttatggagccaacacacagtcagccatcacttccactgttgcacgtgcacaagaaaagctggaattaaatgtgagctgagttaacttaaagaacagtcatttgatctaagggaaaagtcatgcctctcagaatgatcttatatcagcatcttttgcagctacatggatgagaaccgtgtcttagggtgcaattttttttttttttttttgagacagagtctcactctgtcacccaggctggagtgtactggtgcgatctcagctcactgcaacctctgcctcctaggttcaagcaattctctgcctcagcctcccaagtagctggaattacaggcacctgccatcacacccagctagtttttgtatttttagtacatacagggtttcaccatcttggccaggctggtcttgaactcctgacctcatgatccacctgcctcggcctcccaaagtgctgggattacaggcttgagccaccacgcccagcctggtgcaatgttcttaaaattactaatttctaaagtagcagctctgtgtcttaggttttcttgcaatcagtgaaattgctacagaccccatagtgatgcaaatgtcaacaaacgttctatgcaagctatctgctcatcaacaacttccttgagcaacagaagtgcagtacttaaatttccattaaatatttgttttttagctcattactccaaaagggtttatttcaaattctttaagtattgccaaatgataaaatacacatagttttggatttatgccctgcaaaaaatgaccaaactattgtaacaagagcctccagcctcctccatattatgctctgggtggggactgctcagcttccatgtgccatggacatttcacaaccaccaaatcataatttcccatgtctcctgttgatctgtcaaccggcagctgtgcaacttctgctcttttatctactctctcccttggtgatttcatccagccttgtggctttaaatgccattcctatagttacaactcccagttaggtctcatcatcccagatcttgtccctgaataccacacttgtctacctaattgcctgctggatgtccccatgtgatgtccaatttatatctcaaccttaacaattccaaagttgaactcctgttcttccccaccccccacaaaaaaaactgcttcatcttcattctgtcaccttcatttcagctgatgacaacttcatacttcccagtgttcagtccaaaaaccttggcattgtccgatttctcctttctcccacccagatccaactgaaaatcacggtgttactacctccaaaacacctctagagtttgatcacttgatcacttctcaccacctgccctgctactctccccagctgtcacccgccagcatgtttatttagtgtgtgtattgtttatcaacttcttcctcctgctaggcttatacgcacactgagagcagggatttttgcctgctgtattcactgctttgtcctaaatacctagaacagtgcctggcacatagtacattctcagtaaatacttgttcagcaaataaataactggaggaaccagtgaattataccccggtgtgaataactccatgtgagtgacatgacagaatgtcagagctagaagggcctcttgaggacatcatgtcttccttagatgaggaaagtcaggctcagagacatgaactgactctcctgaggttacacagccaaatatgctcttccaaggttaattctctgctacacaatagcttttgttggtatctgtgaggctttgcggggttgaaggaatctcaggtgtcacccattaataacaatcatgacagtgacaactaatgtttgccacgtgcttacaataagtcaggaaccctgccaagcaccgggcgtatattaacctatccaagctggggaagaatgtttaggctctgaagattgtctggagccgcataaatcccgcagtgtaggcagctgctcattctgcagatagtattctgtggatccctgagttggctgtggccggttttgccagcaggaggccacgaagccatgagcacaggatgggatctaccccttgtgggatcgcagagggctgggagatgcagtcctccctatggaaagagacagagctttctatccctctcccggtgaaactcagcatgggagcatgggaggcaggtcagctgcgtggctatgaacatgagctatggggtgcatgcagaccaaggttcatagtgtacactgtacccaccagctgtagctcctccagcaagcgtgggaggccagtcagctgcatggctgtgagcacggcctctggggtccatgcagaccaaggttcctggcgtagcactgtaaccaccacctaggtcttctccgacaagctggttaacttctctgagcctggctttgtcattcatcgcgtggggacaggtgcagcagaagagagcagacagaagcacaggatctcaatcaggctcttgaatcagactgcctgggtttgaatccaggccctactgaccagctgtgtgacctcagacaggcgactccgggtctcagcactcaattttctaattggccaactggagatgacaatggcccctaccttgaatggctgccaggaagattaaatgagaaaatacttaaatgtgaaacacttagaatggcgcctggaacacagaccattaataccatctaacagatgttagttgttatccttatttattactcatgctttcctttctcttttttcttttctctctctctctctccttttttttttttttttttttgttgttgttgttgttgagacagggtctcagtccgtcggcccagactgaagtgcagtggcacaatcatagctcgctgcagcctcgaccttccaggcttaaacgattctcccacctcagcctctcgagttgctgggaccacaggtatgcaccaccatgcccagctaatttttgtattttttgtaaagacaggatttcaccatgttgcccaggctggtcttgaactcctgggttcatctgatccatctgccttggcctcccaaagtactgagattacaggtgtgaaccaccacacccggccaatactcatgtttttcaagcctgtaagaggaacctcctagcactgtccccaccccggccaccacactggtcccagccccaacaggtcagcttcctttgctgttcccgggcttccctcagctctatctcaagccatgacctctgcttccatgtctgcagccccatgaggctggggctgctctgtcctgcatatctccagtgcctggcaaggggctggcaagaggtagaggctcattaaatgcctgttaaaaccctaatagtaataataataatggtacagttgttactaagactaatcactaccttccaaagtctttcctctatgcaaggcacggagctaagcaccctgtagatcctgacaacagccctcccgtgatcccacaagagagacacgattctctccaatgtttaaaaaggaaagtaaaagtcaatggttctaagtagctcacactgagtgattgtaccgggatttggactcaggcaccatcccttaaaccagaggtcagcaaacttttccccctcaggaacagatggtaaatatcttcagctttgcaagccagacagtctctgttacaagcgctcgactcccccttgtagcatgaacacagctgtagataatacgtccaggaatgggtgtggctctgtgccaataaaactttattgtccaaaaacaggtgacaggttggtttggctcataggctgtagtctgccacttcctgttttattctaccttctgttcatttcaggtcactgtgcatggcatcatcctggccccctctagagctccaatcctccaaccagagccagctcttccctcaaaatgctacggcctgtgacaatgctccagaagcctgggacctgctgcacagagtgctgccgacatttatcatctccatctgtttcttcggcctcctagggaacctttttgtcctgttggtcttcctcctgccccggcggcaactgaacgtggcagaaatctacctggccaacctggcagcctctgatctggtgtttgtcttgggcttgcccttctgggcagagaatatctggaaccagtttaactggcctttcggagccctcctctgccgtgtcatcaacggggtcatcaaggccaatttgttcatcagcatcttcctggtggtggccatcagccaggaccgctaccgcgtgctggtgcaccctatggccagccggaggcagcagcggcggaggcaggcccgggtcacctgcgtgctcatctgggttgtggggggcctcttgagcatccccacattcctgctgcgatccatccaagccgtcccagatctgaacatcaccgcctgcatcctgctcctcccccatgaggcctggcactttgcaaggattgtggagttaaatattctgggtttcctcctaccactggctgcgatcgtcttcttcaactaccacatcctggcctccctgcgaacgcgggaggaggtcagcaggacaaggtgcgggggccgcaaggatagcaagaccacagcgctgatcctcacgctcgtggttgccttcctggtctgctgggccccttaccacttctttgccttcctggaattcttattccaggtgcaagcagtccgaggctgcttttgggaggacttcattgacctgggcctgcaattggccaacttctttgccttcactaacagctccctgaatccagtaatttatgtctttgtgggccggctcttcaggaccaaggtctgggaactttataaacaatgcacccctaaaagtcttgctccaatatcttcatcccataggaaagaaatcttccaacttttctggcggaattaaaacagcattgaaccaagaagcttggctttcttatcaattctttgtgacataataaatgctattgtgataggctaaatgattactcccgtagattggggggtacctaatccctggacttgatgaatgttaccaaattaagggtcttgagatggggagatgatcctgaattatccaagtgggccctatataatcacaagggtccttataggagggaggcaggaggctcagagtcaggagatgtgactatggaagcagaggccagaggaattcaggacggccactacgagccaaggattgcaggcaccctctagaggctgtaaagggcaaggaaatggcttctcccctggagcctccagaaggaatgggtcctgccaactccctgtcttcagcccagggaaacagatttaggatttctggcctccagaactgttagaggatacatttgtgttttgttttgctttgtttgctttgctttgctttgcttttttgagatggggtctcgctctgtcacccaggctggagtgcactggcacaatcacggctcactgcagcctcaacttcccagactcaagggatcctcccacctcagcctcctgtagctgagactacaggtgtgcaccaccatgcctggctaacttttctattttttgtagagatggtgtcttcctgcattgcctaggctggtctcaaactcaagggctcaagtgatcctccactttggtctcccatagtgctaggattataggcgtggccactgcgcctggccccatttgtattttaagccaccgagtttctggtaatttgtcatagcagcagcaggaaacaaataacaagtatcgggtaatggcctctcttattacacttccatttgtctattcaaagctttctaggctaactgccaggaatacagggatggtatagctagaagttctatattcaaggaacttacatacatctaaatattataatataaaaaatgaaatgagaaattgcatgaacacaccacggatccagcatcttgcgccttcagagagaaaggatatgggttccctctcaggttagcagagaagacgctgtgaagggagtcagccgtgagcctggtttccacaaagggtgcaatctggatacgtggagacagggaggaagggctggcagaggcgggaaagggtgagctgctcacaaaagaatgcttgtgcatgctcttattgaacgtgtaatgcattggtgcgggtcttgctatgagagacccaacggtgagcctaatggtgtctctaccctccaggggctcacagcaaccaggacaataattaagggattgtcatagagcaggatgcccgccaccatcagggtgaggggtgccgtgagaaccagagcagggctccagtctgggtggctgggagggatggttagagaggggttcctggaggaagagacacataaactgaatcccaaaaaatgagaagctggccaagcaaaatgggggaaaggagtgttccagacagaaggaacaaagtaggcccagaggcaggtggggttacaggttaggagggagaggttgaaggatggcagaggaggaggcgggtcatggagagaattggggctggaggagaatggacaggctgggtccaccatggtcagctggcaaagacagttcacccaggaaggatggtgggctccaggcggctttgagggccccattgaagctggaaagcgtggctgtgttgtgtgaatttactctgataatgctcgacagacccaggaaaggattgctctggagtagggtttagccagatagacggccatacgtcatgggagttggggatcctggtcagactcgggggaatgatggagagggaagaaacgagcacagggagagaaggaagtgaagtgagatcagtgtgttaaaggacggatatagtgagagaacctgggtgacagcaagaaacagaagaagagccaggcgtgatcttctgtacactgtgaagggagtcagccgtgagcctggtttccacaa

SEQ ID NO: 156 - DNA, 36975 bp, Human
ggcttggcccttactccctccatgacaatttcagacagatgagcaggagagtggcagggtgcaggactggaggacaaaagaccagaggagatggaggccctgcagacagcaggggagggaaggaggatgaggtggtgtagacagcggagtcagcaggacttggtctgtccaggggtgaggagagaggtggcccaagctttccaggctgagcatagagagaccacaggaattgaagccttgggcaggggggtgcccagaatgcacctgccttctgtttcagggctccatactcaaccaaggtgcccctcagccagaactggacacattgccagagaactccaggggtcatctggtcggctcagcctcccggtttccgacagacagtaagcccaccatgactccctccatcgggaaagggaccctcaagactttgatcagacctttggactgggggtccttcccttcactgtgtctcaagtaaggcactggtctagaggaaataaggtgaagtcagatgatagcaataccactaccagtgcagtggcacatgcctgcactcccagctactacggaggctaaggtgggaggatcacttgagcccaggagtttgagaccagcatttatttatttactaacagactaaataaataaaccaacaataccaccaaccagtaaatgagaacttccatgctaaacacttcatgagcttatctggaaattgcacctctcctgatagcaatgagattggtgtgggaattccatttactcataagaagacagcctcggccgggctcagtggctcacgcctgtaatcccagtactttgggaggcgaggtgggtggatcacgaggtcaagagttcaagaccagcctggccaaaatggtgaaaccccgtctctactaaaaataaaaataattagccaggggtgatagcgggcgcctgtaatcccagctactcgggaggctgaggcagagaactgcttgaatccgggaggcggaggttacagtgagccgagatcgtgccgctgcactccagcctgggcgacagagcgagactctgtctgagaaaaaaaaaaattaaagaaaaaaacgaaaacagcctcactggccaggaactcgcccaggatcgcggccgggccagtatacagttgagctggttcaaacccgaggtctatcatgtccttaatgtcctatcatgtcagtcagttagcctgcctttcatattttccacacttacaggtcaccatagactcacctgaactgtgagaagtagaggaaggcgtcccagaggaggtgattttaaagcccaggtttgagatgggtatgcatttccaggcaagagagcccggccggtgcaaaagcaaggcttggctcacaaacgggaatgtggggggtggagacagggaagggagaagtcaatccctgggcaagacctcctggagtctctctaacaaataaatactactttccatgcagtagacgctgttctaaacactttacaaatattaactcacttggtctttctacaaccctacgaggtggtactgttactatccctagtgcaccgaagtcacccagcggccgagtgagaactccagtccagctttccacccgctactccgcgcatcccagcttgccttacagccgggtaccggctccaccattttgctagagaaggccgcggaggctcagagaggtgcgcacacttgccctgagtcacacagcgaatgccctccgcggtcccaacgcagagagaacgagccgatcggcagcctgagcgaggcagtggttgggggggccccggccccggccactcccctcaccccctccccgcagagcgccgcccaggacaggctgggccccaggccccgccccgaggtcctgcccacacacccctgacacaccggcgtcgccagccaatggccggggtcctataaacgctacggtccgcgcgctctctggcaagaggcaagaggtagcaaccgcgagcgtgccggtcgctagtcgcgggtccccgagtgagcacgccagggagcaggagaccaaacgacgggggtcggagtcagagtcgcagtgggagtccccggaccggagcacgagcctgagcgggagagcgccgctcgcacgcccgtcgccacccgcgtacccggcgcagccagagccaccagcgcagcgctgccatggagcccagcagcaaggtgagtcgcgcgcccgcgggccctcccgccaggaacaaaggcgcagactcctgcccgccttacgccggccagggcctcccccgccgccccgctgcgctgtgcgcccggggcgggccgcgcgcctctccgagcctggctcggtgcgggtcccgagcgcagcgccccgccgggccgctggccgcagtggggatgggcttcggatctagcgggccggagggcgccgcgtgcgtagttggcgccggcactgagcacatggcctccttccgggggcgccgcgccgtccacgcggccctgctggggctggggacacagggcccgggagcggcacgtcgcacacgacctcggcagcggcagcccagcctcggcccctcccggtgcgggggagggggcccgagcgcggcgcccattggctgagcgggccgagcccccggcccggccccggccccggcgcgcggaggagtcaggagccgcccccgctctccgtctgctcccctagcccggacgcccctgtaggtgggcggcctggtgcgaggtgtcccaccggcctcccctactcctcccgccagtcccccgcggtgacgaggccgaggccgaggggagggcacttttctccaggcccgggctcgaacgcgggggttgagatgaacctccggtctcggaggctctcctttgcgaggagtgcaggccccaaagctttggcccagtctcgcggagatgtgttccgcggaggcaggtttaccctcggggccaggcggggagcgcaaccggaggggcgggggatctgggggccaggaaagagccccaggctgaagtctagcgggaagcgcgcacgccacggggttggggaatgagggatggggactctggggaccaacaactccctagataggatttctttttttctgtgtaagtgggcttgtcctgcagggcatctttgtagcgtccgcagagcgatttcttttcaacaaattgtttgtggagcccctcctgtgtgtagggcattgtttctttccacctcctttcctccccctagtctacaatattttcaagtcccctttttcttttgaaacggtccctctttatctattatactttgatttttccatctcgtcagctgggagggcacctggatggcccttgttttcttagctgggacgcgggggtagcactgaattttgaactgcccttcctactggctgtggaggtgtcccgctgagactgagcggggtggcgctgggccgcaccctcggcaggaaaaggccttccgccccacacctgttgaatccataaatccagacgacttggttcacccttcctgggccctcgcttgaggtgagaccccggggaagttcccggggaaggctcccaggatcttaggtgagccgtaagggtgggatataactaaacaaaagttcagtgagaagctcttctagctagtggcaaggaagtccaaatatctcagggctcttgcaggccacttaacttctgggcctcagtttttccatctgaaagagatcacttttgtcacttcctctagggaaggaactatctattcagcatactatgccagacatgggtatttatttgttgagtggataagggaatactacgtggagacagaaaagtggaggagaaaatcagcaggttcttagccaaactactttaagcgtcacggaccttatagccctgctggttactcactagcctggagctcagagaagggaaataagtttgccaaagtcacacagctagtaagtggttgaactggatttgaacccaggcccatcagatttaatttcatttctgtctccactgtctctcttcaccacaacatttcttgaattttgggcagaagggagagagtttgcctatcttcaaaggtggccccttgtgccagctggttctaaatagtgtagcaggtgggtgctcttcatggagtgttctccaagttttccactgtctacctcgtcagtaattaatgttggaacacctctttcacagtggtgtatctgtatttttatttttttatttttatttatttattttttgagacggagtttcgcttttgttgcccaggctggagtgcaatggcgcgatctcaactccctgcaacctctgcctcccgggttcaagcgtttcttctgcctcagcctcccgagtagctggaattacaggcatgtgccaccacacccagctaatgttttttttttttttttttttttttttgtagttttagtagagacggggtttctccatgttggtcaggctggtctcgaactcccgacctcagatgatctgcccgcctcggcctcccaaagtgctgggattacaggcctgggattacaggcgtgagccaccacgcccggctgtatttttaaattcatgcacatgcagtttgatactaacagatgatatgccttcataaaatagaaatttcaaaagacagatagatacaagacagcagttatagtcattttcccctccaaatcttgtgtagatcattccatatacattctggaataaagcccttccctttggagactgctgatttgacctgcaagcacagcctttttgtgcatgatgttagaggcctggggaggtcatatcgcttgcctttcacacaagatctgaaaaccaggtgtgtctggctccaaagccttggttctgctatgttcctctttgtctcctaggaaatgggaactgacttaactaacttccccgtgttccattgtgctcctctgtaactcacagtaatgagcttagctgaataggaagtaggggacagatggaatcaccttgcctacaagccaggggttcgcccacgatctctcctgggcagcacgcaagggtgagccctgccccagatgtctcaccccacccttcgtgaagaacttgtaactagccttgcctatgcccatcactcatcacttttctggccagtctctaccttccagaaaaggaaaaatcagaaatctgcaggctttctcagcccctttgtggtgcagacagcatagttttttgttttttgtctttttttgagacgaggtctcactctgtcacccaggcaagtatcttggcttactgcaacctctacctcccaggctcaagcgattctgtcacctcagcctcttgagtagctggaaccacagacatgcgtcaccgtgcccagctaaatttttgtatttttggtagagacagggtttcgccatgttgcccaggctggtctcgaactcttgagctcaggtgatccgcccacttcagcctcccaaagtgttgggattacaggcgtgagctaccgcacccggccaaacatagatgtttgcatatgtggttttgaatcccagcttagcttagttgcccagttttcatcattacagtgtctaggaattcagaaaagaatgtacgtctctgtccccatagatgctccataaatatttcttgcttccttggactcccatgatgccttacctgggctgtgggtgacttgtacctgggccttggcctttatccaaaagctggcattctggcagtatgagcttttggggagtcaggatgctggcccatgggtattaagtcaggtaaatcattaaagctcccactaacccattcttcctagtaggggcttgttgggaagtgagtaggcatggcacatgggtgagagtgccaggccagggagggtcagctcatgtgagtgccctgcgctgctttgggcttctttgctttgcttttttgccttaggcttcctgcctacctttctgaatttgggtcacccttgggatagtttgaaagggacattcatgtccattaactccaagggtcctcacaactgccctgtgatacaagttacagtgacctcatggtccaataaaaaatgactttgccaagatcacacactgagcctcccaccccaagacatgctgccagcctttccaggatgacattagagggtggaaggaacccagagcaggaggggccttccagccatggcccagccctccatttgacaaatggggaaattgagtccagagaagggaagagatttgtccgagataaggctatcacaaaagatttgaggcgttctatggagctgtgttttgttttgatttttgagacggagtttcgctcttgttgcccaggctggagtgccatgacacaatctcagctcaccacaaccttcgcctcccaggttctagtggttctcctgcctcagcctcccgagtagctgggattacaggcatgtgccaccatgcccggctaatttttttgtatttttttttagtagagatggggtttcttcatgttggtcaagctggtctcgaactccagacctcaggtgatccgcccacctcggcctcccaaagtgctgggattacaggtgtgagccaccgcgcctggcctagctgtgtttttttttaaagatgctttcttctccacatgcctgtctgtgccatcctccacccaccccaaatgagcaggaatccccagacacaggacttgccatgccataggagcctgaaagttggattagacgtaacttgacaactgaaactctactgtgaatggaaacaaaacactagatgttcccactaaactctgaccttgaagaagtggctttccttggagccttggtttccttctcagtaaatagagacttggctacccccagtggatgtggtgagactggccccgtgccctaaattagagaagtggctattttaagtggaaagaccctttgtaaggccagtctgggtgtacaaatgatgtaaacagccccaagatgatccttgtctagtaccgagccatccagggattcgaccctatttgccccggagctgggccagcctcaaatcccccgtaatcagcttgtgacttcaaggagctcagctttgcccagtgcctcctggtcacggggtgtcggcccagagctctgctcaagtaccaagggtacagccatccagctccctgcttccccaagactggcaaagctggggaggcctggaacaaagaggaaagtgtgcagtgttggcttggggcctgcaacctcaccccttcccccacctcactcctgggcataaaggtgataaagccgctcactcagtctgcagtctggtaaccgacgtccccatgatggcggaggctgggaggcctcctgaccagattcatgggctcagagaggctgtgtccaggcctgcaggcccagccctggctaccctaacaagcctccaattgttacctctctccacgggaggggtggactggagcctgaggctctgtcttccagccaccaggcctggcagtagctgatgcataaacattagggttttgcagtaactgagcagggctcccaggccttgaacctgggcagaaagaagacagcatctcctctctttgtgaccacactgacttgcctccctgaggcttctgcaccctggaatgggagagagctcttgccaggcctcagctgatggagcctttggctactgaggcctctgctggacaggaagtctgcctatgtctcctagcccagtttatctccccctgccctggcatttgggagtggggaggaaacggctccatcagaaacagctctaccattggaccttaggccagccacacttcttgttggagcttgtgtcctcagctgtactggggatgagagctagctgtctgggtcagcggcactgaggctccaggggagcatgtggtctgtgcagcaggcttggggagtgctgagcagcacagattgggtttcatagcacagtgggagcccagacaggccagctagccataagcacctctgctggaggaagaggtggactctcttgggctggagggcccagttcaaggaaagaaacaaacagctacactgggctccttgatcacccagctgtggcagttcttcttgaggacttcctgcccctaggtgggggctgccttcagctccctgctgcgtgtgataacttgggtgtggccctcacagctgtgcagaagctattcccagagggttctggccccaggtaaacagattctgctctgggctcgccttgcctccatcccacagccctgtgtgctgtctgtggcacagcctagagcagcactgcctcgtggccctggcccttatgcggctggagctgatcctgaagtccagtgtcccagcggtcatggctggcatcatcaccatctacaacctggtgatggaagtccttatccccaactcgctgatcgactgcatcagcctctacgggaatctcctccagccaagcgctaggctgagtgtaggcctgagtggcccggcagccagctatgtcatcagcactgtgggggacacagtgctgcctagaagcccgggctatttgtgggcttgatcctgatcctcattttcactgcatggtctcattctctccacaaagtagcctttgagcccaccagccacagaatgtgatataaagatcacccctgcttattccagaatgaacagcctgagacacatatcccttcagtagttggtcttgtgaatgcagtgtcctagtgcaaatgcccatcatctgttgaccccatccttgcccctgcctgccccatgctgtggatatctgggccccctcatcacccatcctggccccctgaccagtgaggatgccccctcccatctagggtactctgcgtctaaggatgaattccagtgtaattttctctcttctgtaggtttatttatggaagattggacctgttcatacatctgtggggcagccctccatctcccagctatataaagtctctaaccacagtgttgcattgtggggttaccatgtggtctgacacttccttgcatgaactaccctcactccagccctggacagtccagggcctagcaggcagtgtgtggggcctaccaggtcctggcatccaagctgtgtccaataaagttcttagatgtgactggaaaaaaaattggattaaaaaaaagcttcagaagttacagagccaactacagagaagcataataaatgaaagagtgtcttctagttttgacagtttggtgtttaccctaaagacttctctttgtgcatgtgtagatacatgcctataaatagaatatttgtgtagttggatcccactttctgcatagttctttgcaacccattctgttcaccaacccaacccttagaggtaaatactggcagtgtttctctctgcacatacaaccaagtgccactatacaagttcactaactccctgttccttacacaatatgtacatcctattgctttttttcccccctgaacaatctaccctggtactcttcataacacatacatgttatgtgaaacacagatgtgtttcattctttccaatagctgcataatacttcattacaggcatgtcccaccatgattaagaaatagcagccccatcaccttcttcataccactcaccacctgatgtattacatgtatttattttctgccccagccttcaactaacctatcaagttccataggcagggatttggtatagttttatcgctgaatttccattgactagaagagtgttgggagcatgcattcaggcataatctttccttagcaatatcatttattcatagaagatcctctcttatggagaattaactgaagcttagaggaagagacttttttttgagacggagtttcactcttgttgcccaagctggagtgcaatggcgcgatctcggctcactgcaacctctgcctcccgggttcaagtgattctcctgcctcagcctcccgagtagttgggattacaggcgcgcgccccccacgcccagctaatttttcgtatttttagtagagacggggtttcaccatgttggtcaggctggtcttgaactcctgacctcaggtgatccgcccacctcagcctcccaaagtgctggaattacaggcgtgagccaccatgcccagccaggaaaggacttttttaaggtcacacaagtggaggagctgggacttaaatgtgtctgctgagagtgacagtgaactttgcatgtgcccaatcttaccaaattaatgttctcttagttgaattattgcccatctcaccaccaaatgtgtatcttctcaggggtgtcagtttccccagggtccagatcctggccccacacccacacatggccaaggagccatttacatttaacattccataataggatgcataccttttcggttatttagggaggatgtggttttgcctggaaggctttgagaatgctgggcagctagctcaggggacgtggggcttaaagcagaggccgatcaacttttttctaaagggccagatagagcgtaaatattgtcagctttgttggacatgtagttctcggcctgccactcagctttgctgttgcagtacaaaagcagctgtagacaaatgagtgtggctgtgttccaataaaactttattcatggtcactgaaatgtgaatttaatataattcttacatatcacaaaatattagtcattgtcttttttttctccccagctacttaaaaatgtaaaactcattcttagctgccatagtttgccaactttggcttatagcaaatgcagcaaagtggcccaaaggtttctgagcctgtgcccgggctgtctcagctcagagtgggcaaggctcagagagttgcttttatggaatttgacctacatagaaagcaccaggtagaaaccttgtttccttcagggaccagtacccggaaacaagggggaggacctaagcaggaaagccatagaatttggcatcagagacccccaattggaaacttccctgaagcctagagtcccctggttctgcgcttttccctctctctcatttctcatctgtgaaaagggagtaatcgctccccaaaagcttgttcatggtggttaatcagaatgtgtgagcagcctctggcagggtgcctcagctcgctgctgctgctgctgctaaatgcaccagccccctcctctcagttctactttgaagactggcgagtgccttctgactcgagggcaaccaggggtgtctggaggttcagtcatgcaagggtcttgatatcattggaaggcttaaaggaagtggcttcaggagcacttaatgcttgaggtcaccctaaggtcaggttttggactgttagtccatcactcttcttttttaaaaggcttggcaggatggaaccggtcagagggtagaatgccaggctaggaaaccaaacaactctagtcccaaccctggcttttgtttgtatgctaggctgggcacctgccctctgacctcaggtgcctcctgtcaagtgccgatgttacagcagtctgcaatttcttgagcttctttctttcttattgcagccaaagctgtcttatttttttttcttttgagagtgtctcactctgtcgcccagactggaatgcagtcgtgcaatatctgctcactacaacctccgcctcccaggttaaagtgattctattctcctgcctcagcctcccaagtagctgggattataggcatgtgccaccacaccccactaatttttgtactttttttttttttttttgagacagagtcttgctctgtcgcccaggctggagtgcagtggcgcgatctcagctcactgcaagctctgcctcctgggttcaagccattctcctgcctcagcctcccgagtagctgggactacaggcatgcgccaccatgccgggctaattttttttttgtatttttagtagaaacggggtttcaccgtgttagccaggatggtctcgatctcctgacctcgtgatctgcccgccttgcctcccaaagtgctgggattacaggggtgagccaccgtgcccggctccaacttttctatttttagtagagacagggttttgctgtgttggccaagctggtctggaactcctggccttaaccaatccgcccgcctcggcctaccagagtgctgggattataggtgtaagccaccgcgcccagccttgaggttctttcttttaatgcccagaagttcatttaaatgagtaagaaacacaacaaaacaaattaaaagggagctgtcatggattcaggtaaacccctcccccactcctttgagccgtggactaagcagttggaaagccctgcgtcccctgcttccctgcacctggggaacccatgtgggatgctgtgggaagaggacaagatggagcaacatctggagtctgccagccctgggaccctcctcttgccaggaataccctgcctctgagtagcagtagccacgtgcccttcctgtgccaatatagattgagaacctgctgcaggccaaccctggggctggagcgcaatgctgacacactgacatgggtcaaaaggccacagtgtttggcaagttatacaatgtggccagggccatctggcatccgagcgttgggggagaggtcctgaatcttaacacctcatccatggcttcctgggagagggagggctcttgtgggtcgtgagacccccagcggtgggatagggagggtgaggggtggggacatgagaaatgcttctctgtgctggaccctgagcccagttgctggccaagctgggaggccatgactctcctaggagagtcaggatttgaactcagtctgcctgacttcagaggtccttcctcgacagccctgtgggcttggagtggagggttttgtggggtgctgtatttacctctcagagctctgatgttccagcactcgtcaggggtttgataaatggctaaggatgaacactggtctggcacaacagatactcacagagccagctttgcccaaaagccaaattgaaaagtggcaggtttctttgtttggcaattagcatgtgctgttccctactctcgtcactctggctgcagacacggtatgacccaggttccattccttttttttatctcactctgttgccgaggctggagtgaagtggcatgatcttggctcactgcaacttctacctcgcaggctcaggtgatacagatgtgtgccaccatatccagctgtttttttttttttttttttttgtaattttagtagagacctggtttcaccatattgcccaggcaggtcttgaactcctgagctcaaatgatccgcccaccttggcctcccaaagttctgggatcaccgcgtcctgcccctggttctattcttaaggagttcccaaactgagtggcagatgggtaataagctagagactgcagaggacatagcaagagcaaaggcctggaagagaatggaatgttctagaaagtagtctcatccccagggagtgctgatgggctgctggggatcccagactctgggctgtacattgctccccaccagtaaaaaaggctcccacaagaaaatcacaagctctatggggctagtacccttctctaagtcatcaccaactgttcatcagcttgacaccagaataaataaatacacgttgagtgaatggacttcattgccatgttccagttccagccactggctggtgggggcagatggtgctgaggctgcccgatcgagggtagcttgctattcttcgccgatccagcaaacacttgtggagggaattctgccaggcttcatgatggatactgatagaaaacgtaacagcaaccctttaaggaaggaactttcatccccgttttctaggtgaggaaaccaaggcccagagcagggctgccttgtatccaactccaaggtgaaaggaggcagcttgctgcatttaaacgtgggtctgcttccaagcccagcaatgatcaagccggctatagtgggcgcagcagagtggcagcatgaatctgagattggtcgcagtgtcttgtgcctactgaggagcaggggccatgtccctccccctacacctagcactgagccacactgagcacgctgtttcttaatctgactggtccccatttcttctccctgcacatactgttctgtccacctggaatgtagccttgccactgctttcccacttggcagactctctgtgtgtccttcacagcccagctccaatgtcacctcctgggaactcatctttttttgtacccaggcaaaactggaaatctttccctccagggttctcacagtgcctcataccagccccctgttgaagcccagaccacactagcctctcatcttcatctgcctccccactgcccccaccccactgtactggaaactccttccttggtgtcaggactgggtccagtttcatccggggccccagctctacttagcatgagacctagagcatgggtcactggtattttagtcagtcctagtgcagcagctgcctgggtggatgtggatatgacccagggagtgggtaggcaggttttctaaagtcgagtttgacctcgacctgctgatgacaaggtccagcggaggggtatgtccttggcctccagcagcccccattgacagaggctacagtcgagcagctgctcagtggggccccagggatgacttcagaggctccagacccctggaacatcagatgcagacctcagtaaaacagggcctgtgataatagcacttacctcacatagccagtgtcattcactcatgctctaccaacataatttttgccagatccatggatcatttgtattattttccacttaatgtttttatttaaattgctttgttctaagtaatatgaaatcacagggcttgtaaaaattattttgaataggtgattccattcacaccattcagaattcaaaaaagtgccaaaggctataaaatgaaatctccctttcaccctgtccccagtcacccaggcccccccggggttagaatgttacctttcttgtacattcttgttttttgttttttgtttttttttttttttgagacagagtctgctctgtcgcccaggctggagtgcagtggcgccatctcggctcacttcatctcccagataaagtgattcttgtccctcagcctcccaagtagttgggactacaggcacgcaccaccatgcccagctaatttttgtatttttagtagagacagggttttgccatgttggccaggctggtctcgaactcctggcctcaagctgagattatagatgtgagccaccgtgcctagcctcttgtgcattcttttaaatagatgtgtatattctccccctacccccagccaatttttttttttaacccaaaaggtagcatacaatatacacactgctctgtttttggtttcgcttttgttttttgggacagagtctcactctgtcacccaggctggagtgccatggggtgatcacagctcactgcggcctcgaactcccaggttatgtattccattatatcactatgccacgttttcttaaatgatagattgatgtcactgcattgcttgttttttaatctattctaatgtgttccagaaaaatacagtatatactttgcatcccatgagcaaatgcaggtaataccgcaggcagaaagcccagcacgtggcgggcctagcagtcgctgtttagtgagccctcctggtgatgcttagtgccttgccacagcctctgaattagtgtccaccctatgaattaggcttgacctggtgtgtcgctggggtcccccagaaatttgtcagctgctcactacccactcggaacaacagctctgggcctgaaggctccccagagaattgagagaagggagattctgggggcagtgccaggacatacggggggtgggggctgtctttctagttgggcaatgcagaggatttagagggaatggagtccctgtggtatgagggaagccccagcatgtggaataaatgtccagaggcaggctaaggggtcaggtagacagactaatgggaaggaaggatgcagcgcacacacagagggggctctgagctgcacactcctcctgggccgaagccttcttcctctttcgcagcctctgatgtgagagccttggcttttgcagtcgttgccctgactgacgctttcagagaatgaaaagaccatactgggaatatgcctggtaacagctatgcccagggctatctgtgatgatcttgaagtaaaggctgcttctgggttctgtggaaaccaaggcccagagacccacagccaggccatggccagctccacccacttccagggcccagcttggtatagtgtgcgtagtgaatgccagtcgtttctttggcatgcctcccgcagccctgttctcccacaatcagttaaaggcctgcctaatgtcacatttcctgacttcctcatttttatagctgaaaagagcacttttcttcagcagggctgacaccctgctggcctctcagtcacctgtggctaagcagggctcttcacctgctggcctctgcccttcctgctgccttaggtcctcggcttccaatggacagaagcaaactgctctttttctctcccatccctttgcccattggaaacaccttagccccacactcttactcaccttgtgcacttttccaaagtgcattcccgcctagcatgtcgtctatgtccatataaccttgggaggcttatggtttggggattattgccgtgaggagcactgggtaaggagtccggagccctgagctctgctgcaggctcctgagtgatctggaacttgcctcaccctctcagggctcagtttcctgccctgtgaacagcaggaagggtagggcaaggtgggatcacatctccaatgtgacaaacgaagctgttgccattttgctgacaagcaaatggaggataggggagaggtggtacatgggggacttagcctgctggaattcacagagcaaacaggcagatgggctggaatcagaagccagcggcttcagctccaaatccagggtgcttctcctatctatatctgtgctattcctaccaagtaatttgggccccctcgcataggagggctggttcctgggcctcccagtcagagagtctagaaccaccagaccctaggcatggctccaccagggaaatgagacccccaagaatccaaagcctctccctctctgagacctggctacagagagagaagatcatacttcccctctctccccaggaaatggcccggccagcccagtatcttgaagtcagctaggctggtttgggcacctaaggtcaggaattggccaagtttcctgggagaaagactggtgtggtgccaagagtcaggcaagatatctgaacacagaaacttgccagtccaggccctgccctgtagtaacctgctcccagacacgcctataacagtgtggtttgtttctccgcagaagctgacgggtcgcctcatgctggccgtgggaggagcagtgcttggctccctgcagtttggctacaacactggagtcatcaatgccccccagaaggtgagtactgtgccatcgttggcttatggacaccagcctgctctgttgcacatcacacatgcccacagtctcacgccaccacctgaattagagtcatttatatgaacgcactgtactgtctgcctctccagccagttttctggccctgatcatgtcagagactcttctcttgctttggaatcagggtggcagaattctagaatctcaggtcccacagaatcctggggtcttgtataggccctcttgaccaaccccccacccaactcagtcatttaataatatgtttgatgatataataaactcaaagcaaagctcaatacaataatgctgcatttccgtggcattctggggctgcagagggttttcatgggcttgtctcacttgatgctcactgcagcactgtcaggaggcagcaggcaccactcccagcctgcaggtgtgggaaacggccagagagaggaaacccgcccaatatcacccagctaagtcagagacagagctggtatccaacacctgcctgccaggtggtccttgagcctgcactcatacccatccacaggcagcacacttcctttatttgtaggttgaaaccgcgtcctctccctgaaggccctgtggcagtcaaagcagaaatggcgtcttgccctagggagccacagggggtgaaggtctgtgctggcttcctcctccctgccgtgcatcctagatctgtcctcacttgtttacttgaatgtcaggatgggaagggacctagaccatctcctccagcccagcctacttgcattaaggaggagagaagaggaaaagggggtagggggtaggaggcagggacaggaaaggaaactgagcccttcctctgtaccaggcattttgcttgtgtttatgagattgggtggtgatttccattttgtagacccggaaactgaggcccaggcagatgaaatggccgacaggcccaaggtcacaaagctattgaatgctggagtcagaagccaagctctgttgtttccatggcctcaggttgtcttcctaaccagctgccttgcccgtttaaaaatctgtaccttcccagagaggaccaaatgagagtgggcagtcctcacgtcaggaccacatttcttgtccagacggatggggctagaaagtgagtgcagtgactcccaaagatcagggtcctgtttgggggaaccaggtagtgtctagagttagctgggcttcttccaaataggcagacagtggctatggggccacgcccgatgctgaggagcaagtcaccaggaaggcttggcctgctgagtcatgctcagctgcaggggaggtgacaggacttttccaagtttgctgggcatggagaccgtgggcccatgcttggaccagccccaagccctgcatttgctaagtgctcttgacagctcttgccaaagtgtgtgcttcagaactggctccctttgggaatccttacagatggaaagtctgtaagacaggctgggaggaaacagagggaggttgagctctccacttggttgcacattggggtttccagaacgcccccagattctgatttaattggtctgggatgctgtttgggcattcaattaaaagcttcccaaccaattcgaatgtgcagccaaggttgacagctactggatttaatgatgtcttgactgtgatctcatagtgagttaatgacagaactaggactctaaggccaggacagaggaggtgttttccagaaacagaacagggttggggtgagcagggggccttcaaagcaaaatgcccagaagacagaaagcctggcattcagtaaagcgtgagtagtttagtgtgtcactagagtgaacaggaggaggggaaaggttggggaggtcaacaaggtaaggtaggcaagagccagaccacaaagggccttgtgagtatggcacggcacagtcagaaggggcggatgggcaccagcacgggggcccagctagggagcatggacttcaggatgaggacaatagggacccactgcccagggcagacgtgatcagacttgcattgtagggaaatgactcaggcgtctggtatggaggggcggacttaagaatgtgagactagagacgggaaaccatcaagaaagttgccgttggactagtgacataaaagcaaaccctcagaggaagaatggacaggatttggtcatcaattccgtgcgagggcaacagagaagggtttaaaaatggtttctaggtttctggcatgggtgatgtgtggtttgaagaaggagcaggtgtgccaggagctgagaggtggccgtgggatgtgcaggaatggaggcgtggggtgacacagctggagatgtgcaggaggcacctgtatgtatgggtctgtttcttagacccaggctggagaaaagttgagaattagtcactggtatccacacagtggagaaagatcttctagggagactgtggaataaaaagagaaatgaagattaaggccgggcatgtggctcacgctgtaatcccagcactttgggaggctgaggtgggtggatcacttgagcccaggagttcaagaccagcctgagcaacacatcaagacctcatctcaattttataattaaataaataaaaattaaaagtaaaagatcaaggccccagagaacaacccattgctagaaaaagaccctaagtagaagaacaagagctggtatctctaaaaccaggagaggataccctcccaagacagagggataatgtaagccatcgaagggccagggtatttgtctggtttgtccacggccgtgtccttagtgcctagaacggtgcctgtcatagtaatagacactggtggatagtgagtggaggaaggccatcgggtaccccaggggttgaactgggcaagcctctccacattgctgaatgcagaagaggcgatggtggccttgtggccactcgggctgactgggtggcacagcgtggatagaagcctcactacgattgggtgaagagtgagaggcagatgagaaagggtggagacggctcttccaaaagagttggtgggagagggagaaaagaggaggtttggaatgatggtatggctaggaatttatttatttattttaatgaaggttatttttaaacatgttggaaggaatcagcaggagagggtgaagataaggaagtgagggcggaggtcttccaggagggagggtggtgtcggagcagaagggaggggctgcctttggccaggagggactgagatacctttttttttttttttttttgagacggagtcttgctctgctgcccaggccagagtacagtggcatgatcttggctcactgcaacctccgcttcctgggttcaagtggttctcgtgcctcagctttccaagtagctgggctactggtacaggtgtgtaccaccacgcccagctaatttttgtgtttttagtagagatggggtttcaccaggttggtgaggctggtctcaaactcctgacctcaggcgatccacctgccttggcctcccaaagtgctgggattacaggtatgagccaccatgcccagccagggactgagagacttctgaagatgtagacaaatctgagatgaacttctgtgatccccggggcctcccatctaatcagaaataggcaagaggttataactgtcatggaatatgggcagaacctctgaccagggcatcacggggctggtcagcagcacagagggcccagatgagcctgtaaactgcattcataggaccatgtatggtcacctgtccaaaggtcacttcaggaaccagccccagcagaccgaagctggagatgtgagtggccagaactgagaacgctgaaatctagcggtgtttcttgggcaagcacccagacacttggtctgttgacttttgtactttacaaacacttctcacaaggctggctgtagtttttccaaccaggagccagattagaagtgatacatgtaacatgtgaagagaggacagaaggacccaagaagaagaaatgaaagtgaggctcagagcccatgtgtagtaacagggcagagagactcctgtgcccgcgtaggctgaaggcctgccctagggcgacacagagattccatctggccaaccctttcattcagccaggacttcctgagcatccacgctgtgccagatgcggtcctagacagtaaggagagagaagtatagctgtgaacacagcaggcacatgctggccctcagggagctgcctgagacacagtctgagccaggccctgtctccacagcagtgggagagaccccttggagaaagccagagtgtcactaacagagggcttcaaggtgctgtgagagcaaacggggcaactaatgctggggctggggtgacaggggagattaaaaaaagggcttcacgaaggacttggcagccatgctcgaccttgaagggttagttgacctcatagggcaggaggggcaggtgtctgggcagtgagaggggcttctgcagaggtgcaggggtgtgaaatgttctgctgatgcggaattgctaactgcctgcagtgggcacactgacttcccttgtctgtttagaagaacctctcttaggaaacagcattgggttggccacagtttgcctactcttgagaagagactttgccccacaagtggtgaggatgccagaagcttgttctcttccataaaacaggccccaaagggcttcctcctggaagtggttaattaatcatactaccttatatgtttacaaagcaccaccccataaattaccacctcacagcaactctacaaggcaggcggggctgacatcttcccctcttctaaatgagggaactgaagccagatgaggtatctggagagtgagaggctgagctagaggtgggctccaggccttgtgcctccccagctctgcacactgcccctgccctgctgtgagtgtgacaggacattcctgccatgcatcccctcctggaggaggaggacagagcagaagaggtgagcccagccacagagggagcagctaaatgaaccagggaatcctgaccatcatactgggctcatccgagcactgcctttcccctccccaaatgactgagctgccagtagagatgactgacggccactgagaaaccatgaagtcctggcccaagggacagtgtcaggcatgtctgagaataaggcatcctcagaatccagagtttgggccagaaaggcctcaattgtttgacaaacaacactccttgtttgacaaaggaggaacctggtctgcagaggaggtgaggtctgcccaggatgacccagcttggtgagtgaaagagctggaggcaacacccgcctcccaacccaagccctgtgtcccgtcaggctgaactgggcttcgtgctctaggcagcctctccttctctctcctatatccaaagagttctagtcctctctccccttcacccgtcaccactaccataaacccttactgcttacttatagcttgcccaggcattgttatacatactctagaaatagtaattcagttgttcttcaaaataaccccattaggcagacaccataattttccctgctctataagaaactggggcacaggaatgttaagcaattaaagcaaggacacacagctagtaagtggcaaggctgcaatgtaactccggggagtctggccctagtctgtgcccttgaccattgtggaagatggacacagtcccagatgggcacctaaacaccctttcactcacctacaactgccacctagctggcagtgtgtggtctcactttggagctgagtcaagctcagtcatgtaccaacatctcaggtttcccacacacagttgcacaatctcttacaccatcacaccctgtcatatcacatcacccctcaagcccttcagttagattcatggcttgttggtcatttagtgtcaactctgcacctccaccaccgtgctgggcaccagcaacatggatgcatcagacagaccatctccgtgctgaggtttactgtacagggagcacacggtaccttacagttagtcttctaaaggcgatgatggaaatgcgagcaagcacagtgggagcagggaaggaagagggagagggtgcttcgcccttagagcagggtttctcagcttggcactgtgatgtttctgctggtgttgtagaggcctgtcccgtgcattggaggatgtttatcagcatccttggcttctgccctctagataccagtagccagtgtggcaaccaaaaatgtctctgggcattggcagatgtcctatggggtaccaaagccgtctctgtttgagaaccagttgcagtggagtgggaggggtggttctcgggaggaaggctttccagaggagtatctgtgcatgttctgaaaggtgattaggcccaagcaaaggtgtgaggtgtctaggtcgtatgagggagtcactgcgtgtgccttgtgagtcatagttggggtagaggagacactttattgcaagagctgagaagggcttcgggtgtggccacggcagtgggatgattcctctgtctaccgggaggcctggcctggcctggccttggtttggaggctagccatgtcagggctgttccagggaagcagcctgggtggtccagccctctgcaggggggttggggcccagctctagccccaacctgggcctcttcccccaggccccaaagtgaggccccaggggacccagtgggcagggttatctgtccagccccacctggaacatctggctccaatctcccagctcaccctggggtgtggctgagagttgctgtggagatgaaggccctgggctgagagcttgtgggaagggcagtgtggggccagccccaactggaagacaggggcaggcaaggaacaggggtgaaggccaggctgagaggctaagccggagaagctggccctttcctccttgtaactggcgctgaaagcttggctggcagtttagccccttcttccccacaatagcatcccgtagagcacagggagagttgagaccgagcctaaacctggcccagggatccctgctggggatgacctaactgacctagtcctcctggggtaaaggaatgtctagagggaaggatggtgagaccagccagaggttccaaaacgcatacccctcctggcagtggtctagaatcctagatcaagggttggcaggagggccacatccagccagcagcctgtttttgtgcaacccatgagctaacaatggtttttacatttttacaaggttgagaaaaaaagaacaatgagtgacagaggccatatgtggctcacagaccctacctaatggattctagctagccttttacataaaatgtttaccccagtccggctctggagcactttgacttgcatgctccctacttacagggaactcaccacctgtaaggtgggcagcctcataccctgaagtctagaaagctcttccttcccctgagctggagtctggccctggcacctctgccctctggggctacagagtgctgggttcctctgccaggagcagccgagcagggtctggagactagctttattccctgaggcaggcccgtagttccttcaggttcctccttactcttacattcttagggtaatgatttctggcaatttcaaaatggaaaaccttgtccctaaggctcctccgaaagtggtgacttcttttcttgagagagcaacagtgacagcagtaacagcttacccatgtgccaggcagtgttcgccgcctcatgcccctctacaaaggggaagtgagaagttccttggcagatgggcagacatgtagtctcacccacagttgcctcgactggcgggaggtggtgtggggattcccaggtgtccttaggcttgggcaggcctccccctcaccccaggagagccaccgggtgaggaatagcttcgcgtaccagaagccatccggttcaaaggatctcagctgcccagagtcaacctgcttctccagggtggtctccatggtgggtgtcctctaggctcagtgaggcacctggacagagatctgtagtagcccctcagctctaggctggccgacaccatggcagtccccccaggaactaaccagaaccgctcctccctcctcaacacgcttgccgccacccagactccacagctgggtgaagagactgggctgggaagggagcagagaagcgggtggatggccgagcctggcacatttggtgtgcaggactccgactgcattctgaggggtggttcactgtgggaaatggggtctgactttggtggataggaagagtcgggagcagaatccagatgagacccagggcaggctgcctgggtagagaagtaggacagactcggaggcagaatcgagaggacctggtgatggatggatgtggggtggtggcagcatcaagtgtttaaatcctaagcttgggacgggcatgtgaggtgggagcgttcagaacaggcacgtgccaggtctcacctcacacatgacccagggttgcggaggctgctgggagccggcgggattgggcctgtgggatcctgtcagggcataataagtagactcttctttcctgaggtgcacccagacacttctagggaggatgtgaccccagagcttttccccatgtagggttcttctcattctccagcatccccctgcctttcctgggccaagagtcagcgtggaaccccatacgaatccccagggaggagagggcacagagcaccggaaccagcagtaggaattggaaaaccaggcgtggcttcttcccagaaatctcaggcatcaagaggcagaaacccactccccagcctcagcttggccaggaagtgctgctgtgggctggagaggatgggtctaggccaaggtgaacatgcagagagctggctgctcacccttcctccaccccataaagtggtctgagtaacagagcagctaggcagcgtccaggagccagccctggacaaggttgggtccctttgactgtgtgaccacaggcaggagacgtaactcagggtggagctctggtcacacctcacttacacacagccctcttgtcagttgccccaacatctcaagagatcttcaagcttatttaggtagtttcaagccttacttagcacctatttactctttctttgtatacaattcaaacaaattccatttgctgacttcttggcaaatttcaaaagaggtgtggagagttgtacaagacaagcctctgaaccacagagggttgggggaataccttagaactatggaatgcagaaatttagccatcaggagccagtctgcacagggacaaacacctctccttgcccctggagagagccccaagggcagacaccattgccctgcagccctgcttgtaggtctggttgctcaggagagcaaagtgaaatctcttcacattttcaccccataatgggtcaggaaagattggaccctcagaagggcaagcgccatttatctggaccgttcccatatccaccctcattcagagcagcctgttcttggtggagcctgataaacggggcattaccgttcccaaccagtcctcctctggggttagtttcgtccacagaagaacactttgcattttgttactctgttttttgtcaaaatctgccttctgtctgcccccagcagaatcaaggggttctaagaggagagcctaacacctttggttcgattcctccatttcctcaccaggtatccctggcactggctctgggacagaccatggtgtgaatcaactgtcttcctcagggaagacaaactcctggagtcagggaaacctggatctcgaaaggtttcagcaataaggccaggggtaccttccaggcaggagtagtagcatctcaaaggcgtagaggggtgggagatggtgtgtagtgagtgcaaaggtgtggtaggtagggagattggattgatacctggcaggagccccgattttgagttacgggttgaaggcttggggagactctgttagtggtctgcacagccttcaggccaccagtgtgcagtggggtgattttagggatgatgacaccaagcactgtttcactgattccctgcagcactgtgaagcagctcctgctaatgtctgcactttagaaatggggccatggaaactcacagatgaaataacttgctcatggtcacactggaaataaggggtggagctaggacctgaatttagttgtgtccagaatcagagttcaggtttctattcactgccctgcatggcgtccttggaacggacaagcagatccttagggcttgcctctgccctaccaactgtcctcgccccttggagcctggcctccatcagatgcctgctgacttgggacaggttgtgacagggcaggggaaaagatggctagaggctgagcacccacagcaatgggaaggaaggcaccaggaggcaggcccagcatatttgaataggtgggcatttctgggactgcaggctttggtttggcaagtgtgcctgcccacaccttcttcttctgctagacctcagtgggttggaagggatagggaggaccaacagcagtgatggaggctgcagaggctgcataccgctgtgtgtgcatgaacctgtggcatgcacacacacggaggggtgttgggatgggttgggttcacatggaattgagtttgagctgtaagtggtaggggatgaggggcatgtgagtttgtgactggctaaagcaggaatatttagattctatgagcacgggtatgtgtgtgtgatggtatacgtgcataagaagccgtttctgggtaactagggcctgcactctgctatacgtgtggctgggtgggtctggccagtcccatggcactgagagtgtggtgagtgtgctcaggcagaacgggtgctgcctgcctaccacatccgtgggagctggccagggtgggggcagggctggtgggcagggctgccctaggacgggcgtttccagttcctggaactgcttccttgtgtggaacctttccccatacctcctagctgggcccttgggagaggggaggaggccgtgggtccttcaagggggtgctcgcaggccagacacaagggagctaggcctggggaacagaaagccacagcgtgagtctttcaagcacttctgaagggtgacatgtgtgagtttgtcacaccaggccctcagtgcggtcagggagtctgtacttcctggatggcggaacctgtctgtcaagccctgcttcctccccagcaaggggttggggggagggcctgatggcaggagatgggcccctggggctttgagacatggtgaggagaaaaggggcaagtgggaagacccttttccttctgtatttctcttttttttttttttttttgagacatagagtctcactctgtcactcaggctgaagtgcagtggcacagtcttggctcactgcaaactccgtgtcctgggtttaagcaattctgccttagcctcccgtgtagctgggattacatgcttgcgccaccacgtccagctaattttttttttatttttagtagagatagggtttcaccatgttggtctggctggtctcgaactcctgatctccagtgatctgcttgccttgatctcccaaagtgctgggattacaggcgtgagccaccacacctggtcttgtacctctctgttctatgcctgaacttccaccactgatcacttgccatcatcccagcaagtcacactgagcctgtgaaaccacagggcactggaaaccacacgttaggggaagtgggagagttggcggggctctcagatgaactccaaccccttgtttctcgcctggggaaagtgaggcccacaaaaatagagggacttggctcaagaacatgcagtgaatctgtggcagagccaggccctggccctctcttagggaggggtgcaaggggaaaggaaaaggaagactgggtcctggcccctggcttgctcacccaggctgcatctccccctgcaggtgatcgaggagttctacaaccagacatgggtccaccgctatggggagagcatcctgcccaccacgctcaccacgctctggtccctctcagtggccatcttttctgttgggggcatgattggctccttctctgtgggccttttcgttaaccgctttggccggtaagtaggagaggtcctggcactgcccttggagggcccatgccctcctgcccagggagtcccagatggggtgggaggtaggggagacttatctgcctgttccagggtattacctctgacccagcccctcggagcccaaggaatgtgggcactggcctgacctgtgaccccgtccccaggcggaattcaatgctgatgatgaacctgctggccttcgtgtccgccgtgctcatgggcttctcgaaactgggcaagtcctttgagatgctgatcctgggccgcttcatcatcggtgtgtactgcggcctgaccacaggcttcgtgcccatgtatgtgggtgaagtgtcacccacagcccttcgtggggccctgggcaccctgcaccagctgggcatcgtcgtcggcatcctcatcgcccaggtaagctggggcaggatctacctgcctggcacggcccctgcccacagcttcagtggctctcggatctgtgcccagcagggcagagtttctcttccgcccagcccccacagccttgcagaggacaactatggtacacaggtccagagaacacagcaccatggcctcccagttgacagcaagatgacttgactcttctcagtccctttcttctcactctaggcttccaaccacagggcccgccttcccccaacatgccgcaggctgttatgcacagtaccctctctccaggaggcttccccttccctgtccccaaaaccctcttgtggcagagtagcagcccccattctctgtgctggacacatctgtggccttgtcatttgtcctcccagcaacactgtggggtaggtcctacttttcccatgtgaccgatgaggaaactgagaaacagggctcatgctagtggcagagcctctagaactggggcccttccctgaagcagcagctgacacaaagtagggaaggccactctggcaggacggggtgggaaagggggtcagggcagaggcgctcacggcccctgcttcccccaggtgttcggcctggactccatcatgggcaacaaggacctgtggcccctgctgctgagcatcatcttcatcccggccctgctgcagtgcatcgtgctgcccttctgccccgagagtccccgcttcctgctcatcaaccgcaacgaggagaaccgggccaagagtggtacgggcatggccctgccctcctccccactccctgagccctggccttcttcccactctgagccaccctcaccttccctccggtccccccagtgctaaagaagctgcgcgggacagctgacgtgacccatgacctgcaggagatgaaggaagagagtcggcagatgatgcgggagaagaaggtcaccatcctggagctgttccgctcccccgcctaccgccagcccatcctcatcgctgtggtgctgcagctgtcccagcagctgtctggcatcaacgctgtgagtgcccccacccacccttcctgtgccccagccaagccctctggtcaagtgtgcatggtgaacaagtcccaaacttgaaacaacagatacgcctctgccgaagaagtttccctttagaccccaagcccgtaaggtcactgcagtgcagtgtcccttctgcctgagtatttgtccccttcattctttactcatcctgggtcccacatccactgctacagaggcagggaagggccacaatgtccaggtaggccccaacagtttctcttgtctggcaggtcttctattactccacgagcatcttcgagaaggcgggggtgcagcagcctgtgtatgccaccattggctccggtatcgtcaacacggccttcactgtcgtgtcggtgagtctttgcttactggcccccccagccaaaccccagggaggaggcagtgccatcttccccactggtctttgcagtgccctgtgactttctcagctcttgaggcaaggcctctgggtgggtgggttcagaagggcactaggcaggggtggcactgacactgtctctgcccacagctgtttgtggtggagcgagcaggccggcggaccctgcacctcataggcctcgctggcatggcgggttgtgccatactcatgaccatcgcgctagcactgctggtgagttgctaggttctggagagtgagggatgcgggagagtttgcctgggcttcatatcccaaaatgcctgtctcagccccaggctggcaggccttttggtggctgcattctccctggctgtgggtctgactttctggctcctgaagttgtctccttccaaaccacacacatcctctcttgaacttgctcctccctgcttgatggattctcagcgcagcacctctggtcccagaccccaaactctcacctccttaaggaattgctttgcctaatattaaccctttccaatcttcatctgtagcctcaattcatcttcacagcaaccccgggaagtagtgctgtcctccccatagaggcgcagaaacatgccttgcctcattcagttcacacgactggaggtgtagttcagttcttcccattttatgggggaggaagcttaagtcccagtgaggttagtaacttgtcagataaaggatgaagccaggaatcaacctcagtcccaggcctgtgactgtgaccgctgtgctaaccctgtgcctggcactcacacacaggcactcgtttatttagcctctgggcaaggaaagcaccatgactgtcattttacagctcaacctgggcttggaaagtttggtggttgccgaaaggccagacaggcagcaagtggaaagcccataaattttctaccctggcctcctcaagaatggttatatgcagaaccgtatgcttagcgcttactctgtgccagcctgagctgggcacctcacacgccttagaacctgaatccaccccacccccaggaatgttctgcatcctgccacaggcggactgtgctgcaggcacagacaggggaccatggggcctcttagcaccgtccacatgcacaccacattaccactcccagcgggtggactcaacacttgcagccaccctgcaggacttaaatcattttgttcggatgaggaaacttaggcccaatgctggatacacaacaaatccaggaccatccccaggcttcctgccttctcgcatagctctgctctggcctctgtagcttctgtttcccctgaggatccatcacaacccagtctaacttttccccctctccgtcatcctcaacaggagcagctaccctggatgtcctatctgagcatcgtggccatctttggctttgtggccttctttgaagtgggtcctggccccatcccatggttcatcgtggctgaactcttcagccagggtccacgtccagctgccattgccgttgcaggcttctccaactggacctcaaatttcattgtgggcatgtgcttccagtatgtggaggtgagaacccccactgtctctatactcaccatttctcacccgcacgcatgaccccacagtgctgtgcaaagtgctggcccagcattctcattaggaatcatgctgaggaggaaactgagggtaggaagcccaggtcacatgaccaagaatgctgacctcaactccagggttctccccttagccttgaatggtgctcctggagcctgttacattctaggtacaagcgtggtctcagttaattatgatagcatccctgggtaggtggatgttcccttttcagctcaaaggcccaaaggtaaagtgacttatccaaagtcctacagccaggatgtagggtcatgactccaaccaagtgtgtctgtgtgtctttcagcaactgtgtggtccctacgtcttcatcatcttcactgtgctcctggttctgttcttcatcttcacctacttcaaagttcctgagactaaaggccggaccttcgatgagatcgcttccggcttccggcaggggggagccagccaaagtgacaagacacccgaggagctgttccatcccctgggggctgattcccaagtgtgagtcgccccagatcaccagcccggcctgctcccagcagccctaaggatctctcaggagcacaggcagctggatgagacttccaaacctgacagatgtcagccgagccgggcctggggctcctttctccagccagcaatgatgtccagaagaatattcaggacttaacggctccaggattttaacaaaagcaagactgttgctcaaatctattcagacaagcaacaggttttataatttttttattactgattttgttatttttatatcagcctgagtctcctgtgcccacatcccaggcttcaccctgaatggttccatgcctgagggtggagactaagccctgtcgagacacttgccttcttcacccagctaatctgtagggctggacctatgtcctaaggacacactaatcgaactatgaactacaaagcttctatcccaggaggtggctatggccacccgttctgctggcctggatctccccactctaggggtcaggctccattaggatttgccccttcccatctcttcctacccaaccactcaaattaatctttctttacctgagaccagttgggagcactggagtgcagggaggagaggggaagggccagtctgggctgccgggttctagtctcctttgcactgagggccacactattaccatgagaagagggcctgtgggagcctgcaaactcactgctcaagaagacatggagactcctgccctgttgtgtatagatgcaagatatttatatatatttttggttgtcaatattaaatacagacactaagttatagtatatctggacaagccaacttgtaaatacaccacctcactcctgttacttacctaaacagatataaatggctggtttttagaaacatggttttgaaatgcttgtggattgagggtaggaggtttggatgggagtgagacagaagtaagtggggttgcaaccactgcaacggcttagacttcgactcaggatccagtcccttacacgtacctctcatcagtgtcctcttgctcaaaaatctgtttgatccctgttacccagagaatatatacattctttatcttgacattcaaggcatttctatcacatatttgatagttggtgttcaaaaaaacactagttttgtgccagccgtgatgctcaggcttgaaatgcattattttgaatgtgaagtaaatactgtacctttattggacaggctcaaagaggttatgtgcctgaagtcgcacagtgaataagctaaaacacctgcttttaacaatggtaccatacaaccactactccattaactccacccacctcctgcacccctccccacacacacaaaatgaaccacgttctttgtatgggcccaatgagctgtcaagctgccctgtgttcatttcatttggaattgccccctctggttcctctgtatactactgcttcatctctaaagacagctcatcctcctccttcacccctgaatttccagagcacttcatctgctccttcatcacaagtccagttttctgccactagtctgaatttcatgagaagatgccgatttggttcctgtgggtcctcagcactattcagtacagtgcttgatgcacagcaggcactcagaaaatactggaggaaataaaacaccaaagatatttgtctctagaggctcagctgacaaaatctgggagaagtttgcttttgtaactacaggcaggcttttttctccctgacatgaagaggggttgtaagaagggtgtgagaaaggaaaactggtacttagcaaatggaaatacctatatgtattaccattaggtataaagaatctatgaggacatccatctgcatctcaacaaagaagagcaggttgcgaagaatatgccctgcctgagcctggggacagggcggttaactggtgaagggctgaggccagatgaaaggaagccttatcgtgtgctcccaaaagacttctgttgaaaggagttatccgggtccccgtgcgggagggggtgcgggggcagggcaagaaggagaggccgggggcccaggtatcttactcctacgacgctgctcactcagggctgtccccactggaccagaaaggaaacagacggggtggggtggggtggggtggggtggggtggggatgggtgggagccccgcgccggtggccggacgcgaggactacaaggcggatggcgggcggagctcattcacactcgagggcccagaacgttggcagagccaggcagcacccgagccccgccccggcccagaggttcagaccccggtctgaaaaggcccgacaatccactcgcagctgcctcccgccctgggtcagtatcgacgtccccgagcaccgccatttcccaaactgcaaaatgtcagcgcaggcgcagggaagccggcccgccctcagcgtggtccagagtgccgcgacggcacagctgccggtcggtcccctgacgcctttcctctaggggccgcaatccaccccggggtagaagatttggggccaaggttcggccgcctactgccggggtcgatggcgcatcctctccagacctcacagcggtcccctaagcccggccaccggcggcgcacggacacgattggggatgggcggggccaggtggtttctccaccaatcagaggcgcattgttgggcccgacgaggggcgggctccaagactccaccaatcacaccctggcggttccaggcgctggcccttggggacgacctgggcgcctgcttgccaggcgatgcggtttactctggagggggtgacggtgacttgtgtatcgctgggcatccctggggacgtagctcacccgggttcctatcccgcgtaaggtgacgtctacggtttctgacgaaaaggggtaaatagataacgggactgttctccaggccaccatcttttcccagcagtgcttagttgtttcactgacagtgttatgagatctttcatttgaaatcttaggcgcaaaatctcctctccctggaagccttctggatcaggttttcccgggaacactacatcggcttgtatttcctccatcaaagcgctctccacgctgtaccggaattgagtgtctttccaccacattgggggcgggggcggggacgagggcgggggttgggggggtagggcagctgccgcaggaacacgactgagccattccttggtc

SEQ ID NO: 157 - DNA, 312972 bp, Human
  misc_feature (1)...(312972): n = A,T,C or G
ctcagggcgggcggctggtccgggaggccacgccagcgcgacccagccgagtcggcccccagcccgggcccccacatttcctcccccggagggagggaggcgactctccgcgggctgccctccccagcgcccgccgcgccctctggcggccgccgcggggacgcgcccggggcacgcggcgctgcctgtctgggccccccttccggggcgcggggcccgcgaggggcggcggggtcctctctcctcgagccactctgggccgagccacacgggccgcgcccttccccctccgctccccctgagcccccaaactccgggctccacggtcgcaacgccgcgggcaccccagcctggcgtgaaagtgcccggcgtagtagcctgggggggggggtcccctttctcccaggtgcgccccttccgccacgttcgggctttccagtacgcagcgaaaaaaatgccgcatgcacgcatttatttattttgcaacagctgcaagaaacaatgaagcttttcaagaaccggggaaacgcgctttccagccgcgctgttgttgttttcaatgaacctctcccagccccgcactccccgcccacccctcccctctcctgcccacccctcccctgcctagcctttccctggctacccacccctgccccgccgagaccggaccggcggcgggggcattgtttttggagtcgggcgggaggggagggcgcgtgcggggtggccggcgcagtgcggtgggggcgggagcgggtgggcacgcgcgcgtgtctctgtgtgcgcgcgggaggcggtggggcgggagatggggggcggcgcctcgcagtctcgcgccccacgcccgggctccgctccgcacgtcttggggaacccgggctccggttttttgcgcgcgccggcctgggccgggccctcggcgcgccgctgctgcggcggtggccgctcgagtgtgcgagcgggcgcgtgtgcgcgggccagggcgcgcgcgcgcgcgcgcgagcccccagtgtgtggcagcggcggcggcggcgcggcgaggctggggctcttgtttaccagcattaactccgctgagcggaaaaaaaaagggaaaaaacccgaggaggagcgagcgcaccaggcgaactcgagagaggcgggagagcgagagggacgccgccagcgagcctgcccacggccggcgctcgcagaccctcggccccgctccccggatccccccgcgccctccacgcccctcccgcgcgggggcagctccacggcgcgcctcgcctcggctgtgaccttcagcgagccggagcccccgcgcagagcaggcggcggcgggcgggggccgggcgggggccggcgcggggcgggcggcggcgcagagccgggcggcgcggcgggagtgctgagcgcggcgcggccggcccgccgctttgtgtgtgtcctggatttgggaaggagctcgccgcggcggcggcggcgctgagggaggaggcggcggcgagcggagccaggaggaggaggaggaggagggggagccgctcattcattttgactccgcgtttctgcccctcgccggcctcgcctgtgacccggacttcggggcgatcttgcgaactgcgtcgcgccctcccgcggcggaagctcgggcgtccggccgcctcccgcgcggccagggccgggcttgtttttcctcgcctaggcagatttgggctttgccccctttctttgcagttttccccccttcctgcctctccgggtttgaaaatggaggccgacgacgccgacagtccgccccggcgcgcctcgggttcccgactccgccgagccctgggccgctgctgccggcgctgaggggccgccccgcgccgcccgccccgtccgcgcacccggagggccccggcggcgccgccttcggagtattgtttccttcgcccttgtttttggagggggagcgaagactgagtttgagacttgtttcctttcatttcctttttttcttttcttttcttttttttttttttttgagaaaggggaatttcatcccaaataaaaggaatgaagtctggctccggaggagggtccccgacctcgctgtgggggctcctgtttctctccgccgcgctctcgctctggccgacgagtggagaaagtgagtatgtgcccgccgcccgcggccactgcgggaacttttcctccgaggggctgcgccctgtttgcgaaacccgagttgccaccgtcgcagctgtcgggcccccgggctcgggagcggcggggtggggcgcagggcggctctgccgggagggaggctgcagcggacccgggacccgggctcgttcgtctggagccccgcgggccctggctccgcgcatccccgcgcgggaagggcttttctctttctccgtcctgacagcccagccgtgtttcccggctaggcgcgaggactcggtagggaagttggtgccggggcgggctccgcggttcccgggccccgcgacccgcacctcgccccttccgtgcgcacgagcctctccgcacacagcgctgatccccctgcggcgcgcaggcagcagcgacagcaccctgggccgcaccgcgtctccgctgctggggctgaccgggcagtggggagcgggcagccgcccggcccgcggggtgcgagttgccctcgaggggggaggtgccctgcggagaggccccgaagccccaggacacgtctccaagcgcccgtcgctgcctcccgtcgcccaacgtgcttttgcccctcgggctcctcgggttcctggccttgcccgtcactttggcccgctcctcgttgggttacctgcccccggcgtcccggggctgggcggtggggtgaggggaagcgctctctgggcagccccccgggaagtgcgaggccgggagtcttcctcagcttgtctcttccggggagcgccactgggtccccagttcagagggctctgggatggtctcccagtttctcccgggccgggggatggaggggtactagggccgcatccgagtgtgcgttggtgggtgtgtggtcggagccgacgtgcattccgacacacgtgctcgcagcgcggggtgtagtcgccgcctcacggggacacctagacgcccgtccctggcgagaggtgtcgtacgctgtggtttcagcgccagggtctgcggcggcgcggggagggtgttgtgttttgcgagcgcggagccctggccttggttttgttgtggtcggcgtcgtgtcgccctctcttctgccgccccgcacttcctttgtacgtagttaataagcagtgtcgctccacattcgctgtcttttgcaatctgatagcttttgttttggtggtgtcgggtgggggttagtagggaagcgcggggatgcggggagcgagaactccccccggtgtctacggccggaggaggtgggggttttattcttctgaaaaagttgaaagtgtggcttactggtacattcaagatggtagggtaatttgaacacgattaaaagtttaaatgtcgcagaactgggactgggaacggtgagggcgtgttggtgagtaatggttgccgagggtatgcaggtggtgccgattaactttgaaaaaatcacgactgagccttcacgagtgaggcggggaaggaggaggcagcggaggttgtatggccccatcaccggggcaattcagaaaggctgtttctataaacaaatccttaaacgtctggtaagaaatgagtccgcgacggaacgagagcagatcgtggttcgcgtgtttactgccgagtgggacgcggactggggccggaccttccacagatctgggctctcctgctctttgttttctaaactttcagcggactcgattgggcgaaagccttccggctccctttactaagtcgtttaggtggtggctggggggacaaaggagggtttttatctttaaaagataagtacggtttagaagacacgggagaaataatccattttgttatgttatgcagttgaactgtatagcttctctagttttgtgtttttaatgttctgaaattcaaaacagcagggatggccttcgccgacgcaggagtcgggcattttaaaataggctgtttttcttttggagcgttcttcttgaaggatattgtttgtgcaagacggcgatttttgagaacacaggcaggagggagggggtgttttaatgtatgtttttactccatgataccaaagcttccccccaggatccctttacagtggttagttcctggaaacctgatgggtggtcagaaggcaccccaaatctcgattatggtttgctgaagtcttgactgactcagtacctgcccctccctccatctctgaaatgtggagaattaaaagctatgcctgtgaacgggcgttcagtttttagccgggaaggtgctagaccacttaactctgatagaaataagctgctgagccctatcagggagggcgttctttcagctgttgtctggtggagaaataaagacagggtgttggttcagttgcaggtattttgctggcgtattgagagattagagtttcctctttgagtgtgatggcagtagaaagagtgttgtttatcttagaaaacttagtttctgaagcagaggcagtcatatggatgtgtttgttttgtatcaccataatgtgaacagagcatctaaatgaaggcggttcggaggttctgagtgatagccagataatctgagggctattttgtttttaaaaagtcagcatgcactttaaatttattgtacccatctccttaaaaggattcagtcatctttctaccccaggcatcctgttgtcacagaaatgtaggtatgtgaaatgttggtgtttaaagaagttagtgttttattaccagaaggagaacccagaaaaagaacttctgaaagaacctaaacagcaaattatagtttagatcctctggagagacatagcaagcaaatggtgttttgtggaagggtggggtttgtgtcaggatttgaaatgtaaaaggtcataatgtttgatttgtcgaaaaagattagaaaagttcaactctaagaaatatgctaaggttgaatagatgaagcttaaaaatatcacaaaaagtgaaagaagtcagtcacaaaagaccacatatcgtatgatccggtttatgtgaaatgtctagaataaacaaatccatagaggcagaaggtagatgagtggttgccaggggctgggggcggatggaatggggagtgactgctagtgggcacagggtttctttttggggtgatgaaaattgttctaaaattagtttgtggcgatggctgcatagctctaaatatacttaaaaccattggattatatactttaaatcggggactttaatggtatgtgaattatatctcaataaaccctttttttttttttttaaagaaatgtgatcaggttgaaaataacttgttatgctaccttaaattacgttaaaattattacatatatttgacaggctgatgtctctctctcttttcatttatgagtttttcagatccgtgagttgcagcaatacaacaaactgataattgaagcttagcaacagggattcaatcccgcagtagaaatgggcaagcaggagaaaaagaatcttggttctatgtagcttcagttagggattgaggagctggatttaaaaaacacaaatgctggtggagggcagatttttgacaatagaaacctcagctgaatctgaaatgatggtttttttcaggatagagtttaggagctgagtctgaagggctgtttgtatttccagttttattatgttttccaacaaagaaagacattgctgttttaagatgttttaaacactcattttttgatatgccacattgaccacaagtggtagtaaggactgaggatgaacagaacagttcattttaatgcagtattgttgtttcttttctttgcagttttattttatttcttacatagttccagggtctgagcaggagaaagaatctttaggatgcagtagttttaggatacactgtttcaagtatacagtgatttttataaaattaaaattccttacagaacgaaaggttttaaaatgtggcaaaggcatttttgttttgaaactgtgtgcatttatccagatttaccctggcctttcaataggaaaagacctagagaataattgttgtttacatttgcttttggtctttgtctaaggcttagtttactaataaaaatgtttcctgcccttcctattgttgcaagatcagggcagtaatgaaaatcaactgtatcattttcacttgttgccttagagtttttgccaagaggaaccctcaagggacggtggtttccttttaaatctggtttcatttgttttgtaagaatgtgctgtaagaagcaactgaatccagcctgcacttattgtgcacctactgtatgaaagctgaccttgtgctactcagtgcatgaacctgcagagtcttgcatgaaaccacctttcttgaaattcagattttttttcagactcagtatagggtgcagttttcaagtagacagtagttagcattttaaaggttcttttaaaaatatttctgtagacttaggactctagtgttgttcatcagaagcctttaccctataccttttttgcctcattggtgctttccgttatattgggatgtcactgtagactgtgacatacaggtgatgttaacccatcttgactggcggcactgtcttctttataacattggatatggcaattgtgatttacaaactgcagtgttgtagttgcctttttccaaaaattaggagtcacaggtgtgtacatgaacgttgcatagcatgttttgagttgtaagaaagatggaacttatttcagaagttttctggattacatattgcttagttagctttctagaaatcaggaagcattcataatttcagggcattttataatttgtaaataacttggtgtttttaaaagcgtgagggagtaagagtgaggagacaaatcctgaaagtttttgttttttaattgtaaagcatacaagatacatttctttataggttgtgattttccccaatttgttttcaaaactcatttaaaaatcagacctagttcatggaagaggtatttgcgcctgtgggcgaacttgatttgaactgcttttcttagccagcttaggacaggtgctgagtccaggggatgagctcttctcaattgtactaaatatataatagttgcacacatgttacggatatagtttcttgatttccagtctgagatgttctgaaggaaaattctgaacactttagagacaacaaagtgcctaatgagtgatgcactctgatccctcctggaaaatggtgtttggcatcagcttagcaagaggaggttttccagttatttgtaaagatgtgatgtggctttaagtggggatgggggagggtagcagccccagtgtttgtggacattgagacctgttgacatttgggaagcataactgagttccactatttgaaaagattaaaactttgatatatgtacacatcccctcatgcctgcacccccatccccgagggtctggaaaagaattgatttgttctgaggaaggaacatatatttggaatataaaatggttagtaaacaaaggatctttaaaacaagttagattgttatctcaagagaagcatacttcctcggcatgatgttttcttttgttaaattgctttggttttatttgactcaaagtattaacaatacctttgattttgagacttttggacttttgaagactaagtttttaaatggtcaattttactcgtttgaaagtcccagataccatttttgaagatttctctccctttttttccactgatgccggctttacttatgttttattttcaaatcttaaggaaaaactgatatttccttacttgaactgagaaatagtcgttttccctccctcttttcttccacagtaaatacatgttgagtacttactggatgcagttctttaggtttagaaattatttgatactgtaaaatgtcttaccataagtttttaaagatacccgtcaaactatagatgttactgccatgtttattaaaaaaaaaaataaaacgaaacaaactagtaagcaagcttaaaatttttctttttcctgccctggactacagatttttttttcttttttttttttgagacagggtctctggtcacctaggctggaatgcagtggtgtgatcacggcttgattctgccttgacctcccaggctccagtgatcctcccaagtaggtgggactacaggcacacaccaccatgcctggctaattttttgtatttttagtacagacgaggttttgctatgttgctcaggttggactcaagcgatccactcacctcggcctcccggagggctgggatcacaggtgcgagccaccacccccagcctacaagaatttgtaaactcatagattgctcttctgttttcactggaccacaacagaaagtagtttcttttatggtgagggatgaacacctacgattgcaatataagttgttgggccttgtgtccatggagctcacttggtggttggtggtcttgaagcattcacattctttggagtagtggggcggctggctagtcacatggggaagatgtgcacacctgtggatggggccatcacacactgcagcgatagctgggcctaccttactgctcacctggctgggcacagcggctcctgcctgtaaccccagcactttgggaggccaaggtgggcagatcacttgaggtcagaagttcaagaccagcctggccaacatggtgcaccccctttctactaaaaataccagaattaaccgggcgtggtggcccgtgcctataatcccagctacgtgagaggctgaggcaggagaattgctgaaacccaggaggcagaggttgcagtgagccaagatgatgccactgcactccagcctgggtgacagagcgagactccatcacacacacaaaatacatatataaaaataaattgctcacctggtaatagtctggaaaacattttttttttgtttttttgcatattttaaagactttagaaagtagtcttgctaatccagaaagttcttgcggggaggagtttgaaactttgttttatctcactcctcagtcttagcccccttaataccataggtctctacttcagtaagagttacataatacgaatgccgtttgttcagaattgtgtatctccatccatccgtccatcgtccaaattctgcaagtttgaaatacattgttgttgctgttttgtatacttttgttcaaccattttctttttaacatggcactagctttctcaaactggctttggaattatttgtcagtttaaaaataaataccactttaaaaattactcttgacatgggagaacaaatatattttgatagttgttagagcataaatattttatagagcataacttgaaatttttcctgatacattgtgattgctttcagcttgtcctctgctgtaaaaaatatagtcgtggttagtctctgtaaagttggttattgggaatatgtgcttgattacgtaaatgagacatcaccaatttaagtcagccaaagtttagtcaatagaactttaaagaacagaagtctaatggtaattagggagagatgaatttatttgtaggagttttccccaaattcaaagcgtcttagtgacctttgataacttcctggaaaaagtaggaagcatggagagaaattccaggtaggagcccatgatccaattgactgcatcagcttacaaagtgttttctaagtcattagctattaattctgtctagattgtaaaatccctctcagttgtgtccacatttatctgtgttgtcctgtatttattctctttacctaatttccctgagtctcattttagtgggataatacacaagcttacagactcaggactttaaagagaagcacagattgccacgaaaacaaatgaacacagagaccagtagcagcagagggagatctgctgtgaggcttcccttagttctgttgtctgatttctgtggataatgagttcactgcatatgttaggtcacaacatgatatcgtgtagtcgtaggtacagaacttttgttatggtagcctttcttcgtcaggtgatacaattgggattttctttctcacatgcacctcagtaaaattttcagcaacagagattggctcaggatggaatttgttcagtttcagttctgcagcctgtccttttctggggagactcattaattgaatgttgcctttcgatctcactgagtcacttgaaatcgctcagattgacccctattccgggatccagcctggtccagtgcagacctgcattgactctgactacatgctgagttggcctctgaaccagttcctgtaccattcccttagtctgatggacttgccagctccaaatactcagaacgtgcctcttgtggtcctaggatcaagtccagggtccttagaatcaagtaatgaaacaggtccttagtaatcctgtgctgtagggatccactgttagttcctggtactccccagcatctgtgcattagcttgatggaaaggaagctgtgttatgcctgtcttcaagtttttgcttctgctgtttccatagctgagaatgtttttcctcttcactactctgctacttctccttccatcctcaatactgaatagcagaaagtgccgcttaagaacacaggaaggtcaccatagctttagtttctccttagctgccaattagttctttggtcctaaagttattaacttttctgagtcttgatagaaatgcggagacttaaaaatatttgggggagacatttctccttttctcactaaacaacagaatgaaaaccttttctaacaggtttagaaaaccaaagtcagaaaaattgtgaggaaatagaataggttttttaaattgaaataatttccaagttccaggtggatctgtaaaatagggacaagatcataactttcaaaaggcagcacgctaagtcaggtgattcctttcccccatatgccttttctgtggtttgaataggtcagagatgccatctttacatttccaagtcaaattcctcttccttcttgaaggtttttgggatttccctaacttgtatagatctactttcccattactccttttgagttcataacccacggttttgctggttgacagtgatttgtcttgttccttgcttgtaattttattaggaccatggagccaaagtggctggtttgaatctcagctcttcagtagctaagctctcaggcaaataatttaatcttcttgtgcctcagtttcctcatctgtgaaattataattttaatagaatctactttaaacattcatagaaatcaaattcgtacacatgtcaagtgcctagaatagaacctggcacctggtattaagcccttggacttcaactgctactgttcttagggttgtgacatcctcgaacagagatgttctttggatagaaatataaggcttacttgatgtttgattgtccttgccatttaaatatgttatagaacctggcacataggtgctcaataaatgtataataaaactttattttgctaaggtgtttattaacaagatggcatgttgcttattaaacagttgtgattttttttttcagtaaacgatggtcatccccctgcagtttgccttccatttcagagatctgtttattacactttctcccttaatattgtcatttgtcaatttctgctcacacctgagaggtgtccagtgtgcactttgcccatctcgcctatgcataggctccatctagtggccagaagggaaattcagcatattaggtgactgaattaatagtgccccaaggaggaagatagcgatcccaacccactctctggcttgcttcctggggactgattgcaagaaaatgtggatactacagacttctgtagaaatcactgggctacagttttggattaaggttactctactgtgtcagtgcgagctgtcctgagagaattagggtcttcctaagtgatgcagacaggcgcactgcaactccatggcagagctgttaacacctagtgtgtcttttacagttagagttttaagataattttacaggactttaataaatttaaagctccaaaatatttgagattagagattaaaaaaacactactgatttcatttggaaaaatacagcaagatttaccttccattgctctatttaaacaggtagtaacactttcattctcttctctctcccctttggctattctatgtggttaagatgctcgccagccagaaatactcacagagaataagaataaatacatccagtgttgtgttaggtcccacaccgtctatatttcgctagctaattttatgtattttgtttcatgttttattgatattttcagaatctttcttgctgagattacacaaaatatatagctggttattcagttttacgtgtcaaaagccttaaacctgtttccccatgattgccttttattatttttaattcggaaatctttgtttggctgtctgagagagaacttcagcctcccttcctcccagacattttgaacagttcaggctgtactcattcgtgtctctttgtcttggcaggtggaagcccctctgcttggaatagcaaacaatactaccagcttgccctctggcaagctcctttaagagttagctgtaatttcaccctctctctggccttgattctgcatgcagaatgattgcactgacttgagctcctgtggtctcttgctatacctcctatttgggcatctcccccatattgctttcccccaccattggggaggggaatggtaccttggttatctttgaattcccaggaggtggcccagtgcctggtgcataggaggagctgaagaaacggaagacttcttaaagggatactcgccattcactttgaagcacttctttgtacaacaaatttattttcatctgatcattgcacctctgctagccaaaacattttatcacaccagttactgctgcatggaacttgaaagcaataaaattatctttaaaatcattgtttgattaggctttttgcacattgaggtgaataaaaaaaattagaactcctggaagggtaatttgtgagtctggccttgtgtcaagatcacctcatccctgtggatggagactttgttccataagttccctatagataagatgtaatgaataattcattggcaccgatttatgtctgtagtgtgcttttaaaccctcctggagctgggttcctgaggaggaagcatctgcaggctggactcggctgcctggtggtctccggagtggcctggtgcagagggccagggtggcatctcagaaagttgggtgggtagggtacttgcacacctgctgaccttgagttacagggtggacctaggtcatttcacaggcccttccagccttcagatctcaagatactaggcagagagagagatggagatttgagggagatgtggttggaacaagcagaatcaccacgtatggaagttggcttctattttttgcattgttttcttggtgaggccagtaagcttttgcctcactcctgggagggacagtagcaaggtcttacaggtctctctatcattgaagcaccctctccaaccctgccggttttggttgctggtgaaggcctttgacagtgtcctggtagggcgacggtgaggccagctcccgacctctggacagaagaaagcttacttgtctaggttggtgtcaaggggactcctgaacttaatgaacaccttagaaattatccttaaagtctcctcttccgaggagtggggtggnnnnnnnnnnnnnnnnnnnnnnnnnnnnnnnnnnnnnnnnnnnnnnnnnnnnnnnnnnnnnnnnnnnnnnnnnnnnnnnnnnnnnnnnnnnnnnnnnnnnnnnnnnnnnnnnnnnnnnnnnnnnnnnnnnnnnnnnnnnnnnnnnnnnnnnnnnnnnnnnnnnnnnnnnnnnnnnnnnnnnnnnnnnnnnnnnnnnnnnnnnnnnnnnnnnnnnnnnnnnnnnnnnnnnnnnnnnnnnnnnnnnnnnnnnnnttcctcccaggttcaaacaattcttgtggatcagcttcccaagaagctgggattacaggcgtgtgccaccacgcctggctaattttttttttttctagtagagacggggtttaggcatgttggtcaggctggtctcaaactcctggcctcaagcaatccaccgacctcggcctcccatagtgctgggattacagatgtgagccactgtggctggccaaggagggtctttttttgcacatctacagtgaaaggtttgaacccggacgtctgagtctcaggtcagttgttgaaaccactaagtaaccaccttgcttctctgtgcctgaagagaatgggtttttaggttaaccaggctgactggttcaaggtcatgtccctatctgtggaaggggagtgggagtggaaggtgagtggtgacagagtatggaaccctgtttctgatatctagattatttgagggcctccagtggtctctgctccatggaaagcatatgaaagaatatgattttttttttttactcgagcttgttgtctagttgggaaaactcaactactggtggagagtaacagatgctatgagtttagtgctaagttatgggatgctgaccggagagaagtatgtgggctgcaggcagtggggtcacggaactgcagaatggcttgagaagctttaaggaggatgtctgactttagtgtgccctaaatatttgactctcaagatccaaggaggcagctccccaggagaggaagggaccatgtgtggtgtgggtggcagtgtgcactgatggagtggagagggtgtcagaatccggtgtttgtgtggtgggaaggaattgactgctggctagagaatgaggagcgctgaaacctttgcaccattgcagtggacccgctgagaagggtgttctggggaggctgctctggtctctcgatggagtcaggattgggggacagatagacaccccggtgtgagccagtgatggtatagatgagggaggcagtgaggacaggctcagggagggaagtcttgtctctagacctgagaccaggaagcaggaatggactggacaggttggcccagctgagggaggtgactggtgagatgggtcctcggtgtgaggggctgggttgccagaggagctgtgggctggggtggtttgtcgagagagcagtcccagttgatggagaggcaggacccgcaaaacaggttggctgcaggactgggggcggtagcacagggcagctcccgaggagacacctggcacttttaaggcatggaatggagagagctaggggagagcacacctgcagtgaggcaattcacatagcaaagttctccggaaactgcagtgttcaacttttttaaagaatagctggatgttagaaaagtggaggaactgtcacctttattaggggcatcatggatacctggtagcatcaagggctagggttaaaacccgtggagtaatacgccctcctattgtgttcctctcctctaaaaatgaaggtgaaactgtttcaggtgagcgctgttgttgttcgtttgctggggcactgctttctgatttttagaggagtccaggctggagactgacccctgcctttttctgagttgggccggctgggcccgaggctggttctgggctgggccaggctgatgcagtggccttgggcttcccgaggctgggagagggcggtggcccccgctaccctgaagagctggccaacgcggcagggctctttccagtccttaccatgcaagtgaagaggaacagtttgtttaaagaggggtgccagcttcacatccaggcctggactttgctactggtgcttttgaacttgtgttgatttatgtttgtaaattgactggacacattgtggttcttgatgagaagcaattgcccatccttagcccacgattagtgccactctctgggtgctgcctgttctgccactgtaactgttttcacttgacaaataacattaaaaaacacagttctgcaagagacttcctgggagggtggtatcatttggcctgtgggcttttgtaacactttcctgctattaggagagtgaattctgaattttcaatcacgttcacctgttggagcaagtagagtttcagacggtctccgcttttctcgactagaaagcaggccttctcccttttccccccagtcttgtttcatgacaccattcccctctgagatgagggttggagaattagaagtctactgatgcattgtaccggggcacgttattgaccctctctgctctcctttcctcatctgtaaaatggaagataatgccacccatcaggccgagtgcggtggctcatgcctgtaatcccagcactttgggaggccgaggtgagcggatcacctgaaatcaggagttcgagaccagcctggctaacatggtgaaaccctgtctctactaaaaatataaaaattagccaggcacagtggcatgcacctgtaatcccagctactcaggaggctgaggcaggagaatcacttgaacctgggaggtggaggttggaggttggaggttggaggttggaggttgcagtgagccaagatcgcgccactgcactccagcctgggcgagagtgagactccatgtcaaaaaaaaaaaaaaaaagtgtcacccatcttggaggatcgttaccaatacttcatgagtgaatacatacacatttcttagaacctagggtttataaacactaggagttagctgatactgttgttgctaaggatagaggaaatacgcattagaagttatttacttcctttaaaaaaaaaaataccctttgggtgtgtattgattctgatgttttgctcctagctacatttgccgtttttttttgactgcagaattaggaaccagcttcatttttttttttttttttggatggaatctcgctctgtcgtccaggctggagtgtggtggcgcaatcttggctcactgcaagctccacctcccgggttcacgccattctcctgcctcagcctccccagcagctgggactacaggcgtccgctgccacactaatttttgtatttttagtagagatggggtttcaccgtgttagccaggatggtcttgatctcctgaccttgtgatccgcccacctcggcctcccaaagtgctgggattaaaggcgtgagccaccgcgcccggcaggaacccagcttcatttcttgtaaagagagtttgacaagcgctccactggggatagcagcacagcttcctccttttctgtccctgtctccctcctgactctgcatctgcctccgtttgaagcatcctcctccagtaagtgggtcatttggattccaaggcccttttgaggccatggtgatggatcatttgcgttatcaatgtgaactgtggatgtcccttcgcccttcagtctcttccttcttcaaggagggggaggtaattgggggtcatgtggcctggggaagagcctggtcacgagcatgagggatgtgagtgggactatgtttccagccaaaatttagggcacaggatctgaaaaacacttagattaagtatctgcaacacaaattagggtattttaaattgaatgtggagaaccctgagaacctgtgccctttgtgcgtggatggctgcttgcaaggatgagcatccccagctggagcggcccatggctgccagaacaggagaaggcttcagtcaggtgggaagccagctgcagtgtgttgcctgatgcaggatggtgcgagaaggagctgctctcttgctctgctccctggatcgcacaaggtcttcctgagaccagaattcaaggttagtcctgtttaggcaacttggtagatggacttgaatggtctttgctaagcgaatattgcctatggtggtatttgcaaggaaaacaaaagtgttttgagcccagactaaccaatttaacaatgctagtaggtaaggatactactgtttgctttctgtgatgagaggtctcttaggaggaggggttaattcttttgatttaaaacttactacttgaggcaaataggcacatgaaaagatgttgaaagtcactagtcattggtgaaatgtaagtcagacccacaattggtacttcatactcattagtatggctattaccaaaaacaccagatgatagcaagcataggccaggatgtggagatgttggaacccttgtgccttactggtgagactgttaaaatggcacagccttttttttttttaacaggaagatgatatggtgcttcctcaataaattcatcatagaattgccatatgatccagcaattccactttggggtatatgcccaaaaagaagtgaaagcaggggctcgaacagatatttgtacacccatgttcatggcagcaaataattcaaaatagccaaaaagtgaaagcaactcaagggtccatccatagacgggtggataaacaaaatgtggtctatccatacaatggaatatcattgagccttaaaaaggaaggaaattctatgatgtgctacaatgtctgtgaaccttgaagacactctgcgaagtgaaagaagccagtcatgaaaggacaaacagtgcataattgttacccttacgtgagctatgtagagtagtcacattcatagagacggaaagtagaatggtgaggggcggtgaatagaggctggggggagggagcaatgaggaattggtgtttaatgggtacagagtttcagtttgggaacatgtaaaagttctagaggtggatggttacggtggttgagcaacattgtgaatcagtgtcagtgaactatacacttaacaagggttaaaatgttaaattctttgttgtgtatattttaccacaattttaaaaagcttatttctcaattgtttatgcgagtatatgtgtggaatagttggggagacaaattcaaggagaccagtccttgtccatggcggtcctaggtaccacgggatcactgcgggggaactgtgaggtcaggagaggccttgaaaaaaaacgcaggtttgagctgagtcagatggaatgggtctgttttctatatcaagagacagtattgcagataatttttttctttcaaggaaagcaagtcaggagtcaaactctcatgccaccgtagtcacaaatgaaatttattgctaatcagccatgtgacgtgtaattgctttttcattttcttatttttccagaagagagatttgtttagatgtttgattccctcactgattatgattatactggaagtttttcatttgttttgacagctcaattttttttttattgtaaatggactccctcattacagaggggggagcccttgaaagaaagggattgacctctgcaggcaagaatctgagcatcctaaaagtagaaaagggctagaggcttcgccttacaggccaggaagcttggagggacgcgctgctagagaccatggcacgcatgctgtgtgtcgaaggccaggtccgcctgtctgcctctccagcagatactctctggggctatttttttctgcttggttgtcatcttttggtttaaccaggcgccagggctcaggcctggacctgctggattccaaagaagacttcgaggtggccgagcttgtctggcttccagaggagctttctctgtcccgcccgggggagtggctcaccttggtctgagaccaatgggaggaagcctgctgcgggcaactggtctgtgcctggaagttggacttgcattttctctggacctccaaagcaaacccgaatgaccactctcatcctccccttttgcttgtttgtgtatgtgcttgttttgcctggtcgtcaggcaggaggtggtgtcagatgatgagaggtgttgctcgtccctgggttggttctcttacggggctgtatggatgtcttagctcagactgctgtgacaggttactatagactgagggctaaaaccacagacttatgtttctcacagttctggaggctggaagtctgagatcaaggtgccgaccaaatttggtttctgttaagggtccatttcttggcttgcagatgacaaatgtcatgtgtcctcacagggtggagagagcaaggggctctggtctcttcctctttatgtaagggcattgttgccattatgggggctctaccctcaggacctcatctaaacctgattacctccctaaggccccaccttcagataccactgaaggtatctgggggttggggcttcagtatatgaattggaggggacacagtcatgcagttcagaacagtggagcagtgtgccatagtgaagggatctccagaccaggattctctatggaagttcttggccaggtctgagagttggttacagatcattaaaatttacatggaatccagtacttgaaagtacatgtcttcaggatggcgctgagcacattcgcctctgtaaccaaatgcctgaaatgtgtagtgcaccttctgagcaccccagtgctttccttaaagtgaatgcagtttgagaggaactcaattattgagaaattttatatgaccccatttctctcattttaggacagataagttgcttattttaaactctgcaggagctacatagaggaagttatactccaggagagcttaaatttcactctctgaaaactctgttccatgtaagtacattcctcctctctcccctcctcagtgagcacgtacccatcagatgtgtggaattctattaaaagcagctcctcgtgaccctccagggttttgtaaagctgacaccagcatcagtgagttggaaggggctgccacagaagacagacttactgctgcagcccgcttcagagccctcagtagtactttttcctctcccagcaaatccaggaggctgggaaggtgattgttaattgtttatgagcattaactgtttaccagtcatacttactattttaaatctgaccctgccattatgttgttttgtttctgttcacagctgagctttaagctgggtagaatttcgtgatgagtcactcctatgactgtaaaatcagtatcgatcaagccttcctgttcatcctgtgagcagtttagagacagatgagacaggcttatggtttccactggctcggctccgtgcgtgtgcggattgggcttcctgagagcctggttagccccttttatctgctctctgaaacctgcgcaagggtttttagcatgcaccttgaaacctctgctgcctgaagacagtgtgcttaaatgaagggtatacaaacccatgtgaggttttctcttcccttttccatgaactccaccccaattacctgtttgaattttgcatgccagttattttcagggaactagtgacccttttcttgccaccctgggctttgaattgaaggccagtgtgccaccttttctttggctttgttagaacgttgccctcagggtcatatgtgctggctgctatgaattcttactgcttgatggacagagaaaggtgagggttagatatctggacagggcatgacagggcgggtcatcgagtaggaacattgggaccttttgcttccaggcttgagcagtgggtgagaaacactgtcttcccattagggcagtgggtgaaacactgacttccctccatcctctgggcagccttgtcaggtgggtgtggaagctgaggtgtgtctgccccaggctgtgcagtcagccccgtgttctagcttcccgtgccgaacctggccctggaggctgtctgcctggcaagggggctgcacaaagctcggaggggcatttctggtgcttggtagatggtaggcctgcccccagtgcactgataagagcatgggctgagagtgccacttggattcggctacagtgggcggcagagtgggggtgactggtgttgcttttactctagagcagaggaggcagatgaggtagatcggggccccagggatgctgagctgagctgggtagagagaatttggttttgtaggatttggagacagagacaaatttggagtgtttggatgttcggggacctgcaggaggtatgtgaggtgtgtaaaatgcagcccctgttttataaagagcttacattgtctcttgagaagataaggtgtgcccagctgtggaatggaaccagatgcttttatgagtgaggatggagtgagcacactgggaaagagccctggaattggaggaagagatcattttgcccagagggatcttggaggtctcctggaggagggtacttagatgatcagaaggattatactagacttgatggggtggtcttggcatcagaactttaaaaatgtattttggggctggaagcaaggctggagaggaaggtttgtttaagttgtagtgggggatgaggctgggggcaaatcagggatggttttccaggtctgtaaaggctggggtaagaggaatggttggttcttaagagcaaaaaaaatcccttacatattggttctcttatttgtgctaagttaaatacatgggaggctactggtgtttatgaaataaccctgagcctttttggggaggtagtagtggatgtctgatggaagagatagaagactggtcccaggggttcttagtggcaccttcctctcaggtcatcactgtgcttttgcacattgcagttatatttgactacatttgattatggcagatttacttagaagggcactggaaaaaagcctcccaaattacaactgacacaggaaatgactttattttcttctattttttttctttgcttttctcccccaatcaacatacatttttaaacctgtcatctcacatgacctgccggtagaattgatatgtttaatttctgtagaaaataactggaaatatttcacaagctccagtagcttcctgttgtagggacccttaggactttggaatgagaagttttctattgagttgtcatatttggaaggataaaggtgccctcttttccctcgatccacatagtagactcctgtgtgcgggcatttgtttggtgtctcacgttgatgcaaatgcagccattgcagagtgagccccgctctgttactggatctccatttgctcaaaagagagcagtgtccccctccaaatctgcatgtctgaaagcattcatgcaggttcattgcatgggtctttgcattttacttagacttagcaaaaatcaggtatagtctttcctgaaaacaaaagtgaccattgtttttaatcaactgcagggtgtttggagttgtgaaatatttagggtcccgagtccattccagattcaacattgggaaagaatgagaaagctgaagcctggggcaggctctgtctgcagaaaccatgggctatcaccccctctccttagcagcattgtaaacaaacgtcatttgtaaggagcatgtcccaactgagcttgtaattataggggcaagatttgtgtggtggtaggggcatggagctggagactgggggcttccttattggttcatttatcctggcccttctcttttctctcaagtctcagctcttttaagattcagaaaataatgcaaaatgcctaagatttctgaaattcctggcttcagagacttgactacataaaagagccaggattttcaggctggccatttcaggatcagccatttcccacttcctgattcatagcttccaggatttgtaatgcctgtagacttttttctctcttgcttaaaagtggccattgaaagaaaaaataaatagcaaaatccccatcccagaagttctacttcctgttgttgtactattgagctctgaaaaacagctttgtaagtttaagctcttgtttggactatttcagtggaattcttgagatctttttgtttggacaggcaagtatgaaggcgataagtcgaaagaactacagcttactcagcacagaaatgcagaggctcaaatttaagttcttccttagctttatggtgtgtatattaatataatccaagcaatagtgagttgcttagccagggtgcacagacattttccacaatgccagttgtttccctcataatgtttaatgtttatttttaaaggacatatttgggcacacgtttcatttttgcctgtaaaagaattgggaatatttatgattcttgcaacaaaggagaaggatccaaagtaaccaagaaaatgatggactggcagccttcacattttcccacaactcttttcatgaaataaaatgtagataaggctgggtgccatggctcacgcctgtaatcccagcactttgggaggccgaggcgggcggatcacctgtggtcgggagtttgagaccagcctggcgagcacggcaaaaccccgtctctacgaaaaatacaatacaaaaattagccgcgtgtggtggtgtgcgcctgtagtcccagctactcgggaggctgaggtgggagaatcacttgaacctgggaggcagaggttgcagcgagacaagatggcgccattgcactccagcctgagtgacagagcaagactccatctcaaaaaaaaaaaaaaaaaaaaagtgtaggttagcaaaagtgcctacagttcaaatgcttccatgctaaacgttgtatttcttccggtctcatttgtgatgagagtcataagattttgagaaatacaaaaacctttccagctttataggatgataatggcttggccactcaagtagttctgattgggttaactaattttggtccagtaatcatttcatttggggtgaatggatttttcccccctaaatacgggtacctggaaagttgaagcagtgaatctggtgaaacttaatcagtgatttcgtaagggttaacaaatgtttctgggtgggattcctaatgtccagcttcctctgtgtagctcagtaagtcttctttggagacactagcctgcattgtaagactgtcacatgggagcatctttttattttattttacttttttttaaaaaaatgaggtctttattatcctggctggagtgcagtggtgtgatcatggctcactgtagccttgaactcctgggctcaagtgatcctcttgcctcaacctcccaagtagttgggctgatagacatgagctactgtgccacgtagcattcttggggattattgtagggtccttttggaccacacatggttttatactctgtagctgattgatgtactggcatgtcagtgacattgtgtgtatcattacactatttggttaattgatgtactggtggaatagccatcttctggaggctcttgtttgcatacttctcttagtggcggactagcggttgtacagtaaatagatgatcattctcgctctgttttacctttcctcagctgctcttctagtaggaaaataacagccctcttagctgtagtcttctggaggctctctcaataatagaagtggaaagaaaagactcaaatccctgggcagtgactttttagttgtttcatttgcttttaaggcagaaacacctttaactcttagtagccttacagatcatttttgaaaacacctgtgcttgccttgaatggggcggtgaccactggatccccccatgctgggtacatgttttgcagtcacagacactgctggcctcacctttggtggtgaaggaatgtttccaatttctgctgatggtgtagtgctcttgggagctgggtgctctgaatgagcagatgggcatctgcttttttaagcctgctgttcattctgcaaaatagttattgtgcaaatacctgataagcaccaggtctgtgccaggcgctgtattttgtattttgcatgtctgaggccagcatctttttccctgttcctttttctcctcatccagtgaactttccactgtggttgtagtttgtctgaaaaagatttggaaaaaatgtacagccatgtttctcttgtctagagaagctgtcttaaggacttcgacaagtttcattggcagagtgaatgagtggtggcctctgaatagttgaaatgttaatgctatctataggttctagagaatctgtgtctttaaaagtcatagcgataaagtctcagctttttgagagagtgggtttcagacatactactatacaggaaatctgattgttgcattgaaacaggatttgttatcacatcacggttagacatacccaaaaggcaaaaactacagtggtcatgattgctttacataagattttggaggagaaactgttagctccatgaaagcaggaactgtgttcactcttgaatgcctgctacctgcacatggtgaatgttctataaatgtatattaaagaaatggaggtccttagagttccaagatcaccgtcaatatcatcaccctaggcttcctcgtccttccagttacttcttttccagaagagtccattgcctcctttatatgaggtctacagagcgcgttcagagggctcttatcattgattcagcaatcacgtgtacacatagcactagaatgacttcacatatttgacctgtttaaaaataacgtgcagctatgacgaacagcgaacctttgattagggacacatttgcctgccgccagacactacaagtattatgtgtattgcttttttcaaattataatagtaatagatgattatgagaagaaaattagaaaataagttttctgtctctctataaaaggaaaataaaaattatccttaatctcaaggtaaccattgttaatattttgttgtgttttcctgagattttccccctagacttatatgtgtatctatatatttaaaaaaatgaaattagtagtatactatgtacacacatattgtgaatttctgcccataacattatatctttatcacctggaatgaggtctttaatgaaattattaaaattaaaattattctataaatgctaaatttaggtattttacaatttttttttttttttttttttttttgagacaaagtcttgctctgttgcccaggctggagtggactgcagtggtgcaatctcagctcacttcaacctctgcctcccaggttaaagcaattattctgcctcagcctcccgagtatttgggactacaagtgcatgccaccatgcctggcaaatttttgtatttttagtagaaacggggtttcaccatgttggccaggctggtctcaaactcctgacctcaaatgatctgcccaccttggtctcccagagtgctgggattacaggtgtgagccactgtgcctggcccattttataattttgatcattaaaaaatgatgtgataaaattattgtgtattgttgttgatacactactctgattaattctttgggctagattcctaaaagtggaaagtaaggaataagaattgtgtaagtgtgcatgatcctagataaatattgccaaaatattttgcagaaaattcttagtttcagcttccagaagcagtgtctgtcatccatactccaccagaattgaacactaaattgagctttgcaattttagcatttaaaaagttgtatcatttaatatagaatagcagtctcttcattatgatcttcccttgcctagtaagtttatactcaagtcaaaatcggttaatcatgcatattgattccttgtttatctttttcttttaattctttaatacttctagaatgtatttgtagttaagtgaagtaagatacctcctcctgttgacgatttagtttccccacattgtgctgttttttttcttcactggattatgtaacaatatcttttcttttttttctttctttctttttttttttttttttttgagagagtctcgctctgttgctcaggctggagtgcagaggtgtgatctctgttcaaagcagcctccccctccccagtccaagtgattctactgcctcagcctcttaagtagctgggattacaggcgtgcgccaccacgcctggctatttttttattgtatttttagtagagatggggtttccacatgttggcctggctggtgttgaactcccggcctcaggtgatccgcccacctcaccttcccaaagtgttgggattacagacgtgagccactgcgcccagcctagagactctattttattagtgttttttgtagacaaagtctcactctgttgcccaagctggagtgcagtggcgccatctcggctccctgcaacctccacctcccgggttcaagcaattctgcctcaacctctcgagtagctgggactacaggcatgtgccaccatgcccggctaatttttgtatttttagtagaaatggggtttcactatgttggccaggctggtcttgaaatcctgactttgcgatccgcctgcctcgacctcccaaagtgctaggattacaggcgtgagccaccgctcctggccgagactctattttaaagctgtcttctcccactgatttgccttttgtttgtggtaaaatcattttgtcttaaacactgtagcttcattatacatgttaacatctgctaggaagaatctccactcaggttaaaaaaaaaaaaatttgaagcaccattatttcaggtgaactttgtgtgtgtgtatgttgttttgtttttgcaattcttctccgctactcttccaaaaaagaaaacacaaatttattaggttttgattgttaataaatcagtttgggagaaaacatttccagatatttgaattactcattcaaggacatttcgtgtttctccatttactcaactattatctatctatgaagaaatcacagaaggtcatagaggttgtatacttttccttttgggttatttctggttaatgaatgctttttgttgctaatgtagaaggaatctttattccccattgtttattttatatttttaaattttttttcaattaaaaaaaatttttttttcattcctgagacagggtctcgctccgttacccaggctggagtgcagtggtgcggtcatgactcactgcagccttcagctcctaggctcaagtaatcctccacctcagcctcctgagtagctgggactactggtatgcgccaccatgcctggctaagttttttctttttcttttagaggcaggatcttgctgtgttgcccaggctggtctcaaactcatgacctcaagtgatcctcccaccttcacctcccaaagtgctggcattgcaggcgtgagccaccatgcctgaccttccttgtttcttttaggtgattattggttgtgtgtgaggaaagctctggtattttctgtacttatcttgtacctacccaatttgttgattgctcttattcgttataatagtctttcagttgactcttcctaatttttttgtgccgagaatcattgatgacaaataaggataatttggtctccatttttctggtacataatacgtctttacttaccatcagttgtgtgtcacttaggaatataaatggctgaaaataactgaaagcctgcctaataagggagtaggccgacaggggctgacttttctcaagttcaggcagtctggagggaaggagtctgtggctgctgtgaggtgctcaaagagggtgtgaggactgggctcctggcttctgtttgttcatccttagcctgtggcttttgtcctcgtgaacacaagatgacctccaggaattatgtctgtttcaggcaggaagaagttgagaaggaatgaagacaaaaggcaaaaaaggcagaatgacaggtcagcaagcgctgctcagccagtaggccctgcttctccttggccagaactgagttgcatgcagctggctagaaggtgggagatgaatgtgggtatggctagtgggttgggcatgggggttgggccaaccaagcatggttggtcatagggtcttgctgcattagcctgcacatccagaattgttacatgttgattacaggcatatttgtccttttttgtctatattaatgataatgcctctgtttctcaatgtgtaaggcatcttttggtttaagaggttttcatcatgttgaagaattgcctgtcttgttttcttgggtgatttattaaggatgggtgttgaatgtcatcagatgtcattttggcattcatttggattcagaagtggttgttacacctattaattgaggtaggaatagattacctagtagtaatccctcctcaaattcccgtgttaaactatttttggttgcggtgggtggctgtttaaattcctaattaaatttggtttgctaacatattcagattttttaatctcttattttaaatgagatagctttacagttctctttagatgagttcttttccagattttgctgtcaggcctagactagttttgtaaaatgaattaatgacttttcctttttaccttctctgtaacagtttttatagtgtggcaataaactgtcctttgaaggtttggaacaactcacttgttaaatgcctggaggctgacacttaaaaaaaaaaaaaagaatagtttttgttgtgtttctttttgttgttggtgttgtttttagtcttcagtgcagtggcataatcttggcccacttcagccttgacctcccaggctcaagcagtcctcccacctcagcctccctggtagccgggaccacaggtgttttgccgccacacccggctaattttttattttttttgtagtttttgtagagatggggttttgccacgttgcgcaggctggtctagcattactgggctcaagtggtccacctgccttcgcctcccaaggtggtgggattaacaggtgtgagccaccatgcctggcgtaaaaagatggttagtttttgttttgtgacagctttaaaaaaggtcttccatgggtgttggtctgttccagggttctggttctttcctctgatgctcttttttttttttttttgaaacaggatctcgctcttgtcccagatggtgtacagtggtgtggtcatggctcactgtagccccagcccactgggctccagcaagcctcccacctcagcctctggagtagctgggacccatacctggctaatttttaaatgttttttagagacagagtctcgctatgttcccatgctggttttgaactcctgggatcaagcgaccctcctcccttggcctcccaaagtgttgggattacaggcatgagccaccatgctggccttctggttctttttaaatcaattttagtaatttagtaatttccagcaagtcaattaaaaattatagctcagttgtatgtagtattttctgtgtggtgttatgccctctgtatctgttttctcagatgttttagttgcttttctctcttaatcttgattagacctgccagagctgtgcttattttgtgtccccatccaaatccagaattaattgccgtgctccacatgttttggtcaatggtggacctcatctgtaacagtagtcccatgagattataatggggctgaaaacagtgctgtcccctagggatatcgtgtctgttgtagtgcaaggcactgctcacgtgtttgtgttgatgctggtgtaagcccactgtgcttccagtcagatgaaagtgcagcgcatacaattgtgtgcggtacctaatacttgataataaacaaccatgttactggtgtatgtatttactatgctgtacttttaattgttagagtgtactccttatacttattaaacacaaaattaattgtaaaatagcctcaggcaggtccttcaggaggtatccagaagaaggcattgtgatcataggagctgatggctccgcctgggttactgcccctgtagacttccagtgggacaggatatggaggtggaagacagtgacatggatgatccggaccctttgtaggtctaggctaacgtgtgtgtttgtgtcttagcttttaacaaaaaagtttaaaaagttaaaaaaaaaagttaaaaatagaaaaaagcttatagaataagaatataaagaaaatatatacaagaaccaaaatttaagaaaaataaagtttgtaaaagtaaaaaaagttgtgcttaagctaagtttaatttattattgaagaaagaaatttttaaataaatttagtgaggcctaggtatacagtatttataaagtctacagtagtgtacagtaatgtcctcagccttcacattcactcaccactcactgactcacccgagggagcaacttccagtcctgcaagctttattcgtggtggtactcccatatacgtatgtatacttttttttttttttgagacagagtctcgctctgtcgcccaggctggagtgcagtggtgcagtctcggctcactgcaacctccacctcccaagttcacgccattctcctgcctcagcctcccgagtagctgggactacaggcgcctgccaccacgcctggctaattttttgtatttttagtggagacagcgttgcaccgtgttagccaggatggtctcaatctcctgacctcgtgatccacccacctcggcctcccaaagtgctgggattacaggcgtgagccaccgcgcctggccttttgtttcgtttttaagagacagggtctagctctgtcacccaagctggagtgcagtggcgtgattatagctcattgcagccttgaactcctgggctcaactgattctgttgtgtcaccctccccaagtagctagaactacaggctcatgccaccacacttggctaatttttgttttttaattttttgtagaaatggaatctcactatgttgcctaggctggtcttgaactcttggtgtcaagcaagtgcttggcctctgaagtgctgagattataggtgtgagcctggccatatgtactttttttttttttttttatccttcttactatatttttattgtaccttttctatgtttaggtatgtttaaatacacacatacttaccatggtgttacaactgcctgcagtattcagtgcagtaatgcactacaggtttgcaggttggtagcctaggagtaataggctatactgtatagcctaggtgtgtagtaggctataccattgaggtgtaagtatactctgatcacacaatgatgaaatcacctaactgtgcatttcttagaatgcatccctgtcattaagtgatacgtaactctgcttctttaagcctctgtagcactttggttatgttaggattctgtgtctttacaagtctgctttgctgatcgattgtgacatcttgagggcggctgcactactttctgcctgcaccttgtttcgcatgtctacctggcgcatgacatacacctcgttgttcagttcttgcttctctgcttgtgtctttgcattcaccaccagctattctgatagttatcaggaggttttcattgattgcagtctcgtgcaatgggtgcaggtaatgggtagccttatggaggagaaaatgcttacctatttgggttcattccaaggagtagttcaaggataaacctctaagtttggggagtgctgtaatttgctggatatgtgagccatagaagacagcttggatggcatctgatgcttcctggctgcagggatggaggcagcagaccctcctgcctggggtggttggttgccatccctgtcgggggctcatgctccaccctcaaggctattcttgggggagttgtgacatggctttcataaaaactcagtggaattttaccctgtgtattagttagtaaaggtgagtctggttcagttggtttgagtcaaaaaatctgttaatatctctgctttagacctgcatcaggctaatacttgaatttagggtctgtccctggtgtcatctgaatttttgtttgctatgtgtgaccaaggagatggtcactcttcaggatgggtgggtggaggggagaaatgctatgatttctgttgggtcatgtgaaatcaatttggaatgtggatggggcccttacactttttcttttgagcttagtgattttctgtgtagggtggagagcgattaggaaggaattcaccacccttaggtcctcaggcatagggtcttctaggggcaggactgatgagtgaacagcagggtggatggagcagaaccgttggaaccttcagggcaggacctgccaccattatttggtcacaggaagtgttcagtggtgaacttgttggaaatgattttgagtaacttccgtctcctaaatcatattaggactctttggtctcctatggttatctgagttgttttccaggaggagctgggaaggtaccaggagaaagatgactgtccctctcatgtttgctgagggtgttcctgtaaggtgagctagtgttccttttagggcccgtggagaccgaccttcacattgaagaagcatatctgtgctccgagatgttttcatggggagaagtgtcaggtgtaattataaaaggagtctttctctttaaatactgtaggcgatttagaaatagtggaggtttaattgaagagcttgtctacgtttttacattttccttaggcacagagaaactagtatctttctctgggttgcctttttttttggagacagaatcttactctgtcatccaggctggagtgcagtggcctgatctcggctcactgcagcctctgccttccgagttccagcaattctcctgcctcagccttccaggtagctgggattacaggcacgtgccaccatgcctggctaatttttatatttttagtagagatggggtttcaccatgttggccaggctggtctggaactcctgattaggtgatccacccgcctctgcctcccaaagtgctaggattacaggcatgagccaccacacctggcctgggttgctttttaaattcatacctactgtcttatttgggtctcaaatgtgatcagtggttatacttttcttgctatgcatttaagttggagcaggctccggggcaccacttccctccctagagttgatgaacccctcatatcagtgacctccccatgtcacagtgtatctcgtgtgcactgctagatattctgatcacacagtgctgagattactggtttctctccctttctctttctgtggttatagggattctttaagggcaggcaacatgttctttgtttccataggatctgacaaagtgcatggcataggtaggtgttcatcaaaaggggtggaatagggttgatctcaagggttttaagagagatctgacgagtttgggtgtgtgacttaaaaagcagatacagcgccttttcacggatacacctccgtgattcctcaagtggtctggctgtgtttattttaggattctaaaagtaaagtgttctgttctgagtctttcacgatctgatgttctccagttctgtgaggtctcctcctttagtcccatcattggggctgtttctgctcggaaggccaggaagttgctggaagtctgctgggctttgcaaagggacttttgcttgtgtgggcattgcccagttgtgttacaacttgtttacagccgttggtttttaagggatgaggtaatcttagctcagcttagtgtaatacacaacagttttgtttattgagaaaatcattgttgaagtttttcagatgttagagatgttatgaattgcaatcaagtcggtatcctcttatataagtgcatctgacaagcccatttcacaactacatctcatcagtcacagttggatggcaaggtttattgtttaaagtttttgttttttcttttttaagttgggaaaggaagacagatggtttcagaagccaagaaagggcacaaaggcgtggatatttggaaatcgggacataattcaccattcttcttaattttttctgatctctaagacactgagacagctgttaattgaattgcttgttcacagtatttgagacgtaatgaaatgtgagtgtcctaatcacctggcgggcgtagatctttgggatcctcctggaggcttagtagggctgccctgagcagtattgtcttctccagctgggcctctgagctgtaccatgtgcccgtgctcagcctcagtccctccctcagccagttgttaaatcactttggacgtgtgacagcctcaacatgtcacagctttaaaagttcagattttaaaaaggtaaggaaatgatctcctagtgagacaacttctgcctaaaaaataaaagcttctaagacataaattctgtgttatgaacaacttgcaattttcatagttttcagttttagctctggcagcctctgatagatcttaaatatgtttatcacagctggaaaaatgttttattgtcatctttgtttatcataatatgccacctactctggttgtgtcttacaactgtagctctgtggggttttttttgtttgttttatgcttgctaatgggggaggtggggggtgggggcggatgaatataaatgatacctagaaattgaaattggaaaaaaaaatgtattcagccagtactctttccaggttatagctaaacgtcagttggcaacctctatgctgtggtttattgagtaacacttaatacttagcacagccctcagtgaagatcttttatggccttttctgaatgttatacaaacataactaaagcttatccagatgaggacagggacctttctttccttcctttttaaatggagcaaaatttggccactgggttgctgtggatgagagagtagaaggagaaaggcagtcatcgggagactgtgtgctgagagagcgcatgtgggatttggcttcaggaagtctgggcttgcattctatccagcgctaatatttagtgagtgtgatttggggcaaattatttcgtctccctgagcttcagaatgtttgaaactttgtgaggagtctgaccccacactgtaggctccctccatgtatatatttcttcttccttttcctttttttttttttttttttttaaatttttgagatagtgtctcgctctgtaaccccagttggaatgcagtggcatggtcatggcttactgcagcctcaacgtcccaggctcaagggatcctcctgcctcagcctcctgagtagctggggtcacagatgtgtgccatcacgcctggctaatttttaacattttttgtagagatgggagtctcactatgttgcccaggctgcactcaaactcctggactcaagcagtcctctccctccagcctcccaaagttctgggattacaggcatgagccaccatgcccggctggaactgttggctttgaagaagaatgatgctgtgcttgcctttgcagtcctgtcaccatacttcctggaaagtgggtggacacgctggatggtagatgttgagttctttagatgcctggatgcttacatgctttgtgtgggttcttactggggctgtaacttactagaggacagactccaacttctgcttacttagtctggggaggttaataataatctagggcacccgcttcccagtgggtttccatcagtctcctccagcccactctactctctgttagccagctgggcacctcttcctctgtgtcccttcggtatcttcccagtggctctttccacgactggctcagaccatgtgtatatctgctcattgtctgtccagggtccctccaaagatgcctctgtgggctgggcccctggtggtgcttcctccagataattgttgaagatggaacaggagtgtgcaagaacaccagcgtgcttccagtattcaggtctagcggcaggtcccaggcatcagcggctcaccactccaccgcaggtagcctgattgcccagccttggagccgcagcctccttgggtggtgtggcagctgtcagtgtctgaaaccattttgaactttaaagggtggtgtcagacagcagctattgaggctacttaaaagaatttttttaaatgtacgagttcagtggcattaagtacattcatattgttgtgcaaccatcaccactgtccatctccagaacttgttcatcttcccaaactgaaactccatgtccatcaaacaactccccattgcctttttccccaagtctttggcaaccgccattccactttctgtctgtaaatttgactgtctggatacctcatgtaagtggactcgtacactatttgtccttttgtgactggcccattttatgagcataatgtcctcaaggttcattcaggctgtagcatgtgtccagaatctccttcctttttaaggcccaataatatttaataatatatgtatgtgtgataacacatttatataatgtccattaccatgtggtatatatgcttatccatttgtctgtcgatggacacttgagttgctcccccgctttggctactgtgaataatatgactgtgatcatggatatgcaaatatttccttaagtctttcagttcttttgggtatatacccagaagtggaattgctggatcatatggcagttctatttttaattttttgaggaaccactgtactgttttccatgtagactgcataagaattccaatttttccacatcttgccaacgtttatttttatttatttctttaaattttttatagtagctatccattctaatggatgtgaggtggtatctcattatggttttgatgggacttttgagttttagcaaatatcaatgaagtatttaattttttttttttttcttagagacaggatctcacattgttgtccaggctagagtgcagtgatgtgagcatagttcactgcagcctcaacctcctaggctcatgtgatgctcccacctacgcttcctcaatagatgggactatgttcctgcgccatcactcctggtgaatttttaaatttttgtagagatgcggtcttggtacattttctaggctggtctggaagtcctggcctcaagcagttcttccacctgaacctcccaaagtgctgggattataggcgtgagccactgcacctggcttatttaaatttttatgggtatgaattcacttaaaagctgaaggttttgagaggagagggagcatatgaaaaaacctaaaggttttgggaggaggaggagaaggaagagagggagcatgtgaacaagagcaactgattacttccttgtcattcatttgcccagtgtttactaagcacctgctgtgtctcagacctgtgctggtttggcccttgtgaaggacagtaaatacagtgcagttccagctgcgcatgggatcacagtccagtaggtaaacgagtgcctaaacttaagagaaatgagtgcagttggggtcctgtggcggtgaaggggcgagtctgcacccaggcgagtgttaaaggcctggcctagagaagatgggtgttttgatggaaggagctgctgggaagcatgtgtactcggtgtcttggagtttagaaacctcagttggctccatgtctcgtccttagtaaaggaatatcgggagctgagactggatgtattgacacaggtcaaatcacagagtcttaggccatttcaaggaggttggatttttctctggaaggcacagggaggttttgaaggacttaatgcagaagaatgggcactgtcaggtttgtggtttggaaagtccgccttggtagtagggtggagggtgcattatggagggctagaccagggtccagcccccagcgagatgctgtgtggtaaccaggggagagagaggtggtggtgttagaagccacgacttggcatagaagccaaagcatccccaggttgtcattgtgtaattaatggttaagttggggcaagaaataaagctcttaaaagtgtccagctgtagagctctctgcctgtttttatcttcagatttttgtctttgccatctctggcctccagtggaaggccgaagttacttaacttccttgctggaagcagggctcctcatgattgccagcccctgtttggtagtggtcctggagtgctgtggaaatgggatacttggtgccacttaccttggggctttgctcctgaactgcagcggtgtcttgtgctctgtggtttgtagcatggaacagaggctgatgggcggggagtttgagtcccagtgattgaggccccctgcctgcctgcaccttactgaaggaaggacatggtggcttctcagtgtgctctctggtgatctgaacctagattcttgtttcacgggtagggggcagggttttggattcagccctggccagccctggcccaagttcatagtgtcagtagtatagttctcccaccacccccttctctcctgctcctgttttctcccccgccccttctctcctactctccttcctctcccactctccctcctctctctgcctttcacttccccccacactctctctcccccgctcccaactttctttctctcttcgactcaccacacaacacacacctgtgtgtgtgtgtgtgtgtgtgtgtgtgtgtgtgtgtgatggcactgttatttcatgtgtatacctttgcgtagcgttggcacatgtgggaatgctattataatgctttcgttgggggtctgtgctaaccactgctgagtgtgcttcatgttttctagacagcatgagaccagagctctccaccttgccattagctggtgggagaattttgagaaagtcacccaattgctcttaagtcctcatttttttttttaaatctgtaaaatggtatcacagatgcttatagctcaagactagttgatgagggtctgtgactcaaaaggccccatagatggggttcagagggcctttggaaatggcgtgcaagctctttgtaagtgtattttttttggagaaagggcccagctttttatcagacatcctgagagattcaggacctaaaaaataaaccttgattaatcttggaagcctctttttacgcagtacgctttgattcatcagtatatgcatgtggatgggttctcagatggcctgatgtttctcctccttcctctgtgtggtgggcgacgactttggctgcccagatgttaacatcagtaagcagaagctcagtcagtgttagcaaaattaaatcactctgcaaaaatcaatgttagtgaaattaaatcacttgatcttaaaagcagcatgaaatagcagtttttcatcttcattgtgctgttttcccactctagatatcttgcagattttttttggttgcttggttggttggtttttggcgtccttttcaaggacaagcagctttggacagttgcactacttttttttttttttttttttttttgacagagtcttgctctgtcacccaggctggggtgcagtggcgtgatctcagctcactgcaacctctgcctcccaggttcaagcagttctcctgcctcagcctcccaagtagctgggattacaggtgtctgccaccacactcggctaatttttatatttttagtagggacaaagtttcatcatgttattcaaattcctgacctcaagccatctgcctgccttggcctcccaaagtgctgggattacaggcgtgagtcactgtgctcagccagttgcactacattttttttttagatgccattgttgaggatccaggggtttgtcatagattgattaatcagaaagtattaatctaaagtattagaatatattgattgcaggcagggaccttgcatagtttaaagatgactcagaaggcacattaggttcttgccacactttgctgccatcacagatggatgtgagttgcccccttatataggtctctcgggatgccccagtggagaacagcattgatgttgaacagatcctgtccgatggagagataccagcgtttcagccagcggtgtgagtgagggcaggggccacctctgagggtgcttgctccctcacactgtcctcacgctgccctcaagctgtgggcaaaggagagggatcctgtgccatcacagccctagaagcagaattccaaaatgtgggctcctttgggtgtggtttgggggtcaaggagatagagcaagtaaggaatgaactttgagggtttatgatcattttcatgatgataatgacctaaaaacatgcttggctgggcatggtggctcatgcctataattccagcactttgggagactaagacaggaggatttcttgagtccaggagttcaagaccagcctggacaacatagggacaccccatctctacaaaaaaattaaaaaattagccaagcatggtggtgtgcacctgtagtcccagctactcaggaggctgaggcaggaggatcccttgagcctaagaggtcaaggctgcagtgagccatgtctgtgccactgtactccaacttgggtgacagagcaagactatcccaaaacaaaaacaaaaacacatgcttatggtaggcaattaaaacaggaggtaaggagtaaacatgccaggcccctcctcctctcctctgactcttccttcttcccccctgcttcccaagggtaagctttgcagatacttgctatgcaagcaaaaatgctattcttagccatcgtttaaacacagatttgcaatttgtggtttttcatttatataaattttggctctcttcctatagcagaatgatctttgtttttaaaatgattttaagtatacaattaatatgtgaatgtatgtttcttatggaaattagaacaatacacagttacagagtagaaggtgataggtgatatagctcaccctctcctcttcctgctactctccccagtctgcttcactccccggaaggaactactggcccatcagcatgtctccttccaggcattttttccatgtggttatgtccacctgcataagaaactgggggcggcagggtggggcggtgttggcgggtcaggcagaagcaagccacagagcagtaagggtactttttaaaaaaacatttaaatagatccctgttgtcctgcggcttacatgctcatgcatactcactgtttctttaaataaactttttcttttagaatagttttagatttacagaaaagttgccgcgatagtctagagagatcccatgtacctcttaacagcttcgcctctgttaacattctgtgtcaccatggtaatttgccacagctaaggaaccagcattagtccatgactgtcagtgaactaaactcaagactttttttggattttaccagttttgcccaatgttcctttcctggtctaggatcctgtgcagaatagcgcatcacagcacattacatttagctgtctccttcacctcttctggtctgtgacagggtctcagactttccttgtccttggtgactttgacagtttcgagggacactggccaggttttgtgcacactgccccttaatttggagttgtctcatggttttttttgtttttttttttttttgagacagagtctcactcgtctcccaagctggagtgcaatggtgcaacctcgactcactgcaacttctgcctcccaggttcaagcaattctcctgcttcagcctcccgagtagctgggattacaggtgcctgccaccacacccaactaatttttgtatttttagtaaagatggggtttcaccaggttgggcaggctggtctcgaactcctgacctcgggtgattgcccacctcggcctcccaaagtgctaagattacaggtgtgagccaccctgcccggcccatggttttcttatgggtagtctgggaccatgggtttttgggagcaagaccacagagctgaaatgccctcccttcagtgatttgtcagcatgacctatcaccattgttgttaaccttcaccacctggatgaggcagtgtatgcgtggggacatacatctatttgccccactgacatgagggttggatctctagaagaggagtcactgttcagaggttataggcatttgtattttttggcagatgttgtccttcaaaatggctgtacacatatgctcctcccaaaagtagnnnnnnnnnnnnnnnnnnnnnnnnnnnnnnnnnnnnnnnnnnnnnnnnnnnnnnnnnnnnnnnnnnnnnnnnnnnnnnnnnnnnnnnnnnnnnnnnnnnnnnnnnnnnnnnnnnnnnnnnnnnnnnnnnnnnnnnnnnnnnnnnnnnnnnnnnnnnnnnnnnnnnnnnnnnnnnnnnnnnnnnnnnnnggcagatcacttgagctcaggagttcaagatcagcctgggcaacatggtgaaaccccatctctaccaaaaatacaaaaaaattagctgggcatggtggtgcttgcttttggtcccagctacttgggaggctgatgtgggagtatcacttgagcccaggaagttgaggctacagtgagccgagatcgtgccactgccctctagcctgggtgacagtgtgagaccctggctccaaagaaaaaaagaagattgattgagatagggtcttgctctgttcaggctggaatgcagtggtgtcatcatcatagtttactgtagccttgaactcttgggctcaagcagtcctgctcctttggcctcccaaagtgctggggttacaggcatgagccactatgctcagccaagctaaaaatatcttagtgtgcatttctctaattgtcagaagtgtatttatttaccataccctggaaaccttatgtaagatgatggtgagtttggactttccagtaacatttggaaactgtttagtaccaagctctcattaacaatataaacaaaataggggtctacccttaaggaatcaaagccattatctaaaagctctttcccgcaacaactacctgagataatgtccttggtcatatgccccagcatttaaaaatggagttagtgagagtctgttgtttaccacctgatacattggtaagagctgcttgatggtatggggacatcagtagggaggatatagacgtagccacccccgccctagatagtaggggcctcagggtggggtaagcctgggtgggggaggtatgagtggtggaacagtgggagaccctggatccttagtctccagcgtgattgcattttgccaaggctttgtcccatgtccctttgtcccgtgttccatttgcccgtggtgttgcctagagagcatggaggggctggtggagcatgctctgtggttccctaacccagggctgtgtggggagagcttgcagcacccccctgaccccatatgaacgtccttgctatttcctgctgtgccatccagcaactataggatgctgtgctgtggctgggagacctgtttggtcttggaagctgggtcctggatgagcagaatgaggcaggcatagaggtgatgttggctacgggcaggggagcatttgctttgccttggagtagtgccatttccatgtagaggggcaagatttaccaccctgttgtggggatttgagactttgggttttgttttcctttacaccttgagctttgttctacagcaggtccctgggaagactggtccacaaagctgctgaatggggctgctgtccttcagccctgcctcctgctgcagaatgcagaggacgctgtagacttgcttggtgggtgcctggggttttctgcctccctggtgcactgggcacagcggcttgcctgccttttgggtcgtctccacctcccagggatgtttttgttccctgatcgaatgacctcctgttttgtttgttttttgagacggagttttgctttgtcacccaggctggagtgcaatggcatgatctcggctaactgcaacctctgcctcccgggttcaagtgattcttgtgcttcagccttctgagtagctgggacttcaggtgtatgccaccatgccacgctcatttttgtatttttagtagagatggggttttaccatgttggtcaggctggtctcgaactcctggcctcaagcagtgcgcctgcctcagcctcccaaagtgctgggattacaggcgtgagccaccgtgcctggcctgacctcctgtcttctgtttttgcccactgtcaagggtagacttcttcaaggctgtacttgtgctatcctaaagaggagtaatgggagacatttctgactttgtcagcatgctgcttggcagcacctgcctcgtttctggtgaccatttggaaatgtgtcctttatctggtagcaaggagcatttacattgatccctatgcacttaattggcatacttttattcctctggattttttttttaaagcataattgttcgtgtctacatgatgtaacatgctgctgacttttaagcaaattaacagagttcgtgctgaagcgcaagggtgcagggaaacaaaatgggagggttattaaaggggtgaggcggctcctcaaagatgtcactgcaccattcattcttgtgttcctggcccatggcaggctcattaatcctccacgacaatccattagcatgcctgtcaacccttcagagaagatgagccataggaaggcttagggatccccacttgaactgctgtgtggctctatgaacatccccaccttcctggagtgaggtggttgtggccacctgactttccccattttttttttttggacctcagcctccagcgctcctgggccagactcagggtgggggggatgcaggtgccagtgactgacacttggcccctcacacttcactgcctgatttgctttaaaggcaagggttgctcatgcttgtctgagctctccatctgtttgagaattatattgttctcaactggaacttgtaaaagagaaaaaaatgtacttctcaatttccatggaagaatatagattttctggtggggtggaaactttcttagcatgaagggatctttgtgtgatctgcgcatcagcactgaataaagaatgggtgcgccgaagtcggggaggccgactttcctgtggcttgctggggaaagtttgaactgtgtgtaagcagtgcgtggaaggaaagctaagtgtggagataacgaagggaatgggatttaatagaaacagggtgtgatgagtggcagttgcctgatgaagtggaaatcttgtgttccaaatttgtgagatccatttctgtcctctaaggaaaatgttgtatgtgcaggaggagttcatgtagttgggttagattgtgttttctgtctttattttttttcctgcctctatgggttgtgaacaaaaacaagaatttgatattctgcagtatagttaactcgtgcaaacagtgtatgcttttcagtgggatataaggtctgaaataataggattttccctagtaagtcagtttcattcctttacatgtgggttatgagatacaaagtgaagctctgtaaagctttttacgagctccctgtgttgccctcctttgacgggtcaaggcattggggttgacagaggtttctactctcagaggctttaaagaggtgcccactctggtgagatggctgtcagcatgcacgatgtgtgtgagagagcacctcttcaatcatatgcacctggctgtagcatccttgtcagccttaagagatacctccaaagcggaattttctacccctagaatcatgtgaggtcatctcaatttaagccccagctctgctccctaaattacctgagtgatcccaggtaggtcatttgctcattgttaaccatcagtttccttagctgcaaaacagagcagataacaccccaaaagagttctcatagtaaatcacatcaggcttacacaatctcagaaatgtgcagctccacaggaatcttcattacctctttaggcagtccagtcgggtttcaaatgaatcctactgtctgttcttatatggaaccacagtccctcaccctgtgttgatctaagttctctgtttctctcctccagcagggtcataaagagcctgaccagtccccctccctggagacctttgtgtgctgggtttctgcagccgttctccatgagaagggacttctggtccctgctctcacttggatgttcttccactgacttatctctcttaatgtgtggaggcagaaacccagttttcagggtctctcccctggccccttactaagtctcccttaggtacagtctaagactgcctgactttttcttctttttttttttttttttggcagccacaacatcacatcgtcacatacagaaattatatccaattaaatctcctaagtctttttcacacctcctacatttgtgcatttctttttttgcacccaagtgtccaaatagcatttatttcctctctattgcaattccaatctgttgatctttttagctcttgactctgtcatccagtgtatttgccattgctcctggaaacttgtcatctttgaattagataaacattttatctgtgccatcgttcaagtaattgataaaaatgttgaaatctacagtactcagaaagagacctgtggcctcccactagagaccttccttggtctgttcattaatcagcactttgtagggtaaattgaacatttactaagctattcagatgtagttcatatttcttcaccttgtcaacaaagagatcttagcaaggcattgtagaccaagtatgtgttcctggaatatacatattaagaaaaaatccttatgccaagaaaatgggcacatccccaaaacccaggttattgtagtttacggcttctgacccagggcttcactttgtagcagtgtttttcttctgtttttgcctttggctgataccactgctagagtgcagataagagaatgttactaccagggggcttgagtgtcgggctatgattggctgtcatctggagcagagtgggactgagctgctcaggagaaaggtcttcaggtgattttttttgggaagctaagagcactggttttagacatcctctcctggctgatgatgggattggccttcatggggctgctgtctggctgggctggtgggcagaggttcctgtgggtgtggatggagaaatcctaaatgccgagggtacctggtcttagtagaaatcgtaggatgcctcagtgaagaagtcagggatgcggattgtcctccggatgcttggatgagcgtgcagtggaaaaagtactcctttgggggaagaggtgaatctggaggtgttagagcagaagagtaaatgcagaagttgtagcagatacaaaggctttggcaagagtgggagtgatcattgaagggaaggcaggggcttgctgggacaggctggagccgtgatggaccctcatagtaaccctgctgcattttacaaaggaagaactgtgttggggtacagatgtgccaaacactcaaagttagaaaatcaacgcagtcggttgtggcttctgcccttgaaacatcagatagtgagaacctgccactgttcagtttgcagagtggttggttgcatacagtgttttagctcttgcccactcaatacagaggttgcatgcgggcgtccacctgctccgccacctctgcctgcttgtggctgtgtgcccagagcccatttccctggggagtcagtgcagcactcctgggggacccttctgtttgtgtcctgacgaatctgactgtgctggatgcagtcccacagccacacctggtatgggtggcatctttaaaggcctggcctgtgtgtgctgtatctgcagcagagctgtggccaaacctgctttccttccatctgggttccccttggttctcggtggtggacgggctgtgtggtctcccctcagctgtccacttgcacttgtgttaaaatgcggcagaactttccctctatacttaaattgtggtgaaatacgtatgacataaaacttaccatcttaacttttttttattgagacaggttctcattctgtcacccaggctggagtttttttattgagacaggatctcattctgtcacccaggctggagtgcggtggcgcgatctctgctcactgcaacctctgcctcctgggttcaggcgattctcatgcctcagccacccgagtagctggaattacacgcgcccgccaccatgcctggctaacttttgtattgttagagatggggtttcgccatgttggccaggccggtcttgaattcctggcctcaagtgatccccctgcttcggcctcccgaagtgctgagattacaggcgtgagccgccgcgcctggccttccttttttttttttttttaagagatggagtcttgctctgtcgcccaggctggagtgccgtggtgcgatcttggctcactgcaacctctgcctcccaggttgaagtgattcttctgcctcagcctcccgagtacctgggattacaggcgccaggcaccatgcctggctaatttttgtatttttagtggagatggggtttcaccatgttggccaggctggtcttgaactcctgacctcgtgatccgcctgcctcggcctcccaaagtgctgggatcacaggtgtgagccaccacgcccaccggcctcccatcttaacattttaaagtgttcagtttaagtacctttacactgctgtccaatcaatctctagaacacttttcatcttgaaaaacggaaactctgtacccattaataactcccattctctcctaccacagccacgggcagccactttctgctgtctccgtgagtctgactactttgagtacctatgagcagaatccgcaggatttctccttttgtgactgccttatttcacttagcataatgtcctcaagctccatccaggttgttgcatgtgagaggatttccttcctgtgcatgaactagagtgatgcagggactgacctctggccatgtgatgggtggttggtgatggatccaagaggtagctggtctctgaatactagcccagtccttttccttgctaggaaagtccccagatcagatagaaagcctcagtatttcaagaagcttctgttttgacaccacatccatgaagaatcacactgcagggtaggggaacagatgagtgggatttctacactgttatcagctagacttagataactggctaattgaaaagagtacaggtcacttaaggaaactggagcattgtagggcaaggtaaagtgcttttgaaatgaggatgtgaactgtaactggaatgatgtaatgtgttctacaaaatgaagccagtgagaggacaggggacacagggccgacttttatttaggacatttgcctggttctgagaagaaagttgaaagtcacgagagagagggaaaggaaggcagaaggaacttggtttttgcaggtgcctgctcagcatgggccttgccccagcttggctgtacctcacagcaccatccactggctctacagtctgtccttcggaggtttagggtgctgtctcatgcacagtgggtgctaggtggtagtgaggacagggtgtgggactaggcaggtgctgcccctcggaaggcctcatggtgaggcaaagatctctggctccgagggactctatctcctggtgtcctgcttcatcgagaagccagccacccatgggaactgtggataattagaaaggcttagaggctcttctaagggtgttttttgaaatatggagacctagaatattgggctttgggatattttaagatgagaaaggcatttggagtaactgtcagagcagataaagttgtttttatgaagatccgggaaaacggttgttacaaatacagctctgcaccaattctgcgccagtctgtttggctacagatgctttcagtggaggggacactggggcttgtgttccctttagtctttgaattcccgttaaagtttccatgtcttaagtggcgtggcaggatagaaacatctcacccatcttagtaagttctttgctgtatgtagcactctggttttaacgttctgagccttcaggactgcccttgatgtgtgcatttattttgttgatatgcatgatgtgtgggtggctctgcggcagtaaaacagttcacattcaaattacactcggtttctaatttctgttctcagagtttcctctgtaatggaaatctcttacattcttatcattgccttcagttattgaatgtgttaggtggccaggattgctgtctgtgtgaaatgggaatgtatatatacaacgtaaacatgttctgattgacacgtgaagataaagggcttaacatgaattgtgtcggtttacacttacacagaaaattctactgtaataaactgaagtgtcagtagtgtttgttatcataacattgtctttttccctcttttctgatctctgatttttcaattaggaatgaggcctaaagaaacccatgctctctcttctctgagcgcaaggagggtgtgctgagaccttgaagggcacagcatgggaggatcatatactagggagagtctgtctccaccccatttttcttctgctttgctttgtttcgtagtttcttcgggcttcttgggggttttctgagagagagaatgtcaatttgagaagtaacaggtgcacaggctttacctgcaccacactgcagataaggtgggtagggagggtagtgacaggtggtgtggtgggttattcagttctttcctagggcagtgggtctcacagggtggtgcttaggccagcagcatcagcatcacctgggtgcatattagaaacaaattttggggcctcacctcttgcgttttaacagttccttcaagtggtcctgatgcatgttgaggactttgaacactcctcctacaagcaaagtgaagttgacctcccacacacttgtctcagtctgctttctagcatctgtcccattgcctttgttgttctccccgccacacgggctgcacccctgggattcccccagctgccaccaggcatcagctccagctgcctcccagggtgtgctcctgcctctgcttggagtaccctgcctcccactcttcctggcaagaccctgctcatctttcagggtcgtctctgctgagaagtcttcctgacctcctcggagatagggagttgtggggccttgtctttatgttcccagggttctgtctattgcgctattaaaactttttttttcatttaatttgccacttgctagagagatggttgttctgccttcgttgtgcaaaattcagtgatacactaatcctctcctaacctcttaaatcattttgactttcacagagtgatagtgtctagagagggtttttgttgtactaagttattggttccaaagaattcattttaagaggagtaaagaactattatagtatgccgcttactgagacaaaaccgacttctcacataagcccaaaggttttgttatgttggattttaccattagagttaaagatgatgattggttcactaatgtgctttaccttcacagtgtgcctgtagacctgtagtaaaagaaggctaattatgtttcctgatgtcttttatttccaactataagctaagcctatctcattttttttttttttttttttttttttttgagatggagtctcgttctgtcacccaggctggagtgcagtggcgtgatctcagctcactgcaagctccgcctcccgggttcatgccattctcctgcctcagcctcccaagtagctgggactacaggtgcccgccaccacacccggctaattttgtttttgtatttttagtagagatggggtttcaccgtgttagccaggatggtcttgatcttctgacccgtgatcctaccgcctcggcctcccacagtgctggtattacaggcatgagccgccgcacccggccaacctatcccatatttttaaagaagagttgatcaagtagttacccattttaactaaatggataactataacattctttaatggaattgttgacagagggataatcagtgtttttgctaattcatgccaccctcctttgttgtatgttagtaatatttacattggggcaacaaaatagatcagtatttccattaatgtttacttaataacagctgctaaaaggtattactgtttgcagtaacacaaaagcacttacctgattcttatgccagcttctatagggtaggtagtgacagcccattttgcaggtgaggaagatggggtttagaggtgaggtgtgtctgcctgagagcaggagctggtaaatggcactctgggctcatgggagtcacgctgtttttttttttttttttttttcctaggacctcaaggttgtgtctaagacataatttacagttctcgtgtaggtcttccaaatacttagctacacagctttggggcgttttctcagccaaatacttttctttagcccttctcatattaacatttagttcttagggatttattttcaaaatatatatagcttgtatatgccattcacctaagttgttagagcagacattctgcctcttgatctttagaaaatacctaagagtattttgttaacagtactcatttcagctgaaagactttattttaaaatttaatttaattttattattgttttttgagacagaatcttgctctgtgtctcccaggctggagtgcagtggtgtgatcttgacttgttgcaacgtctgccttgtgggttcaagtgattcttgggcctcagccacccaagtagctgggattacaggcgtgcaccaccacgcctggctaatttttgtatttttagtagagatggggtttcaaactcttggcctcaagcgatctacctgccttgggctaccagagtgctgggactgcaggcatgaaccactgtgcctgacttttaaggctttctttaaaatggcatcttttggccaggtgtggtggtaatcccagcacttctggaggctgaggctggaggattgcttgagcccaggaattggagaccaacctgggcaacatagggaaaccctctctctgccaaaaaattaaaaaacaaaacaaaacctaggtgttatggtgtacccctgtggtcccagctgcttgggagctgaggtggaaggattgcttgagcccaggaggtcgaggctgcattgagccacgattgtgctgcagcactctagcctgggtgacagagtgagaccacgtctcaaaaaacaataaaaaataaataaaatgacatctttggagaagtgaattctacccaggtaccaagcccctgcctgcccctcccaactcccttccctgactcccagcacccccatctgttttggttctgctgttgccattctctggctttggggactttgctgaggccccactgtccccatcttccagctgtaccctttctctctgcttccctgcttgtcttattctttacagggctgcctgggatctcacattccaaaagtttttgggtttgtttttggatcatgccaatatcggttgctttgagaagggagaaagggtattttgcattttccttttaatcatcggtgagtagccacaaagggtgtgtctctccctcttgtgctgtgtttactgtttactccctcggtgcatgaattatttcatggcaccagtggagcatattttcttctctttcctgtttgtggcttgcgcctcctgaacgctgctatcattcatggtccagcttggttttctttttcactgtttctatcacaaaacctcctgaagaccagtggtgtcagtcataggctccaaaacagctggttcctaggccctgcctcgtgctctgtggtttgggcttgtcttttcttccagagtaagtgggtagcttcttcctactttttttctcttttcttctataaatgggaggaaaagtgtgaagtatggagactgctctttcatttgaaggaaattcacagttccagctctgtagtgtggcctctgttaactagtggtcaacactgactgtggaaggggggccagatggcaaagtgaagcagattctttcctcctgtctgcattttgattgcagtatgaagttcaacttgcttcagtctttgtcttcatgttgtttcactaggtactgaattttgtgatctgttggaaataacaagtaaatagatgcctaacgctttatacaggttgagcctgtctaatccaaaaatccaaaatccagaatgcttcaaaagtttcagcttttggagcactgacatgacaccacaagtggaaaattccacacctgacctcatgtgacgggtcacttttcgaaactcaggcacacgacacacagttaatttagtgtccccaagggaaaaaaagaccctcccggcccccttcagctgtgatgtgtcttttccacacatgcccagattccctcagacacctccacaaagggtaataaaatggttcgttgtatacaaactttgtttcatgcacaagattattaaaaatatataaaatgactttttagagaagcgagaagagaaatgagaggtaggggagggagggaggagttgggggacagttgggggaatagttgaagctaaggtgtttaggcagagctctgaggaggtgacgtttgagtggagacccagatggctagagaatggggcagcctcctgaaggagcagaagcactgtgggcggcagggtatcacagaggaggagctcggtgtgttggaggttggtgagtcccgtggagtcttgtcagatggtgttgggacagggacggaccgtgaggaggctggatcatggggaatgtgttgctttaggccaagctggagttgatagtggctcagatcagagctaaagtagtggagacacacagacattgaaagaatgatgaaattcactcattctgcgtgtgtcccatgtcatgtgtccgctgcacaccaagtactgttttaggcactggtgatataattgtgaaccaactggagctgcggtgagagagaccatgaaaagaagggccagagcggtgtcctgcagagggtggtgtaccttgggagggaagtgtgtagggttgttgaggaacagtgtgctgcacagggaggaaagacgtggggcagcattgtgggaagagcaaccaagattctcataggcttgggagcggaagccctgaggtctgttgctggactagatatgtgaggtgtgagaggagagaagaatcaggaatgactctttgattcttaacgtgagcaactcagagaatgagagtgctgcagtttacaagcttggaaggtggattatgtggggggatgagtgagttgtttgacacctcaatggatatactcagatggatgtatacgttagagctcaaaagagtctgggccagtgacatgaatttgatcatatctagagtatgagtggcacaggaagccacttgtctggatgaggtgacagaggaaaaggttgaggatagcaaccaacatttagaggtaaggtagaaggcagagcagtgtggaatcagggaagccgagaggaggaggcaatgccaggtgactggaaggtcaagtgacacttcgacagtgtcactgagggctctgctaggagctattcggtgtcataatggggacagaagctcagtcggagtgggttaaaggtaaccaggaggtgagggtgctgagaggtgggactattgacaagccttgtgtcaagttttgctatgtaggggctgaaatctaatgtatgtgactgtgtataagtgacttgacttccccaaatctgtttcctcacctttaaaatgggtgtttgccaagtgctggtttctgctattcttttctctgtcttaggggtgtcattttctctttggtaaaacagaagaattagatgatatgaagtttcacattctaagttctcaagctttgcccactcctcagcccttgggtccctccacttcctcttctcttcgctatctctgctcagtttctgtctttgattgtaatgtaatgcccagtgggacttttcttctctccctcgtctgttcacttattccgtcctgcactgggccaccagattaatcctgcaaaaggcctcacatgggcttctctcctgctcaggagccttgtgggggctttattcctctgagatgaaagttcttatccccacatgtgatcctttatgacttgggtgctatcaaattcatttcctcaactgctcccctcttcaccctgaccatcagatctgctggcacatgggcataccttgttctgcattgtctctggcctgtgggatatttaccgagctttaaatcctaggcaccctttgggagccggcctgtgtgcagagctccccttagcacggtggcacaaagcttggacaccacctcttgtctgtcctgcttaattccattcacatctagagtggactcgctgtgtgcacaccactgaccacctgcctcatgtgacagttgttcctcatgggtcttagctctttgccttcaccatgagcctcctcagagggcagggcactgcctgttggcatttctcgtggtatcatacatgttgggtgcttcccaaattaattacatcagtcagaaaacttcactctatctgagaagctttaatagtgtacttgggattattaaatcctaaaaaaggttatcacaaagagttttcttggtgtgtgtctgtgcttagaatttagaaaataagtcatccagtattgaggccattttatgaaaagcctttaaaatctgcaaatgcgttggcccagcacttccacttctagggatttatcctaagaaaatagtcttgggtatctgccaataatgttcactggagtgttgtttataatgtgcaaaacaggagctaacctaaatgtccaacaataagggattggttaaaaaaaaaaaacaaccctcatggtgtgtattaatactctggaactactgtccccttaaaatggtgatgtagaaggacatgtattgacctagtaaaatattaagtgaaggaagtgtgtttacaaatgtcatttttgtctgatttcacttaccttcatttatagagagtggataattggcatagatagtgttaacattgtttatcgtggaatgttgagatcgttgatgatttttactggtttttttttttttggttattacctctaaactctgtaggaagcatgctttcttgatcaataaaacttaaagttggagtttatgctgcttttattcataaaaaaatcacgtttttaatcttctgttaggttatcctttatgtctacattaatgcacgtgtggagagaacacagtctactcggcttatgtcaaatggtagtgggaagcatggaagcatgcgttttttagtccccactttacaagtcacagtgacggttctccagtgtagagtagattgattgccctgtgtccttcaggcagggtgcagtagtaagttattgatacttggctgctgagctgtcgttcaggccttggcaactgacgctctgcagaacggaccaggagtgtgcggtggtggagtccggctggcctgggttgcagatttaactttcgcctctgcctctgtgtgcctctgggctgtaagctttagtttgcacggttaacggggatggcctctcccatggtcggttggagtgtgttgcacagcgtctggtccagtgttggcactgtataaatgccagctaactggttagccacctaaactgtcagtctgcaacccacagctctgcagtgaacaattgaacctcatttctttaataataatacaggattcctgaaaaccaactgtattattgtttggaaaatagtttaaaaattatttccttctaactgagacgtttaccctcttgtctcccttcagtctgcgggccaggcatcgacatccgcaacgactatcagcagctgaagcgcctggagaactgcacggtgatcgagggctacctccacatcctgctcatctccaaggccgaggactaccgcagctaccgcttccccaagctcacggtcattaccgagtacttgctgctgttccgagtggctggcctcgagagcctcggagacctcttccccaacctcacggtcatccgcggctggaaactcttctacaactacgccctggtcatcttcgagatgaccaatctcaaggatattgggctttacaacctgaggaacattactcggggggccatcaggattgagaaaaatgctgacctctgttacctctccactgtggactggtccctgatcctggatgcggtgtccaataactacattgtggggaataagcccccaaaggaatgtggggacctgtgtccagggaccatggaggagaagccgatgtgtgagaagaccaccatcaacaatgagtacaactaccgctgctggaccacaaaccgctgccagaaaagtaagaatgatgctgactgctgctttctctctgcctctctctctcctctcctcctccttgacctcccttctcttctgagtgcacgagttccgctgggcagggtgcagtcgtgttgcatttaggacgtggcatgcctgctgtgcggaagtggttcccagtgggggtcttggttggctttcctttgcatctgggactcttggattgcgggactgtggcgtggctggaggccatcatggctgctgtcaagactgttcaaatcacatgttagaaataatccagcacactcctgggctagacacttgctgaccttcagctttgaattcctgatgagaaaggtgacctggtgtgcttggaagtccctgagccttggcagctgggggctgcttatgtgtcagctctttcatcctttgtgcgaagtgatattttttgttctgcaggacttccttagtttgaatggacttggaatatggttaaataaagggaaggtaaagcactaactcatatcctgtgaaagtggtccttaggtcctagtgatgatgttatgatactcaggtgtcctggttatgacagagcacctggcccaggtgggagacctctggacccatttctgcaagtcccaggttcaggctgtacttgcaggtagctgtgtagcagggtgcatttttaaacctctgggattctgttttcgttcttttatacctgtttactgaacagttgtgaaaatcttaagatttcacgagtgaaggaactttggaaagtatttactgttctgggggtcagatggtggtattttgaagcttcttgtatatttatctgcaatatgcttattttcccttgagaataactgagctcttgccttcatgtgatcagttccttaagaaccaggctgtttggtattaaaatgtgactctgagccttcaccttattgcattcagcaatagttatgtatattggctaggaagcttttcctcactggtttgaagtcagtgtgttagctataaatagctattatttaagtgttggcccagttaaagatgtaaggaacccatgttctctagttatgaagaaccaagaaaccccaaattgttagacttgcctaaaataaataaaaggcgagaccccacaggggtgaagtgtgtaaagtaaataaaggacagacctcccaggtagcccttcagttcccgttcaaccagtcctgaggcaggaaaaggatctgtgtaccctgatctgccacgcacttttctattctgcagaattggatcagtgcgtatgtgaacattgattagtgagggcaggggtcccactggctgcagccagtaccttgtagagctctgagaatgcagtcaggccactttaaggttggctggagttggagggagatcttatgctaaagtcacttgtgtggttgattaaaactgccctatcattaagttacccactggtttgagaaaacaacaaaatatattttttaaataaccttgacatttaaaaattttatctgaaaagtaaaaggtgttatcaagggaggcagcatggagtagaaaagagatgttgaatgtggtgatgagggccaggaatgaccttggatgggccagcccttctgggctgtagttgggcttttttaggatatttctagggcagtccagtacatcccttagtggtgatcatatatgggcatgaggatgttttgaaaactcataagctctttagagaagggaggtgccatatgaaacgtcattaagtggagagttgttcacgaactaggtaggtagttactttggtcttgccataggtttttggctgtttctgatgagctactgattgaagacccctggggtaggggtgaggcctgcattctgggtccaagtctaagagtggcgactagaaatgagcaagttatttaaattgcctgggccttggtttcttcatatgtggaatggggtaaagcctgccttcctcatagggctgttggaagatgaaaaggaggaaggaaaagcaccgtgaaaatgttaacgatggttagaaggtgggctctgctggtgacagacagagccttgatatcacctgttggttggtcacctgcttccccaaggccacgccctgcagccttctccttgaccatcccagccctgctgatgttccttgtgatttcacaatggagtacttatataaaattggtaactgctttccgggaaattgacttcccttccccttgtcctgaaaactcaggcatgggcatatttcttggagattttctagttgaatcagaacttcctcttggtttgcgtagattccatttagacctgcattgtccagtgtggtagccgcttattgagtaagccacgtggcttattgagtacttgaactgtggcttgtccgaattgggactgctttaggtgtaaaatatacactagatttccaagacatagtatagcaaaaactctgtacaccatttcattaataattactatgttgataacatgttgaaatataacattttggatatattagattaagtaaaatgtgttcttaaatttcacctgcctgtttcctttttattcttttttttttttttttgaggcggagtttcgctctcatcacccaggctggagtgcagcggcgcgatctcagctcactgcaacctccgtctcctgggttcaagcgattctcttgcctcagcctcccaagtagctggaattacaagcatgtgccaccatgcccgtctaatttttgtattttaactggagacggggtttcaccaccatgttggccaggctggtctcaaactcctgacctcagatgatccgcccgcctcagcctcccaaagtgttaggattacaggtgtgagccaccatgcccgactctttttaattcttaatgtggctacttgaaaatttaaaattacagatgtggcttgcattctgtgttggtaagctgctttagagcatttcttttaacaccaggagttcttcccctcatcatctttttggctgagtcgtcactgcagcgctcatagccccgcatgtacctctccagccagaacccttaggaatcatttggggagctccatgaagggcattgagtccaggcagaatggctaccttgagttcaacataagcattaagatggccattcgaaaacattaagcacagaagaatcccattcaggtaatcttctgttggctggctgtagaactacggagaacatctggagaaacacgtcaagggtgtgtgtgaaatcgttgagcctactcgattttgtcgtgctgttgcgcggttttcacttggcactgtcctttaaactccttctgtgccgtgactctgcagtgtctggcagcgtagtagactctactccctctatggacgtgatccctctgtgggttctctgcacacttctgtatttctcggttctttttggatttaggagtggattttatacatttttgagtcattcctaaagagcgattgacccttaaagaactgtgtacagtggtttcctttcagtaagaacatagttgtgtggcaccccctgacatgtggtgtggttgattcttcttccttgtcttccaacgccaccctcttatgagtctcttcctacccccacaggtgccgcttctctgtctcccttccctcagtctggcttttaacggtggtctcctgacatagtccattcaggctgctgtaacaaaatcccataccctgagtggcttacacacaacagaaatactgctcacagttctggaggctggaagtccaagttcaaggtgcttaccagattaactgtctggggagggcccacactctggttcacagaagcaccttttcactgtcttcacatgttggaaggggcgagggattttttttctggcgtcttttttataagggcactaatcccatttgtgagggctccaccctcatggcctaatcacctcccagagccatcatactggggattaggtttcaacataagaattttgaggggacataaacattcagatcatagcatggctggagttctgtcctgggctctcttttcactttccttgttctcatctcatccactggtaactgcattgcctcctgtctccacctaaacttccaagtatctccagcccagaacccttttgagtccaggacctgtcattcatatccatcccagaacccttttgaacccaggacttgtcattcatatcagaccaccacgagcatttcactacagcctctgatggtcttccctgtttcctcacttttgcctattttttttcttttctattccctcttaagtgggccacacttttgttcccctggttcttatgtcaggaatgtgggtgtcctttggacacttccttctccagttggataccaggccctttccctcccgaatggaatggaaatgctgcttcagctgtgttcctctgctcctcccccttacagcagtgacatagcctctctcctgctattgtgtcctgtggctccaccgagcactggggagcttttcagtatgcacttttttttttttggagaaagagtcttactctgtcacccaggctggagtgcagtggtgcgatcttggctcattgcaacctccgggctcccaggttcaagtgattctactgcctcagccgcctgagtagctgggattacaggcccgcaccaccacacccagctaatttttgtatttttagtagagacggggtttcaccatgttaaccaggctggtctcgaactcccgacctcaggcgatccaccggtcttggcctcccaatgtgctgggattacaggcatgagccactgcgcccggccatctagtgtgcactttggactgatgagctcccctacctgaaatcctgtagcaagtccctataggataggcatgtggtacagtgtgaagctcctgagtggtcaacagctaccccgtgacaacatgccacactccatgtgccactccctcccgcctgcctgctgtgtccttggccccagtggtgctctcccgtgctgaccagccggcacggctcacctggccgaactctagccttgccttttcctctcaaggatgtaaaggctctgcagatttcgggaggcctgtctcccagcacctgatgggacactttttgccccactgtaaattctgggtgtatcctccactgtatgctgtcaccccaagggcaagcactgcatctgcttagtgaaggatttattgttcggaagatacattttccccttgagcagagagtggcgtatcctggcagtcttcggtgagccagttgtaccaggattatgaaatgcagatgtttactgtgtcattgttgctgtcattgctactgaggagtactgaccagaatcatctgcaactcttagttggcagagaggaccactatggcgggtagctcttttctttcctgccattgtggggatgattccaggccaaagatgatggagaagtatggaaatcatctgaaaggttgaagcttggcacgtgaagccattcatgactttgtaaggcagttttgctgaaggccagttctgccctgggagggacggaggtgaatcctcctgagtacctgtggttttcttacttcctgctgaatttacctaagtgcctgttgtttgcttgctgtggaggctttctggtatttcatttcaggtgcagatgccttcactttcccacaaaaaaaaccccaacaaaacctaagaccttactgcaactaagtctccaagtactttttaacccattgggatgaacagcctgtggtctgctcagatcaccctgagtgcgtgtgagaaggcctgggctttgccaggaaatccaggaaggcagggccgggctgtgttggaagctggcttagctggtggggcagccttatttcaattaaaagggcattgactgggagcagcagtcctggagtttgttgcatttcctattgccctcaaaatgagaaaccaggaaaatagcagattggagccttcgagaaggcagtaaatggctgtttttattgacaaaaggaaaacattttactgccatctcactgatggcatctcactgacttaaaatgaaggcaggttgtagtaaaaaaaaaaaagtctacatttttccaccgccacgttcttatatccttgtttgtcagccactgctcacaagggcagtgttgtcttgcggagtagaggcgctctccttccctcgttttcctctataggttggtgtggctgacctgctagatcaaagtggaggacctgtttaagaatgtgtaaattgaaggctgggcgcagtggctaacacctgtaatcctagcatttggggaggctgaggcaggaggatcgcttgagtccaggagctcaagactggcctgggcaacatggtgagaccttgttcatataaaaaaatttaaataattagctggttgtggaggcacgtgcctatagtcccagcactttgggaggctgagatgggaggatccgcctgagcctggggagatggaggttacagtgagccgtggttgtgccactgcacttcagcctgggcgacataatgaaatcctgtctgagaaaaaaaaaaaaagattttgtaactaagttttatggctagctttgagaaaggaaaataataataaaaaaagaatgtgtaaatcacctgctggatggggggaagaggggcacattgtctttgtagtgagacttcactcatgtgatgtgcagtatttcatcttaacattttttttttaaacttaagctacttgtgaagagctgagatgtttctgttaagcactgtgtggtctgctgctggtcttctgcaggccactgttccccagactgctaagacgatcatgacacaggcttgcattttcaggtggactcttgggaggggcttgtggaccctggaggagaaggcagccaggagaggggcatctggctttgtgttgttggtaggaacttgtctcggttgccctggaaggcctctgctctggtcagctgctcccagtgtgggggtgatctttatttagaagggggtcacatgcccccaggcctcattgctatgccttttatagtcaggcgtggagctcacattctcttctgcctgattgccgacgcttgttgccgagatggtgaagcagtttgtgtgcaggttccctgggacctggcttagcccacctcatttcttggggcgtgtgccttgtgcctcaaagactttgcttttggctaattgtcattagtgatggtgtcaccatcctgggcctccttcagaagtttttaatagggatctcgtctaagagaccaaaaagctttcagaaccactgacttgtggtgatttttgcatgccaagtatttggaaaatatctggagccccttcagctctcaccagttaaacctatttgtacatttgttctggtttcttcctgtgcttgaaaagcctctttctttgttgcgttaatacctctgtcttgctttcctcatgtgtatgccagtgtgacattctcggcagagtggggatgacgtggagcgtgtgggcccgtggttaatcttgtcctgaattgccttgctcaacttgcgtgtatagggtggttcaaaagttaagtttggctggtggtgaagttggaagcatcacttagaaacacgcctcctttgggcatatggtgtgaatcagggactctggctataaaaggtggggtctctgagcaccatcctggttggaatgttcccctgacttggaggtagcgagagacagccaaggtgtttgttccagggaggctggtgggtgggagatgggatttttctgtctgtggcacaggcagtattaagtagagcaggctgtttaaatcacattttaagtaaaaaccaaagtgcacagatgatctgcagaacttctgggggataagaagctgctttcctcgaagaagttcacctccaaaccagcgcccatggctcagcagccagcatggcagccccaggggtacatgggacttgggcatgtgaggctggtgagggacagggacagctgggtccagcagtgcctttcctagggacggttgccacgtcacctgtctgccctgtacttccatttcctttctttgaactcggggggcttgcatcggactacctgtgccgtttcctcaaactctaaaattgagtaagttactgagggtttccgtggtctgctctgagaagatttcttgcttcctgatctgcctgtgtgttcgtgttgcttggtctctctctctgtctctctctctctcctctttgatcctagtacatacaggcaaggtatgcagcatttaaaatgttcataactcatcaaatggcacactgatcatcatgtataatttgggaatcagggtttaagaaatttagagatcatttatatggaagaaggaaccccaagtagaaacccaaaatctagaccattctgggttctaatctgtacctgccactggctaacatatggctttaagctggatgttacaatgagagctggagtttcgtctgattgcacatagccttgcttttctgtctttggaaaagtagctcactgcagagccctggtaaacgtttgaactgcattgcgggagtaggcagaagaacagaacagtccttggagcttggtaggaggtgtgagggcttatgggggacagttgtcttttcaagtcaaggaggaataagggcttctggggccggtggaaagggtgagtcttaggcagggaagggtgaccatccaggttagatcacttcttctgcggggtcagcttggccgctgttaggttttcaggatgtcatggggctggccaggcctcacccctgatatccctgagcatctgttccttacaatattgtggagtccgtgggggcagaagctaccatcctgtgcctgccctcactctcagtgtgactggtcttcaggatgtttaggtggctccacatgcggatgtacagctttcccctgcttgttttccccatggcatattaacagcgagatctgcaagaatacatcattttgtacagaacaggatgtatttcttttaaactacgttcctgtgtggacaagtggtatcatatgcaaaggtttaaggaccgttgatgccttgagatagtgccatctgtttgcctcaggtatgtggtgctaggacaaagctgccagacctcaccttccttcagtgagacaggaataggacagtatttgaaaagcatctaacatgtttccaagcacataggtttttggtaaatggtggcagctgctgctattttttttttaaattaaactatctaagagttgcattctgagaccatctaaaattctgagtcttaagctgtgttgactatatatgttcactaccataactaaatggtccttctgtattgcttttctaaattgtagaatttcaattattgtaaatagcgggccatactgtaggtgtggttcttgctaatttgattcgtactgttcaaattcttgtgtctgtccagataaactgtatctttacagaacattcagcgaggtacatatgtctatatcggggtgccagtggagtcaccctagtcatatgtaaactctatttatttggttccgaaactgaatttattttgtttgcaagtttggtatttgggagcatttaagaaatatccatagattcttgtatgatactgacattaaatcattaaataccatattttttaaatgcctctgtctgtttgcatggataacattaaagtggttagagtgggcacagttattggtaaagattacaaagatgtgcatttttatgacaactttaggtctcacataggtagccaaccatctgctccaggatgaagcatgtgcctgtttatcctcttctttggtaacgctaggtatatgtgtgcacacgtgcacgtgtgcgtgtgtgtttgtgtatgtgcgtaccactttattctcccacccagcctcttctcctgttttgtttagtttcattttcctcctctcacccccattgcaggaaacaaacactggctctctgtcctcccttaggtcttccttccgttcaaggggatcaggtgggtgggaaaatgttgtgcaggaatgccaggcctctgcccgaagccgggcttctgtttcatctcattattgaacagaagtcgctttttgtttctttgccttggtcacaaacaagcgcccagtcctctcttctttcttcctgccatttttcccagaatccatgtgggatgggaacagaggcagcgtatttagggactgtcggttgcttgatacccatggccttgtttagagaagctgcacccactgccccaacgtgtagctgcatctgatttgtttttgcaagtcctaatgaagggacctggatgaagttagtgaggttgccgttcctggggttaatgcagagtggcccatggagcttagccacccttcatgcagaaggtggggctgagggcagccagtgtgactgaggctcgctggcccaccctgagctgcttgtgcccatggggcccctggggaggagggcccagctgcagtgcgcatacatctgcccttggcagcagatctgtgaacccaggctgccattctggatttccggatagatgcaaagtgcttggacgtgttttagcagctgctgagaccaggagttgggcttagtagtaaaaagggggaacaaaataaaagaagatcaggagacaaagagcctacagtacaaaaaaggaaagacgaaggttgatattattagaaatacttcctgggcagccttactgtttgaattaggatcacccccacccccacctcccagaggtattagttgtaatgcagagacaaatggaaactagtcagatccttgggtcctagaaaagaccagctttgttcctggggtggtaacctagtacaacgtttccgttcctatttcttgacctctgaatggccccttctgctttgctaagtagatgatattattaggtgcttagactattcttcagataggatgtaaggatatatttttgttctcttcctcagtgaacttgaaatgattggattattttgtaatacgtcgatactacttttagaagcttttgaataactgtgtcaaagaagctttagaagaggttttaagcaggattgcagagaatgtactgagtgtgtttttccactcacaaggaaagacagcagctgaatgcagaagtgtgtgtctggttctaactctttatcacttcagggactgtccaggcagcaccatccgttgggtctcctgcccttcctcctcccacccctgccttacccctggccattcttttgtgaccagtagtcctttatgaatggaattctgagaatgtataattttctcagaagaatgcttctttagctcaccaaatatttcttgtttgctgaggggggaaaaagatcctccttggaaaagtcactgggtgccaaaggtgggtgatgaggagagatgaacttctgggtgtgcctagcaaagctgtttctgttgataggcgattaacaaaacagccaaacttgacctaacagactgccattttgagaggaatttgttttgcaggattaattggcttcgaggtgtactggtggctgtgcagtgatgacggctgtcgtgcctcctgtgtcttctgctcattgtgatgcagggcaagtgcttaggcctcagacacaggctccctgaacttcgtgttcagtgctttagggtggggggacttgagacccttgacttgactcggtcccactggaaagcttctgttgcttatttgggtaaccccaactctatcttattgggcagtagtgttatcctaattcttggaaatactcagtgtagaataaagagctgatgaaaatgtgtaagaagggagtaagtggtcattagagagaaatggtaattgggatgatgctctgaccccttcagcaaaaaataaaaggtgaatggtttattatgagctagttcagattctgtttttggaaatgagcttggttatacatagtgcatttgaaaagcgtgaagcatggactttcagatgccagctcctcagcctcctgtaactccagtcgcaaaatccctccagtgtatctaaataaatgcaaactcatcagtgccttaccattataaagctgggctggagaggcaggtggcctggagaatcaaatgacaagaagtatagggagcagcccagcttcatgatcgggggaatttgcatgaaaattgtgtacacttaagcaccattgtctattgcagaaagcacgatctggcctcttctactgactttccttccagctctgagattcagttttgaagacaaggttgttggggacctcggatagatctgttggccgtggctttcagtaaacactactagagactgaggacatgttctagacttggaatggtatgaagcagtcgaactttttaggatgggccctacccttagggactgcctacgaaactagatctagaagaggaggctgtggacattaggaggtggctgcaattgggaagttccagagagcttactgagggataacggatgtaggacaggaggctggcaaagcacctcagtgatagggcagaaggaaataaagtggttagggaaggagttgagagcaggaaattcaggtaggattgatgttaagtcttagatctttgaagtgactttctctggtctggcttttgctgttaccaaagtgaattattcataagtgcatatgagaaatgctgatgtaactcgattatgtggaatgaatttaaattcatttaagtcattcttttccactaaagtaagctttccctcatccagaatctgagcagcccgatagccaagcaggagtttccttgtgccatggccagtgattgatgtcttcttctatgatgctgctgaaatgctggggactctgaagcgcagctggagtgatcaaagcaaaattaaaatactttctcagtggtttgggagttgggtgcgttctgctgtattttttggttttcggcatctgggtttggtgtgcatgcatggtgagctctagctggagcagacgttacctactgaggctacgctcttcgtggtttctccttaaccatcacccacttgatcttccatgaagccccccaaatcttccttactgaggactcttgcttccaggttgcttttgtgctcatccattgctgggttatttggtcagtgatgatggtttctctgtactttttatcagtaggttcagaggaccttgtttactcctcattcatctctctccccaaacagttgagaaaccacttgtgggttaggactcatgctttgtttataatgtttgattctccaacctcacagctaatgggaagcccgtggaggagatactctgtaaaaatccatctcccatgtgggcttgaccccacttagtgtctgagtggtttggtcctcatagttctcttgggggaggaggaagggaaggaggaggaggtggcgatggcagtggcagcagtggtggcatcttggaccagagtgagaaatcttggaccagagacaaaagaggtcttctctcagggtagtgcaccatgagagggagcacctgtttacattttgtatcctggacaccaatcttgccttgctctggtgctggccctgagaggtgcaggaattttataaagagatttacaaaacatttttggatgaccaaattggtccctggttctagctggaatgaataaacaaactaaataacagtagagtgtgagagtaagtgtgtgtgctagagaatgtgtgcacatgtatggcctaggtgagttcttcactttgctgacttgtgaattatttggggtcctatggtcctccccatcattcttattcatgtcagtccaccatcattaaggaagtggaagcgaacacattgtgtacatatcactcccatagagagggagactggggaagaggtttgagttataagtcgcacctaggttaggtctggatgtgtctttgcaggtttccttgctagttccttggccagagtttccatcgtgtccctcagctgcacaattaaggtgcccccgttttgtgcaagtctcatgctaggcagtatgagatgacacaaactaggattctgttgtgagataagataaaaacacttgacatttaaaagagagagacaacttatgcggtgtgacgagacactctacgacttttgccagaagagaaatagaggcaacaagtgctaggagctcagaggagggtaagttccacatttggaactttggattaaaagaatatttgggtctggttgaaatcgaggcctttcatgagaaatgtccacacttgctcagtactgtttgccgaacactgtatacaaggccctcgactcgtgaatgagttgtaatgcaaaactttgccaggcatttggaatgtggagtatactattttgtaaagatgaggtctgaatggtggtttaggtcccaggccagtgtccctctgccccccacctccatatgtgccctcaagccggtttggcttagacattatttatctctgactactgtgtacagcttagttccatggggaggaaaaggcttgatgaaccctaccctggaaggctggtggctctgttttctgatggatgaggtaggagtggtggaaagctggtagtttctactttgtgcctgtttaaaaagccccctctgaggccttagcacttaacagatgttcaggattgggggaataaaggagctgcctttgcagaggtctgtgggcatgcagtgggtgagagagcaggcactgagtgccccgagtttcctgcctgtgtgggcaggaggattctcagtggaatcaggagcatctccgcctggtgctggaggaggtgtggagttgaaggtgggattcttcctcttgaaggacttgaatgagtttctgtgtggctgaacagaaactggttcaacacccatgtcatgatttttgtgaagcgaggacttggggtcccaagtctaggttttaggttccctgctgtaacccgtggccaccgagagagagttttatgataaaatgtcagcaaagtacctgacaacgtctcacgctagaatgagtttcgtacatgtttagttccctctctttttattccacgctcccccaccccaactttaaatcagaaacgtgagggtgctgattgaagctttttataacttttcttattgagaattgttctctggagttgtctccaagaacaaaggaattccagacgttctccttctctccttgtctcttctgtcctccagtcaaagaaaaactctgcatatgatctttggcctggagaaatattaaatctatgttaagtatgcagacatgaatgggcaaatgaaggatttgtggcaaagaagatctgccgaaacaaataagtcatgtaaatgggcagagggaaatattaaattgattgcatctttcagctcctggtacttaatgcaaagataaagtagtgggaaaaggttgtcatttgaaataatggaaagatgagggagttttgaagctagctgggatttttctgcctgttaatagagtgacttggattacagactataaagataaagagtagggccgttgcatttagtatggatcatgatgctgattgctgtctgagcaacctctgtactaagggaggagaagctaacatccccgggcctggaagatactggatactagctcattaaactcttgtgagaagccttcattagcattatgggaagacttgctgtatctatattatgaaggcatttagattttttttaaaatgcatgttcttaacattttttgtttattaagtggggcagtagattaggactgaatggatttgattctctcatcctacatagtgtgcccagaagccagaaggtttcccagaatttgtattatggcagcgagggcaaatttaattagcagataggaaaagctttggagcagtttaggccaatccatttaattgtatcagcaattaatattttgagaaaatggaaataattaaatttacatttcttctaggactttattttgttatcctttaaggttattgtaaatgaggagacttttgaactcacagactaaagcaaactacaccagataatcattaactttttctattgtgtgccacccttcccaaccagattgttccatagtatcacttatgaaccaagaacctgtgagcttgcaaaacgcatttttaaggagtctcaacttttctgatttgtgttaaagtttaggtgtgggtcccagaaatgagtttcatggaggggagagcttgtctctctgggtgggtaatacaggggccactgggggctcactgtggctttctggcacagacagttatgaagcaggggttactaaagtgggagagagcagccagttctccagcagccccagtgagagctctcatggatctgcctattgcactggggtaggagccatcaccgtcagcttttctctggcccacagtgccattttctgattaagctgagacctctgtaatagacacgttgtcattttttcttgtgtctaaaagtttgcttgactgcagtgggtctccagctcagagcaggtctggctagagaaaacaggaggtgatgactggagcactttgcccttatggaacgtgctctgatgtagaaagcaagaggattttccttgcagtcactgaaggtaccttgtgtacacagaaagaagacagagggagccccggatgcctcggtatccctcagagccggatccttcagacctgtgcagtacctgtggatttggttagtcgatgatgcgctgccattaaaacaaaggcatcggccctggaatagagaagttcagtgagaacctctgtactccatgggcattttctaggaaataatttcacctgccctgtgtaattctctggaagaatcacagtgagttggaaggaaacttaagacttggaaaaggattgagaggttagcccagaccacaccagggctctgaaggcccagctggggttagaacctgggacaccctccagcccactgtctcctgttccctggccatttactgccccactcccctttctactctcaggggccctggatctaatgaggggattcgtgcagtttgctgcactaatacattgcaagtggtgccaacctaaaggtattctgatggtggaatcagagcagtagcatcttattaggtcagaatctgtatctcctcttccaagatttttacatgatttagtgttttctgaattggaaaaaaacaaaaacaaaaacacacaaaaaaaccatgtctaaatcctagcatttcatcccatgttgatgaaagggcatcttttttttcccctaatctgtggttagaactctcagaaacttttagaagatccctcctatgttttggaggtttgcagatttgaaccccagttcctcccacagtgcttctccaactcctggaatgaggtaaacctccaggcagcctgttgacccaacccatgcatgccggtctttgggactcctagatgtggaccctggagtgaatagggatcaggtgggaaatgagttcctttgatgaagatccttgtaccagtgaactgaccccactccccgtctggattcctgtggtgattaccctctgtattagtctgttttcatgctgctgataaagacgtacccaagactgtgaagaaaaagaggttttaattggacttacaattccacatggctggggaggcctcagaatcatggcaggaggcaaaaggtacttcttacatggtggcagcaagagaaaatgtggaagaagcaaaagtggaaaccctgataaacccatcagatctcgtcagacttattcactatcatgagaatagcacaggaaagaccagccctcatgattcaattacctcacctgggtccttcccataacacatgaaaattctgggagacacaattcaagttgagatttgggcggggacacagccaaatcatatcaccctcttagcaaggactgtgttcgtgatcatgactggcattcactgaacaatgactaggtgccaggcacctcgccagtattctttaatctttgcacagtctgtagggtggatatggatattactgttccattttttgtggaagaggaaatggaggcaagagacctgattataacttgtgcaaggtgccatgcagctaagcagccagcccaaatccagacctgctttcctatgattttcctgcccattactctcccatcgtagctcacctaatacttcctagtgggctgctgctgaacacacacccagggatgacttagtggcttgtcttgctctgaagaaggctaggcaccatgttggatgagttcttgaagatgtcttgctctagtcaagaaacttttaaatctttggagtttttgtccacatctgcctagttcttagtaaacatgatgtgggttctattagcatggcgccctccctcccttcctaccacctttatatgagcggagaacatctatgactcttatgagaaaggaaagatgaaaatcagagtgacatagtatagttaaattgcagatgcttaattataaaacagcttgtttctgaattttaattccttgcttttctctgactttttaaattcccctccttaggcagaattcatttttacattgatgattttttttttttttttttttttttgagatagagtcttgctcttgtcaccccggctggagtgcaatggtgtgatcttggctcactgcaacttccgcctcccgggttcaggcaattctcctgcctcagcctcctgagtagctgggattacaggcatctgtcaccatgcccggctaattttttgtatttttagtagagatggggtttcaccatgttggccaggcaggtctcgaactcctgacctcaggtgatccacccaccttggcctcccaaagtgctgggattctaggtgtgagccgccacacctggcctgatgaattattttcatgtgtggaacaaaactttgatgctgatcagtgattaggtacctttgtttggttcatttttaactaaggagatttctttctttttaaaaccattctttaatcttgtaaaaatatcatttaatgggtggatgttttagctgtgatgaatgacaggttgtcgtaaaggaagaaaggtatgtggtttccagtaaacttttaattcttttgcaaaataaaaataacagtcgtacagagagtaaaatatatgaagagtcaggaagtgatttatcaaaatcagatcttggactgctggttttaccatgaattaggctcttggaaagtgattgggccagtgtaggtttacattttttttttcttgttttatttgtcaaagcaaacttgtggttgcctgcccgtagtttaattctgcctcctttgggcaaacaaccgacttttactgggagtctttctcagggagataaaggtgcaccctgaaactctgctctctgattcctcagcaaagtcagtcctgagtatggggcttgggtgtctctgcaaggccttgcaagtgagatgggctgtcacctgagctcaggtggggctgctcctgccttggacagcctccccagcttctcctgcattatacccaggggctggagggcagagagcaggtcttcttctgctggtcggggcagtcacaggctttcctctcggcctgcttgtcctccgggtgggtccagcacccgctgggattcctgtgggcttagtcactgtgtggcggcggcagaaggactggggaaaccgccggccggccctggtgcgctgtcaccccgaaggaatgcgggccaggccggggctgctgggcctggaaagttctccagtccctgttgcggatctggcctgccgactcaaagtaaatctctcttcccctttatttcccatcaaataaaaaaggaacacgaggtagccactgtactcactgaagatgcattgttttttttttttttttttttttttaagcgagcagcagcaagatttattgtgaagagtgaaagaacaaagcttccacagcatggaaagggacccaagcgggttgccctgaagatgcattttttaacttgctttttaactaagtatttttgctctgagctttcctggatctgtaaacacacccccagctattcaagatgggcttcttggtgaaaagtgatgtgtcctaggagaaatcacgcctgttgttgccgctggccatcacagatcccggtgcctgtctgtgaaaggctggccgggctgggtggggatgagaatggtcgggttgtctagactcagcctggactgtctttgactggaggggcctgagctcctcctccactgctcaagaccccggttaaggggacagcagagcagggatgagaagtggccctcttcacatcacctcccagcaagagggcctgacttagtgctcccaccattgccagccccagtttcagggtcccactcagttgtatttgaataggtctcatgacatgtgctttgcttgaagagcggctattagcagcagacgttcaagaggctgagctcaagcaggtgagcatgttctgagccattgtgaacccagtgaggtgcctatgctgatgcccagggccgcctgggcggggtcaggcccccatcgcttcttcatcctagctctgggagtgcattctgcactctcccgaggccagctggtggcctttggtgatcaccctctctgtaagtttttaagtggcttcctttcctctggtggagaagccagcacctttatcctatgacaagaaagctctttgtagtaggtggtagtagaatcagacagatctggcttaaaatcttggctgtgctacctcttggctctgcacattggtgaagagaatttaccttcctaaggcctctcagctacacgactgtggacactcagcttccttctaaggtcgttgtgagaggtaaagaaaaggggttagtccagggccagacatggcacaatgcctcaatgaaatattagctgatactatcgtaatttttaaattcccataggactcactgttaaaggattacaaggctgacacaaaaaatactgcattttgaatttgtgtctgatttatacatttccaaagagtggaattctcactacaacagctgttctttgaaaggttagatctttgttctgagataaattaagtggaaaaaggtgtagagcattatatgtactctgattcttcagggcttaatttaaaaagagcatgtttgctggtgaatgctggttcaatcattaagaagtttttgagaaggaatcccagaaagtaataagcacttatttttcatggaaaggaaccggaagtgcttggtgacctccacaggtaatcttgtattatttttgcactgtttggaattttttaaccatgtgcttttatttcttctattcttttcaaaggtcagtaggtgttatctggacaatagggttctggtctgttttctgttttcttcattgtactgtgcattaagaaaaaccctaatgtgcttttttttttttttaagtgaacctttccacatctcattgtccttcagtgagagcaggctgtgtgtgtggtcttggtgaactgtcccgttccctggagacagtatctgggggcctccctgcccttcccagtaagagctgggccttcacaggaatagaggcctaggattcgccttcatcctcttgaagagccctaacagtaggtcctggctggggtctggcatagaatgcccttggcacgatgtgtgtgagtgtgtctttccttagtaaatggccttgaaaatgccatgtgcttctggcaggcctggataaggtttgccctgcataacccttggaaagcacagttctcacttgtaacaccctgtctgcaggtccatgatattgtaattaaaaagttatgggatcacaagggcctatttaaagggcatctggtctaaaggcacagttaaaagcagaatttgtgtcagtggctcccttaatttctcaaatatggttctgtttctaaattcatcccactggatgtctgtgttgagttttctgttgatgaaagaatgtttaaaaatgaggcagatccaaattctaatgtctgagtgtaccactgcttaattactttgggcaggtcacctcacctctcttggaaagaaaggtgatatactacatctgtgattttcaatttttttttttttaactagacccacagtaaaacatagatatacaccatgatcccaggacagaataagtatataactaaaataagtgttttgaaatcacttcttgtctgacacagcactcacgctttctattcatgtagtaccacgatactttcttctattctaatgctggtaagagatgccttaaactgattttgagaactaccaatgggtagcagctagcggcttaaaaaggatgttattaaggtccttttcaccctgattttgactctgttggctctcagctgagtgccccatacttagtgcacatagagttggcctctgaggtcagcctcctgttttcctgtgaaaatgaggatggaagagagtcacttgtttccctccttcatggctaccccctgaggactgggaagaatttaagaatttgagtatatgttcccaatagcatgatgtgtttcattgttcatctgtaagcatttttaaatattcgagatctgtatcttgggtaatttttatcaactttttatttgtaaaataatttcaagtcagttattaaagtaacaaaaataatggcaaacttgataccttcccgtatttttttttcatatttttccttgaatgcttacaaaaatattaaagaatattatcacatcattgtagtcaccgatgaattattttctggtggcttatgattagaagagcttgactcggagtggaaacagataacatttgagtgctctttctgttaattcatccttgtcaataaccccattagctaacttccagcaaggctgtgttaggaatgtggaatcaattagatgaattttgaaaataacttggtctgttctaaaaggccctatgagattcaaactgttgtggcctggtgcctggtaactttgatggccattttgaaatgttaccgtagtgataattcttctggaatctcaagtcattaaaagtgatatggctaactctgggccctgtgctataaaaatagatgtcatgggatgtgtgaatcctttcttcagtgttatagttaatagcaactgaaggaacgttttggtcaaatcccgaatacttattaggggctcactgcttggctgcatttttctcctctgcgtaaatcatctatccatgtaattattaacccctaagaatgaatagcatttttaaaagggttccattttcccctcatatgactttggttcattctcctccttgtttctgtctctcagtgaactttccaaaagatgggttatgatgaaagatgaatcgtcgttgataactgctcttacttatctgtgtatcgaaactgcaggtagtgctcttcagctctgtggctggatttagtgcctcttctagggaggggtgggtgttggcacaaagcgtatcccatttccctgaatgtcgtgtggacacgtgagaggacagtgcaccctttgggcttggtgctgcccccttcacgctactgaaccccagggtcataattaaaagctgtgttagctcttctctggttagaggcatacaggttggaggcttgtacatagacgtgagccggttggtctaggccaggaagcaaaccattggaaaatgtggttagcagtgacagttgacagcatgtttgcctgcagtagtggtggttggtgctgcgtgttgactggagttgcttgcattgggagagcctgacttggccaagtgtgtagcttgagaccagttggattcctctcacagagacagtcttcacccccaagctctgggtgttgggcgtgcagcattcgtattcagcaaacatttgctgatttccgcctctgcaactactgagctcagctttggggatctgaagatgaatagacacagccacacttctggggaaatctccctgtggggaggctgacatggaaaccaaccaaatgggagtgtggtgcatatcttattagagctttgtgcaaagtgccacaggaagcaggagaaggggtagattggtgtggagggggcaggggaagacttgcctaggagcagggcctcgcaggatgcagaggagtttgccaagtaccagagattgtggggtaggtgaataaaggctgagtataaggataagtcaattcaggcagatgtcctctaagaatgaaggtgagaatgctggcggaaaccagttgtggccctgtctgccttccctaggagactggacctgactttacaggcagtgacggtgaagcagggcagtgccacgagcagatctgtgtttcctgaagggtctctggcagctgtctggggaaggagggaagctggcagagccgtgggtggaggcagatgccattgctatggagtgagcatggggaagggggtcggaggccttttggagatagatacagcaagacttggtgaaggatgaagttggggcaggtagaggaaaagcaatgagcttacggatgactggagactgactggagaagatgaccacccttgccattaactaggataggaaacaacaaagggtaggagtttgacaggggagaatgtttgtgctgttgagttgttgagtttaggtgcttgtggcacgagcaaggggagtgagctggtctaggaggtttttggaaacactgacctggctgcagagagggagatcctgggacacctgttttgggagttatcccagtggggaaggatcactgggaagggggccacccctttgggaggggtcagtgggacgactcccaagggaagaggttggttatagggagttaaaagaaaggagcacccctcacgcgagcccatttttcaaggatacatgtttgtcttttagattctataaggagtagctgctacacagaaagatgtctacgtgtgggtgaacacctggcgtatcccatgcagggaggcttcagcagaccttggtggcgatggaaccaccacagtgatccgaggattgggtctgaaggctcctccgagtctccaataaaaggggttgttttgaagggctcaggttcttcctgggcttttttgggacagtcttgctctgttgcccaggctggagtgcagtagaggcaatcatggcttattgcagcctcagcctcctgcctctgggctcaagtgatccttctgcctcagcctcctgcgtggttgggactataggtgcatacccccatgcctggctaatttttaatagagatggggtcttgggctcaagttatcctcccacctcagtctcccaaagcgctaggattacagacatgagccactgtacctggctgagaaggtttttttttttttcccccttccaaacccccatgtggtccagacgaggccagaggatctcaggggaattccctctccgaggagcctccactgctattgcatggcccccagcatagtcatttgagtgaagagccctccaaaatcattaagctgatttgtagaatcagtttgctgtctgactacctgatgaagatgagaagtggtagacctccccccactgtaaggtcttaacaagatctaggtggaacatgggactgtttgcaagctacttctgtttctgaaatcacatgcttgggatcccaaataatctactgaaagctgtcttcgggaggcaaagcccagggatttgttttgtttgcccctaatcatctcttccatcccctttctcaaaagtcttatatctagataatttagtacatttgatctactaacagccagggccataacaggagctgatattacataccccggaagtcctttgcaaacacactgtagtggcgattgattagtgttccgagccataggtaacattagcctgcctcgtaggaccctcagatgctgaccgtatctgctgcaattcttagatgtaaaagagcgcgcatcgtataaatcaaaactagatgattattttcatttgaaattgttgttgcactgtaatttctcagggttttgtattttccaacagtggtgtcacttaatgggaagatcgctcaggctttgtaactgggcataataccaggtattctcgtttaggcattctgctcagtagtattaacctgaagccataggacatgccaatgtttttttccgtgttttttaaaaaaattaaaatggttggctacaaatgcatccttttttacttcagagtaagtcggccttggttaagtcttaatatttctcatgcctatttttttttcttcaaatgaaaacatacggagagaaaatagcatgtttatgccttttggttgtacccagcactgcccagaatggcttacagagtttatacccatggaggtttcgtaaaggtgacattaacttcgcagtaaagtcactgaccccgaacctgtgtcacttcaggcttagccaaatgctaacagagcagctcaaagcttaagcagaggtatgtgcttgctaagtaagtgtgtgttttggactaattggtgactaccattctgaacattaactgccctttgtgttttaatgttgccaggaggccgattgtgtaacctttggaggcttccctgagtttggagaactgaattcatgtggtgacttcctatttataatgtctttgggggagctatgaaataacttttcttctaagtgtgatttttgcttttttaaaagtttttatgttgttgtcaattgggtatttcccttctatgccaagacgaattgtaggttcaggtttctatgcagcctgtatgtaaacactggccctaaagaaggactctatcactctactttcagtttcttgcattaaaacaagtatgggtagcggtatccttcttatttctgcttcctggtcctgtgtgagaccctgaaaggtcctaatggcagtgctgattagattgtggccagggttcacccacaagttccgaagctggggaaggtggaagtgctgttaactgacttgtcccatgtctggggttttgcagcctggggagaggtgaccacccctcgtttcagtccaggtagggttttatgtccctgtcaaaaatgtgttgtgtgaagtaccttgactttcatttcccagggaagaaagcccgtttcaattggctcaagcggaaaagagcactgtgggtccacttaatggaagagtctaagagtggcttcaggaagtccactgggggctccccgtgactctgcccacctgcatattgtcttcattctaaggatccatgtggtagcaaaagggttgttacaactttaaccctgcatccccaccttcaggttcagtacccaagggtgagcaatctgttccagtggcacagacctgtttcaagaggtctctagccgtgatagtgctaggccactgccctccaccagtgtgttccagagaaagatgctctgatgtgccagcccaggccatgaggttcccggcctcagtaaggaagaaggaggacaaggtggtcccttaggagaaaatgtggatattcaagaaagagggtcgcaaaatagcaaacacccactatggctgggcagtacagggttgcagaaatatattttgatgtgtgatcgcattggagctacttcaaagagcaaacacaccactttgatttatttctcttagtgatacagtatttagagagggagatactttttatcttcatgggatacttacagtggtgctctagaagccatgtactgcttctggcttctccttcctttcctccaaggctcctcctgcctcctcccaaagctctgtgccctgaaagagccttgagccattgctcagatgtcaaaattgtattaagcagacacatcaaattaaaacttttgggatcactcaccaatatggtttcctgtacagtactgccctgaggggggattacaagtagttatgcatccatttcattgatgtatcatttttattaaaaagaaaaacaatccaaccaagagaggaagtgtagccagctgcctaaagagtggcgatgatgggagatgatattttgattacattaatccatatcctgttagttcactttgcttctgtcgctgctgctggtgaagttactaatgtgaactaattacatttgctctgaaaagccagaatttttaatgcatctcagcaagaaaggttaatattatcaatttaacagcatgaatgaaacattgtgtgtattgaacttgaactgtcctaaaagcttggataataaaaacccagtggcttcttttataactcactggataaacagttattggtgagacatggataaggctttcttctctttcagttttatggggggtggtaggcagtcagcattagatgctgtctgtttacagggtgatatcgtaacttcgtgaaattggaggccacatttaaaaaggcactccttccttttaaaagctttgcaagggggctgcatatattttcctaattagtgggaatattttcttttttctttttttttttttttttttgagacagagtttcactttattgtccaggctggagtggagtggcatgatctcggcttactgcaacctctgcctcccgggttcaagcaattctcatgcctcggcctcctgattagctgggattacaggcatctgccacctcacctggctgattttttgtattttagtagagacgacgtttcaccatgttgcccaggctggtcttgaactcttaagctcaggcaatccgcctatctcgggctcccaaagtgctaggattacaggcgtgagccaccgagcctggctggtgggagtattttcaaagagaacaacaattcaccacaccccaacatggtaacagtctttttgttttagaagcatctgtgaattgccaagactcgtagaactaagatgtattcaaagtcagtcgattttctggaaacgacccagtccctgaagatagtcttttggggagttgagtgttttgagagggacaccccctctacagggacttaaaatggaatggctttttgtgtgtgcacatggtacctgcagtgatttcttgtgtttaattacttcctgcactcatctgacttacacagtggtaaacaatgaggatgggaacaggcggcagctgctctgtgccatccaccgtcttgggaaccccagcgtggcattctctctggggcagcatgttgaagtgtttggctggtgacattttggtgaccagttggctcctcattgtctttcaatgtggagattaggaaccgagcgaggatttggaacccttgcgtttgttctgccaagaacatgacttgcctctggcctgagagcagtggagtaagctgataggagctagaaatactgttttgggtaggacttacccaaaagagtgggctgagtcacagaactcccaagtttgagccctgtcaaataaattctgaattgttctcaggtatgtttctcaattggaatttttttaaaaatttaatttaaaaaagacttcgaaaagttaccttgttctcatttttcttctccctctttgccccgtccccacaatatcttagggcgaagaaaagcaggtttgagaaaagctttttttcatcatgtatttgtaatagctggagcctgctgagatgatgaggtggagtggagggagaaagagaccttgaggaggtgtggagggggaaggggtggaaagttctgtcgtcttctgtgcctctctctctctcttgctcagggtctccagtcagccctctgggtttgtgcccttcgtgctgcactgacaggtcaaagccgactcaggcctttgatgtctgctctaggagcaaaagtgattcctggtcccgcagccgtttccactgccttgtgtatgaaggtctgctgctctgaggtggatggtggctctaggcaggctgtttccgctgggtgcggttgttgctgcaggtttttctatatagcttggtcatgctcctgtatctagattaaaatcctatgacagatgggcctgcttatatctaaacttattcagagagtcttatgataggcaacaggttaccctttaccggggtaaaacatggtttattctacagtttggtcccgttgtaaggccaggagatagagtctcactagtttgccccggctgaactcaaactgctggactcaagggatccttccgactcagcctcccaattagctgggactgttggtgtcaggcacacaccaccttgcctagcttgaagatctttcttctaaatgagcgggctttaaagtgatcagtgggacctgggcaggttggctcttgcctataatccaagtgctttgagagaccgagacaggaacatcacttgagcccaggagttcgaggctaaagtgagctgtgagcacaccagtgcaccccagcctgggcaacagagtgagactctgccccaaagcaagataaaattatcccacaggattttagtcctgacttgtgtattactatgcagttgtgtctgtgtgaggctcagattcccccccatttaggatttgtgtggctaaatctcagatctcattttcaggtgaatttctctattaaggttataaaagaccaaaataactggaaattcaactctgtacttgaatacttggtaatgcccagcattctcttgactatcccatttcacagtttgccggtcatttccccagtgtactcactggattcttcccgcagccatgaaaggtaggtataattaactccagtttacattcaggacaatagaatgttcgtcaaaatgcttttgcacatgttttctcaccctgagtggctacacttgtacagtcataccctccaaactctaagatgtatactcttacataccaaaacacaaagaaacaacaggaagtaagaacaaaactcaagaggtctgagtgacatcttgccttgcttcacaacttcagagtttgcattgctttaaaaacattggttataagtgagtgtggaaacagtgtgttcactatttttatgctgtggctgtgctgtgcaggagctgggcttttcgtgcattttagacagaattgaccttggttaatgcttgacttgggaactatgcagaaacatccaggaagtggtggtggctgatcctgaccgtcctcagttttgtgaagcaacagcctctgtgcctctttctctgcatgctctgttgacggtctagtcttgagagagaacctgctgctgtcccgtctgtcgtagccttcctagcaactcttaggcctgcatgctgtgttttcatgatctcccccaaagcggcactttgatgttttttcagagtcaaagtatcactgtggatatttatcccaaacaaaattgcaaactgatcaaatgttatgtcttttgataccaaatcaaaaacgattcttggtggctgatcaggttgtctcctaaaaatttgccttttgaacctatactgcctttatgagatgattatgaaagtagaaaatagcctgtgaaaaatggtacctttgctaaaaagaaaaaaaaattttttttgaaactaagagtctctgttgtccaggctggagtgcagtggcactatcttggctcactgcaacctctgcctcccaggttcaagtctcccgagtagctggaactgcaggtgcacgccaccacatgtggctaattttcatatttttagtagagatggggtttcaccatgttgcccaggctgttctcgaattcctgagctcaagcagtctgcccaccttggcttccgaaggggctgggattacaggcctgagccaccgcgcctggcctgctgtaagaaaatattaaacttaggatgggaaatgtgatctgaacaggattcctgtgaaggtacccagtgtaggtcttagtctcctctccagtgtacatttatggaggggcaagatttcaccattctgtgaagaactctgcgtgttgacgactgctcacgcctagggaataaatttcagagcatgcgtagatagtgccattttctacttaaaatactataatccattatttacttcggaaaataaaagcattaaggctgaaagttttgggttagtaatcttgatgttttaaaatgccttagcattccttcatttgttttgcttgccacgtggttttgctctgatttacacacctctgtgcatggctaatccactgtgccactcttggggctttattaactcttctctgccagtttttcccttagagaatatcatggccattctctaagatgataaatgggactaagagtaaatgcaggctgaaaaagcatttaacaggtcaaggatctgaagcttttaagaaggcaaaacaataaataagaaacccaaacagagtcttgaagcacacccatcgaaacccaagtttcagaatttgctgcagccttgctgccaaatcacagtaaaagctgaaaaggcttttgtggttagttacgtgtgatacaagaaatcgatgtgtctgagagaagtaggatttctctttttgagggggaaaaatacagcaaggggaaatgttttattaacaataaatatgcggcttaccatatctgtagggcacagatttggttagtagtattttgaaggcaggataaaggaagatcctaaaatctctgtgctgtgtagcttccattcgagctgcacatgttaaaaacattctaggatccacacagtttaaacaaggtggctggcttaggaaatgcttctccccattccttggcatccccacaaccctattctcctactttctcttatgtatctggactggcttttaaaagatatttagtgaaatttaattttctagggaaactccactttgtcaaaagtgtagtattcctcaaggatagctttgctggtcggcaaatctcagttgagtgtatttgtggtttaaaaaaaattctttctgaatagaaatacaaagagtgataatgtttaacattttattttttaaaaagctttacgctgtgtaaattgtgggttgacttcatgtttctaaactttgtcttttagaatgactctcttgggtaaattattagcagacactctcgtgttgacatgtccattttcctttccattaagctgtctccattgcagttctgttgatatggctttatatagttttcctgagcttttttttttttttttttttttttttgggaacaagatacctatgcaagctgaaaaactcttggctttttagtttgtatcacttccagaaacttttaaatgctacgtatagaagtggctttcttttagggttaggtaagatacttccttttttggaaatagttttgccatttggtctcgctgcctgatttgtgctttttcttcttcagcaggtagtgggaggctgtgtattgtattgccttttaccagacacccagaggggtcatgttggaaaatagcatcctcttagcaaaaacacaatcccttctctgagaataaattgccaagtctttccaggtcattgatggactctcaggtgctgcatttctgcacgtcggggaacaagggtgaagaacagagctagtccagcactgctccgtcctcccgcatttcttcttctgtagagtcttttgcaaactagagagtcttgcagagagttgttgggttttcccaggagatactgtatgcaaagaattgtcatgaagacataaaatcaagtcttggtgtaaaacttttaataaatttaaaggcatgtctctgtttttctcctcctctatggggattttcatgtggttagtaataaaactgtaggcagttgtatgtctagatttctatgtaatttgtttgtgttcgtatatgcacacctgtatacatgtgcacatgtattcaagaaagacctgcagtatgcttgaaaggattgaggtgcctagtttgtggtagtagctgaacagagtgggaggtcaaagttaagtcattgtgaggcaagggaacttgacttagccctttaagaattggtctgtccctgctaagccaaggctattagtgttttcttccctagctgtgttctgaaatggttcacctgacattcagctgggttgggggagaacctctttaaacatcagatcttattccggaggagtgtatccagccttctcacagcatatcctgttaaatatctgttcaaggttagcctaggcctggagtatggacagcatgaagccagatctaaaacagatcagttcatggataaatgatgaatttaataaaatttgaaaataaaccccacataactagtgctgctattgatcattcatatagccagcaggagtggtgagaggcttggtctgcctgaggtgtggagatgcttgtggcggggggcaaggtggacgagggctggggctgctcctggagcatctttacgcgggtggaggagctctgacacagtggcagtgtttgtaacactttccaaagggattaaaataattctgtagagttaaccctaggctagtgtggcttgatctgaaacagtcccagccagaaggtaagaactcctgtgttatgttgttagcatacaatttgctgaagttcacattttaaattttatatttaaaaaccaaaaagtagtactgatcattttggactgtttcaaagtgatattgtttttacttgttacaaacattggcttgcctgcatctaattgcactcacaatgggccggatgtggtggcttacacctgtaatcctagcactttgggaggctgaggcgggtggatcacctgaggtcagaagtttgacaccaacatggtgaaaccccgtctctactaaaaatacaagaattagccaggcttggtggtgggtgcctgtaatcccagcttctcgggaggctgagacaggagaatcacttgaacctgggaggaggaggttgcagtgagccaagattgtgtcattgcactccagcgagtgcagtgtaaatcccttaaggaaacagtgtgttgtggtaatcgtgatatcatagtaaataggttttgttcgttatttttttcttttacttccttttctaccagtgactagtcctaatgtgttctaacttttgaaaataaagtacaaattagatggatttaaacatacgggaagtaagacggaaattcattacttttaaaaaacaatttgttgtggataagatttagaaatggaaacacaataaactgtgtttccatgacacaggtatactaccaagttcttacaatgtacctttgaggtaacgaattttcatgtcatttggagtagggctgggccagtgagtcactcatctccttgttcattcattacgtgaatacctagtaaatgcccactaggcaccctggagtcatttgtgtagagtggcatctctatacaactgttcgactaactgtcggagacaccctaatcaccccagccacaaacaaatagaacattgtatgtgtgctgaatcccacaaaggccagacatgatgccatgagaccaagaaggaaaagaaataatgtggaaagggtttggggtggaaaggtggggaacctggaggcgggccacatggggccccagaagccatgttgagggttttgtcttcaccaaaggatcagtgggagattagtgtagaacattaaacagaggtggggtatgtgtcatatttccattaaaaaattcatcctggccacagtgtaaagaatagattagggaggaagccaatcaggaagcaattggagtaggcaatgcaaaaggcaaagtgaacttggactagtggtggagataagttgactgcagagagagtaggaagtaaaattggccaggcctgtgttgggggtgggcttgtgagcaggatatcaaagataatgtccaggattctggcttggatgacaactatggcaatgcccattactgagctaggagatgctggaggaagatcaggtggggactgtgagcatgagtttgatttttgcagatactgggtttgagacacttctgagtcaagcaggcatttggaaatgtggactggtgccgagaaggaattcccagcagtgacttggtttaggtggtcctggaaagtagaaacacacacgagataattctggggatggagcttaaagggacgtcagcgttcaagggccaggtagaggatcatgagctgtaaagggacccaggtggttccagcacagcgaggaaagcatgcgagtgtgatggccaggcttccagggagagaggagggttttaaggagaacaacgtgctaaaagccactaagaagccaagcagagtgagaaatgaagacctccactgggtcttgcaagaggggaggcctttgaggacctcacctgagagctgatgaatgaagtgatggctggaagcagctctggagagggaggaatactgtggggaggggaggaactgaagaagtagagaagcatggctgtgcacaggggaggtgggatggcagccagggaggagcagaggtggaatgtggatcttgttttccccaacagagatagaggggggctaaaagtccatggaagggactctgctgagagggaagggtggatccatgagacagaaggggagagctccagtaaggacccagaggtctgaggacaggccaaagcacagatggagggattagctttggatggtaagaggaaggacagatggccccttaaacatgacggtaatgcaaactgctctgttttttttttttcttttggcgtttgtgatgaactttgtatatgctttccctgtttgannnnnnnnnnnnnnnnnnnnttatatattaaacgggtcgtctcagatagcgtgaaatcaggccaccccccacaacaaataagaagcccgggggcgggtaacaagccctcaggatcagcgggcacccccccacaaaataaaaccggtcggaaccccataagccaacaaagacggaaactccttcaccaaagagcaccccaaaaaacaccggcgcccaccgccaaaagcacaagcacgcagtgaaccaaatagaggaacggaaagaggaaaggccacgcatagccccaatgaaaaaaaggcgacgaagggccaaaaggcaatgtggcccgcgcaccctataggacgttggcatgaaaacatggaacaacgcacccccagtctcgatccctcacccccccattagaaaaaggaaacaaccattctcctcacctgagggaaaagggcccctaaccccggaagaggccaggaaacattcccagagtccctcaggaggaggactagtgctgggctcctttcctcctgttctgctgcctctgagaggagccaggattgaatcgtagccttgtcctctgacctggagtctgggagtaactctcttatgacttttttagcctagtagaattgaacatgaacttcatgttttaagggatggttgcatttgtttgaatggtcacttctttttctatcagtattagctaatatagggagaaggaagtcatgcttctcaagtaaagcaacagtatctgtgtatccatttacttgattgagctttctactgaattacaggagttaaattatactttgttacactcttggtattacaaaatgatggccatgcctttattataaaatgacaccagttattctttcctggaggatgtgccttgtgtcactagccgcactaagcacttccccactagtggccccatgtggttgtgtgtcatcgctgactacctgttacaggtgaggaagctgggtggtgcagagacagaaagccggtggcccagtcaggagctcctaagtggcagagccctgtctcctgggttccttctcctgtctttcttgcctctcacttgaaataagagaggacatcagaactggcctgaatggggccctggtagggcaggaacaggacacctctgtggttttgttatgatgtcctgaggataaaggagtgaaaaaaaaatctttgaggaattgaagatttctttatgaaagatggctgaaactcctgacagcttttcaaattcatctttggagaaacttccgttttctctttcctgttccgaggcttaaagctgccctgaaatctacacatttatcaacagtctcttgtcaagactccagggagacaagaactcttatacattgctgttgagagtgtaaaacggtacaacctttatggaaggcaaattggcgttataaatgcgtgttacctttgacccagaaattctacttctaggaatttatcttaccaatacacctgcccacatacaaattgcagcattgtttttgatagtaatacgttagaaataacccacgtgttcttcagtgggagactggttaatacactaagatatatgcacaaaatggaatgctctgctgctgagagaaaccacaagtatgccctgcacccctgtgaatagatctccagtatattaggtggagaaggcaaggcaggcttcttttttgtaaagttaaggagggtaaataagactgcatgtttgcatctgcttgtatttgtgcagactgacactagaagggaaaccaagtaactgaaaaacacgatgattcaccggggtaggtggggaaacatctaggtcgggacaggtatgggagtgacacacctcagtgtacatctttgtatcatttttaaaagtctgtgcttgcattatgtatcaaaacttagtgctatctcctcaggtgcagggttctctggaactctgtctaggttggtctcttggatggcattcttggagacttgccggaaaaccaaacaaaaggtgtgagtgcatgcctcctggatagatgtctttttagtgtaacttagcacaccttgtacactgtcagggcgcctctcagatgagtcatcccggcagcccctgctccatgagtgtcttccccacagtcctgagtgcttctaaaatcatctacaccagtggaggcaaaactagatattttcttagtttgcagaaaggaatatttccagacaacatgaacttgttctcctttggtctccttttccttgtcattgttcaagtcacaaggtctgctgattaaatttccccttgggtttcaaaagaacttgcttgtttggttgttgtgttttgccttttaatttgagagttgaggcccccaggtgcatgtggtaaagaattcaaagggctaaatgggtgtgtgttgttcgttatttctttgaacctcttggcacttgaatggtgtcagtaatttcactaattatggttggcaaagaaactctgacacatggctttggagctgtgttgttcttacatcatatctcttgagttgaacctatgctctcttgatggatgaactcgtaattcaccaggtgcgtggatcgctgtgattaattgtttcaagctatcagttatttaactctctagtgccaaatgttcaggagaaaatgtaagtgcagtgtaatgtaaaatcaagccggcaactccagcaatttgctcttcaaactatagctctatcagttcccattcatttatacacttacactactcaatttgtcgttgttgttgttgttgttgttgtttttgagacagagtttcactcttgtcacccaggctggagtgcaatggcatggtctcggctcactgcaacctccacctcccgggttcaagtgattctcctgcctcagcctcctgagtacctggaattacaggcacccaccgccacacccagctaattttctgtatttttagtagagacagggtttcactatgttggcctggctggtctcgaactcctgacctggtgatccgcccgcctcggcctcccaaagtgctgggattacagccactgtgccctggcactactcaatttgtaataaatcagggtaagttatttttggtgccaagtcgattaattgaatataggttattttgcatcttagattccctctgacgactaaatcttataagcagaggtatgtgagcatgagaactgtgtcgggtggtcctgaagagattagtggattagaaggagatttggagatttttaaaaaagcctctggacagtgagttaaatggtgggttgacactctgtggtcgggactttttggagagtctataaagttctgctgtatttctcaagagctagagagagatgatactatgaccaaatttggtttgaatgtattataatgtactgagtatcactaatttgttgggaaatgactgttaaaaatacttactgacgcttaaaaatatcacctatagcattagtataagtagccaactgatttacatatatttcatgtgtgtgttgggagaggggtgtggattcgttaggccaaagatttcggtaatatatttggaagagataaatgaagataaagagataaattaccttttgaataattccaaaactaaaaatgcttcccttaatttttatttctgattttcttatttctatcagagaaatgtttctcatgtgacaaatataatgctttcatatttacttctgcatgcacaacttttaattaagtattaattgattaattttttagagacaggatcttgctgtgtcatccactttggagtgcagtggtgtagtcatagctcactgggacctcaaacacctgggttcaagggatcctcctttttcagcctcctgagtagctggaactacaggcataagccaccttgcccagcaaatttattattattattatttttgtagagatggaggtcttgctgtgttgcccaggctggtctcaaactcctggcctcaagtgatcctccttccccagcctcccaaagtgctgggattacaggcgtgagccaccacatgcagtccgtgtacactttcacaccttttaatttctttactcattaggtgcattctttagcaattatgtgtaaagtggaaatgagcgtgcaaatcgtcattttctattgacttgcactccagaattggaaaattggaaaactgtaggaaactggaaaattagaaaactgtaggatctaaaacaaatcgcttctatgacttataatattcacttgtagaactcactggcctttgtcagctttcagagtatgtgaacactttttgccatgtaagtagttagtccattggcaatggatatatgtaagttggtatcttcactgcaaacatttagttaattgcgtttattcttgagccattcttgctctacccttaggacttgattttcagtagctacagtggttattccagaagttgttagaattaagagccaggaggaggtactatgtaagctacatttagactccactggacactcacatattgcacgtggaatatcttaaaggggttgtgtgctgtggtcagggtgggaattatctcttttctttccatgagacctccactgtgcattatttaagggcctgtcaattgcccgttattcaagttttgttgttcttggaggacactattgcctatttctttccttgtttaaaaaatttcatttaggtaggcttagcatagttgcagtagaatttaataaatccttttttttttttacagaataaatctttttattacgtaaataccctttaatttgcctatttttaaaattcttgtttctgtgcttaccttgttgttagacagccaaggggatatgctgctctttttagtgccaaggtaaaaggtaaagctgtatcttaaatatttgtatttctctttggtcttggtgacccaaagtgatttgggtcattctgacatttaatcaagtttaaacaacatggctcttagaagtatgtttaccaggtaatctgagggctggttacctggtaacgcaattgagaaatttcatcaagactaattgattaatttattaagcacttattgtccagtttgcctttaattttcatttttctaagtttccattagctatcatggcctcacttgttatttcataatgaatggttacaaattgtttgtgtgtttttgtaattagaatgtaatagcaatcgtctaccagatgagctgacattgtaatgacatgaagtcagtaacaattatgccttacaggaaaattaattctgtaatcctatcatcccatattttgcctaagagattcgatttggctgctgctaggctgcttaggcaggtgacagcatggtgggacacttctcatttttctggttagactacttaaccataacattcatggtgccacctgaaaaaataattttatcgttttagacttttaaaatatttttaggctttttttttttttggcttaaaaaaagaatctgttctacttgggtattttgttctccttatttcttagtgaacaaagatatttgctcgacttctatcccagaaggaccatcctttcttcttccttttccttacctctaagggatatgaagctgtgagagggaattgcatatagcaataccattttgattccagtgaaagttcttacctttctcttttgtcattctcaacctcttacctgaagagtccattccctcagtatatagagcatctggaagtctaaggtgcaggcaggactgaaagagctgagaaaggcctcacatcaggtgacactggggcacctggctgtgctcccttgttggggggtcccttggcctgggcagttttgcgcttctccctgtttccctgtgccctgagactttgtgggtcacaggcaagggggctggcctccctgatcaagggcccttggcctaggagggcccctggatttatctagtccagcttctcgtcgtccaggtgcaaaactgatgctctgagatgtttagggatttgtccaagagcagagttggagccacagtccaaatcttctgagcctagtatggtattctgtcatccttggtttcattttgttctgttcataaaaattgcccaaaactgctgggcaaagtggctcatgcctgtaatcccagctcctcaggaggctgtggagggtggattgcttgaggccaggagttcaagcctagcctgggcaacattgggagaccctgtctcttaaagaaaataattgcctaaaactattcagggttaaaaatttgtctctaagcttaagaatttggaaaaactcagaaaagtagccacctataactccagcattctgagaacagttaagtgtattttcttctagttttttgtttgtttttgagacgggatcttactgtcacccaggttggagtgcaatggcgtgatcactactcactgcagcctctacctactcaggctcaggtgatcctcttcacctcagcctcccgagtagctgggactacaggtgtacaccaccatggccagctaatttttgtgttttttttgtagagacagggtttcatcatgttgcccaggctcatctcaaactcctggcctcaagtgatccacccacctcggcctcccaaagtcctgggattacaggcgtgagccatcatgcccggccttcttctagatgtttaaaacaaacacattttagtgtagttgagcctctgatcgttacatgtttatttcctagcatttaaaagcctttcagcgacatacactccttattagcttaattttttcttttaagagccgtgttcttgctctgtcacccaggctggggtgcagtggtaccatcgtaactcactgaagccttgagctcctggcttaagtgctcttcccaccttaaccttctgattaactaggattacaggtgtgcatcaccacgcccaggtaatttctaaaaaaaaaagttttttgtagaagtgatgcctcgccatgttgcccaggtgtctgtcttgaatgcctggcttcaagcgatcctctcccctcaactctcaaaaggctgtaaccctgattttaatggtagtgtaaagtgacatgggatgaaggaaccgtaacattcttaaagtttccccattgttgggcatttgcattggtcccagttttttataagtaaagaaggctgcagcaaactctgttgtactacttaatctttgtcctttatttcaaattatctccctacaatacgtcccttgaaataggatttctgtggaaaggtatcagtttaaagctcttgacccatatggccaagttgctttccaaacagcttacctgttgagactcggacctatgcttctaaagcctatgtgtgaaatgttcacattgtctttgggagaagcttcccacgaataagaaaaataagggaagaacaaataacataattgtttggatatatgctgtggtttgtgtggacgtctcccaccctttcccttccccagcccaagtcagtcttctgtataaacaacttacataatacagactcttcactgtttgtattatacatgtattttgtgagtctgtgtcagtatttgtttacacgggaattagggcatcaggctgtcttcctagggttcctctgtgcagacttgtagacagtatgggttctttgcgtgctgagttgaggtggccccaaacctttcagacagttgctcagatacctggcagttgctcatttacccttccagaccttcctgcctctatattagccaatgacaagcagatgctttccacaaaacattcgtgtgtgaactgttgacatttatgactgttttctgagcccacaccaggtcatttttctataaaatcagaactgtgagagctcagggcatgtggccatcctggataatgggtcctgctgtctggggagtcgttttcatcaaaattcacttttaaagaatagagtgtttattaacgaaaatatgtgagccttggctgggcactgtggctcctgcctgtaatcccagcactttgggaggccgaggcgggtggatcacaaggccaggagatcgagaccatcctaacgcggtgaaaccccgtctctactaaaaatacaaaaaaaaagttagctgggcgtggtggcgggcacctgtaatcccagctactctggacgctgaggcaggagaatggcatgaacccgggaggcggagcttgcagtgagcggagattgtgccacttgcactccagcctgggcgacagagcgagactccgtctcaaagaaaaaaaaaaaagaaagtatgtgagccttatcccccaaatgtacctgacatgtgaataatatggctcaaactaatgatgtgtataatattaaattgactttgttattataagtgatacataattcaattttagttaaaatgcattatttcaatcaatatcaaatattgcagaaggaaaacctaaaatagtagccaaagttactcagatgagataaagaatatgtttagggctggaaaatcatactttttttttttttttttgagatggagtcttgctgtgttgcccaggctggagtgcagtgacatgatcttggctcactgcaacctccgcctccagggttcaagcgattctcctgcctcagcctcccaagtagctaggactacaggcacgtgccaccacacctaatttgtttgtgtatttagtagagacagggtttcaccatgttagccaggatggtcttgatctcctgacctcgtgatcacctgcctcggcctcccaaagtgctgggattacaggtgtgagccattacgtccagccttttttttttttttaaataaagagggtctcaggctggcgtgcagtggcacgatctcggctcactgcagccttgacctcctctgctcaagcaatcctcccgcctgagccccccaaatagctgggaccacaagtatgcaccaccatacctggcttttttttttttttttttttttttgtattttttgtagagacggggtaattctatgttgcccaggcttgtctcgaactcctggcctcaagcgatccacctgccttggcttctcaaagtgctaggattacagatgtgagccactatgcctggccaataattatataaattttgatataaattcctgctcttcaaggagatgtgggttttttttcctcctgagagtatatttataaagttaattggattttatacaaaagaagcttttgactcatttcatttagcttttaatgttatcatctgggaggagatggtgaagaattctgttagccaaaccatggcgaattaatgtttcttacagatggttttattactttttatgatattatttggatcatgaaacaagtatcttggaaaatgtgagatacaaagatgtgagttgggaggtctctcttgtatgtgagttccttctataacagagaaaggatactttcagtttaagctgagatgctttttccttttcactcttgaaaagtctttgttgcaggaattttctgtgccctccctcctctgggacagatctgcttcttgatactgcagggctccagccttccttccagccagctcatttctcagggaagccttgttttcctttttcagaaaatttaaatgtatatttaacgcacaatttaactccctttcctgttgataatttttttcttcttcatattttgttattaataatagcttacagaatgggatcagtatcaggatcgggaggtaaccaggtctccaagttttccctttcgtttttcttttctgcttttaatgagccttaattaatccagggagctaggctgcagtatctgtggctctccctgatgttttctttctgcatttctgtcttggaggggaacctgaggatttggaagtagagggctctactagtgcttcctttttgtccttttctcattgtccaaaagagtcttaagcgatctccaggaaatcccctgctcctgccaggaatctgcctgtgagtatttgagtgagttgctgctttttaagtaccagttgagaagctgaaggttggtgttgtggttgtgataaactcccaacatgaaaactgaggaccaccagcgttttcagctcacctttgactcacgctggcagctccaggaacactgaacaggagtccccactgaacctttgctgcgttccgaagcagcacagccatggttaggcactgccaggcagctcttggaaaccacagggagggaagttttggttccttctttctgtctttgtttttgagaggaatgagcttggaataaaagaacgctagtaatgactgatttgcaggttaggtgtaaacattaaatcctcataacaggctaatgagaggtgggagaaattatccccattttacagatgaaggaacagaggctcctagagactaaagaacttgctactcaatgaggtcaggattcacacctaggttgacctgaggatagctgctgcagtgctcacccttcctaccttcccaagaaacaatacgcagagaatttcttttctaaatattgtgtgcctagaaggtgctttgtgttatcgaaacagatatatatgtgtatatctggtctctttaaaattctctttaataaaaacaaaaagtgatgctagtgtaaaataaaagatatatatagaaaattgtgtgtcctcgttaatcttctttaggaaagatatatgcatatatgcagtatagttttgggtttttataaaaatgagatcatgctattagtatagtgaatagcctctatatagtctttcgtaacatttttactttttctcggtgtatggatatcaatttaggtcagttgctgcggagtttgaaacgagttaaaatttcagcagttcacaaaatggatgattcatagtttagtcgagccatcatctgttgatggacagtcatgtggtttcttgttttttctttctctgtgtttcactaatgaaacaggattacagtaaattgactcgtgtatgtgtatacatccatctttgctggtactatagaaaagtgtattgctggctgggcatggtggctcatgcctgtaatcccggcaatttgggaggctgaagtgggtggatcacctgaggtgaggagtttgagaccagcctgaccaacatggcaaaaccctgtctctactaaaaatacaaaaattagctgggcgtggtggcagtggaggctgaggcaggagaattgcttgaacccaggaggcggaggttgcagtgagcctacatcgtgccactgcactccagcctgaatgacagagcaaaactccattgcaaaaaaaaaaaaaaaaaaaaaaaaaaaaaggcgttactgccttgttcctgatttaaaaaaaaaaatgggttttaacaaggaatatgttaagttttgggaaatatagtttatcatatttaaggtggggatactcattcatgttttaatttttatcggaagaggctgatgaattttatgaaatgcctttttggcatgatataattgtgagcttttgcttttatttggtggtgtaataaattacgttgattagatttcccaatattgaatcatctttgcattcctggaataagccctaatttgttatggtgtgataatctttggatatgttgctatttgatttgctaatatttttttaaaaattgtgactgtagcctacaaagccctacagataggggtctttagtttttttccttgtttgcattctatcaggtattgatattaggattatgttttttaaataatttaagaagaatttcaccctttcccagcatctagaagcatttacataatataggaaataacctgtttttttttttttttaagttagagtaaaattaactggaaaacttcataggcatcccctgtagtcccatcccagaacattttaaaacaaattttttagtttttcagaatatattatagttgttctgttcagcttttaagccttttctctggattttgatattttctacttgctgggaaagaatttatctacaatttgagtttatcgcacagttatttgtaatattgttatcatttctctggtaatcataaccctttctcattactaacacatatttttgctctttttttgcttttttcccccttaatcaagtttgttagaagtttatatattttattgtcttcaaaaaactaggtatattaattttatatttatcctgcttttaatttcatctcagtatttaatttttattcactttttccattcctttaagtttattaagttgaatgcctgtctcatttgctttttagtcttcttaaaataatggcatttaaggctatacattttctttgaaaattgcttttgttacgtatttttggttttagacagttgatctcctttttgttgttttctagatggtttgtaattaaaatatttatttgatctttgattctgacattacttagaagtatgtctgtccttgaatttttcttttgcttaccttttgatattgtttatatgatttatgaatgcagctctgaggtatctgagaggatttattaacgtttacttgcgtccaagtacatgattaagttttaattgctttgtggacattaaaaaattatgcccttggtaaaatgcaaaggttttattttctgtatttagtaaatcaaacttactgattgcattatagtcagatcttccaaattcatgtatgttttcagttgtcaaattgacagttaatgatgcaccttttataatttttttttttgagacagagtttcactctgtcgcccaggctgtgtagtgcagtggcgtgatcttggctcactgcagcctctgtctcctggattcaagtggttctcctgcctcagcctcctgagtagctgggattataggcacatgccactgcacctggctaattttcatatttttagtagagatgaggtctcactatattggccaggctggtctcaaactcctgacctcaaatgatctgcctgccttggcctcccaaagtgctgggattacaggtgtgagccaccacaccgggccccttttataatttttaaacttttcatatttccaagagaaatgcttagtgtatttatctgccgttttgcttgatgcatcaatatgtgtaatttttttatttttcagggattacatatttatcacatgtaatatccctctctgtccagtttaatgcttaatggccttgagttcttggtttgattttactattgccagctttgctttctttttacttgactttgcttggtatactcttgttcaattgtttgtttttaaatagagctggacttttaaaacccattgagacatttttgttctctaatagggacgttctgccttgtctttctttactgtgataatgcatacattttgctttattgctttcatcttattcaatggttgccatttattttactttctgttattctcaattcccatgttaattgaacaagtcctttgctaatttgaaaagtgtgttattttcaaagctaccggtgcctaacaatttgaaaatctgtatttttctcctgaaataggtaccagcattaaattactaattcttccaccagggtttgcatttccgcaatttctgccgttcccatgactttctctgtctcctggatgtgttctctgtcttttcactcatggattctagtagattcttattccttgctcttgggcgctcgcatttcttcttcttaatcctccagaatctgatactctagagcaacagatcttttctgttcaatttaaaattttaaagtgtttttttttttttaattcctgaaagtttttatactccaattgtgtctccacatatgctcttagactcctcttcccgtctagttctcctttcttggttcaattagttctgtttcagctggtgccacctgttgcagctgagcttggtcaccctccctcaggctcctgcgtcgtcctcagtgggtcatggtttttctttgcttgccgatggctgccctcagccgtcacacaagtcatgggttagtgtcactcaaggaatggcagaccagcagatggtaggtgataagccaggaaacagatactgtgccgctgagttgctctgttcccagtctcttccgacaacataaggcttgggaacagttccaccttccatggaagccccccttccctctggtttcacctgggacagcaggatgagcagggtgcagggccttcttccctgtggatggactctcagttacaatgaccatggagaactgtacccgctctctgttttggagatttgggagatcctgagggcctcagaaggccctcactctcatcccatgcactacctgtaagctcattagattactgtccttgttactttagagaggggactgtgagggaggcaggaccaagtatgtttattcaggccactgtcttccccataaagactatatttgtgtacatttttctttgctgtattgtgagaaggaggtagaaaaaagatgtgcatgtctgcatttggaaacagttctgagagtggtgctgcatcagcggggctggattgccctcaactataagaaagtgggatacttatataaaggaagcataatacagcatgtttctcttacaggaaggactgtttcttagagtcctcatcctctgtctccatcactcagtatagcaaatcatacattccatcaatgttaatgacatcaattgtatgcctgtaagtatgtacacacgcacaggggcagggggcacttcttcactccacagctggaaaacttgggacaaaatgcctagccagcttggcccaaatttgagggtattgccatctgtatctcagtgcaggtgtttctgtctgatgttcacagtctgtttatccagagtgccccagaaaggacagtagtgttaggttaaacctgtgtatgtctgttcttggttttaataacagtcctgtctttggaattatttagtgtgttctctcatttctcaggaagtcaggatgttagtgccgaagcacttctctgacttggtccgacattgaagtaccttcccctgcattacagaagaacggccccccagggggtctgtttgatgaacacatgtattattgcagtgagatactctagaaatagcttcatgtccttgcaaaattgccagcacaagtaaggacctggaaattgttgctatgcatgtatgtcagaagatttcttaaccaattctgtactgaataaaataaaatttattttcaagttttgtagggacctggggcaatatgtcagatagagttgaatattttcaaggcatttttagttcatggggcacatagttggcttaagatatctatgtgtatcaggactgaaaggtaaagtgcccgaacctgctaatgaaagaggtgtctgtgtggccatctgaggttcagccacaatgtgtcttgcagaattattttattttgctagtttttaatttctcaaacagttcagctgcctgtcccgtggtaccgtgagacttctaattcaagatgaccagtatttgcagacagagccactgcctttgctgccacattttgcttggttattgtgtgagaacaccatttttctctttttaaatgaattgtgtttctctttttaaattgagcatctgactgggcgcggtggctcacgcctgtaatcccagcactttgggaggccacggtgagtggatcacctgaggtcaggaatttgagaccatcctggccaacatggtgaaactcctgtctctacttaaaaaaaaaaaaaatggaaaaactagctgggcatggtggtgcacatctgtaatcccagccacttgggaggctgagggcaggagaatggcttgaacctgggatgcggaggtcatagtgagccaagactgtgtcattgcactccagcctgagcaacagagagagactgcctcaaaaaaaaaaaaatccgtttacatagtgataaataaagtaattactatagtggtggcattctgcctaagtcatcttgaaaactgaatgcaaaatctttttaatagctccataatggtctcttgaagtgttacagatttttataacgatagctgtaatacaagtgcctttatttactgtgagacttgaacattttgaccatttacatgggtacttgtgtgtctccagctgagctgagtgcatgtcgctgcggcattgcaggcgtgtgtgcatgttggctcttgcaacggggcgtctgccaggggttgtctcgggcaggagaaggaggccagactggcaccacttgtagtgattggaatgtgtctagtccagctcttcagttccatgtaggaggttttaggatggagattgtgttttgggaactccaagtcactgtccaatttggagagtattatgtaagaaggcttatgttttctgattacccatccttcgatacagaccaaataataccacagtgataaaaatgggaaaggagctgtcgctcagctcttcttggccgtgttgtttgcttttcgatgtctaatttatgaaagcatttcaaagtgacatatatactgaacagcttcgtcttgccaaatgtaaaataaactggagatgagtttagcacagagctttgtagattgttgtcctcttggtagagtcggggcctaaacaccacctggcctctgtgccagtggacaggtgacctgcctgtcctactgctggtctctgcagctctctgtcttgggcaaccctggctctgagttccagagtgttctccagtaggagagtctgcaggggcactgtggagcacctgggtatgtgcacatctgttgttggctggcgttgtctctgatggcttggggtgtcacagagacatgacagtactgtcactgcatacctctcaagcttttgctgagtcctacatgagttgcaggggcagagagggagggagaaaacaatgcctagccacactgagaaaggggaaagtgctacagagtcctggaaggaagcgaggatggacatggacggggaagcattcataccaggcaggaaaagtgacttcatggaccagtcacagaggacagggccagggatcaaaccttccgtaatttgcctccacagtttgtctgagactggctacctggttgagtctgccagagccctgtgtgcaggtactaccactcactgtcacctccaggcaggaaaggccatgtgaatgcatgcatctttgcaggaacttgcccctttccactgaggtttgaggcagactccaaccacatttccatccagtggcttagtggtcttacccgtgagcttgaactgttgtccctgccaggacagtctttgcctctgtaagtatctccatattcctccatcctttcaggtcccattcagtccctaggtcctccatgatggaatattggttgatgcacttattccacaaacatttgttggccacctttcaagtgccagacaacccttctaggtatggaggggtacagtgatgagcaagccactgtttctggctgcagagggctcactgtttagtgggagaaacagacaaatcatacatcttaactacactgcccttgattgctctttacctgttatatcagtcgatcttgcctgcctagcatttgttccctgtttgggggcctgtatgatgttcgtttggatacctcagggtacattttcccatctttgtgatgatgtagctcacttggtctgaatgatatgtaatcctgcacatgtagagtgaccattatatttgcataaatagcattggaggaatatataagaaatgaataaaagttgttatatcatttgatttttcttttcttttcttttctttttttttttttttttgagatggagtctggctctgctgcccaggctggagtgcactggcacgcgcatagcccatcgcagcctcaaactcctgggctcaagtgatcgcctgcctcagacttcattttgatttgtgaacctcgtgattctattacttgttccacaaaaaattttaaatgaaaaagtatttcaaaaatacatatattccggccaggcatagtagctcatgcctctaatcccatcactttgggaggccaaggcagacagatcacctgaggtcaggagtttcagaccagcctggccaacatggtgaaaccccgtctctactgaaaatacaaaagttagctgggcgtggtggcacgtgcctgtaatcccagttactcgggagactgaggcaggagaattgcttgaacccgggaggtggaggttgcagtgaaccgagattgcatcattatgctccagcctgggcagtgagtgaaactctgtctccaaacaaaacaaaactaaaacaaaaacaaaaacaaaacaggctgggcacggtggctcatgtctgtaatcccagcactttaggaggccgaggcgggccgatcacaaggtcaagagatcaagaccatcctggccaacatggtgaaaccccatctctactaaaaatacaaaaattagctgggtgtggtggcaggtgcctgtagtcccagctactcaggaggctgacgcaggagaattgcttgaacctgggaggcggaagttgcagtgagctgaggtcgcaccactgcactccagcctggcgacagagctaggttccatctcaaaaaaaaaaaaaaaaaaaattcctccacaacatatattccaatgtttagtttttctgttacagagatcacatgtactctaacttgtcaactaaatttaaaaggaaaagacaactttgagagaaaattaaaaccaatgcagtgtgtgtaaatgccattttgataagctcttatttcatgttgacatattctatggtgctcgtcttacataacctagttagggaaatgttttgttccagtctggctttgtttttcttcatgtgtttaggtccttccactttccttttgttaatttttggtgttgtacttcaggaaatgaattgagggttgcaaatgacctggagggccttagtttgtttgcttgtttgattttagcaacagtcaccgtggtacacctgacgtggctgggactcctgattttttttttttttctttttgagaacaaagaatgtgtccttgtcttggcatggactgggtagccttgttcacctccccacccatctctccttattggtgaggcattgtaaaccgtgttaacaggtagcatccacagaaccctggaaaggttgtgaagtccctttggaagcctaagggttttgatctcatccaggttgtaatcttaaattctggtacaaattcccttgttacaactgggttaagtggttttaacctcttttgtgccttcattttgaatgcttagactggaaagtcgttcagagactcctgaccgaataaagcctacttccaaatgagtgggttgtccaggtgtgcttgtagatgtcacatacttctaacaaggctctgcagctgcgatgtcaccttgcccagcgtgacctcattagcatgtatgtggctttcagtggccatgtactttgcttctagagctttctttcccattctgggttcttaggagggggctgtgctttgtgtgtggccaggcagaagtccatgttttagcttttcaattctcttgaagaaaacaaatgttgttgataagaacacttgtcatggcatccgatttgttcttgtgagggctgtattagcaataaatagacatttagtttgcatatttaacacctcatcttctttcagcccacacgtcttcactacaggattagcttttcattacttagtagagcttttaattacctgaagctttcgtgtctttactgggatataacttttctccttattaaccagaaaaagtcacagaaaatcttgtaatttataatggaatggagtaatattcacaaacaggctttggcaggattttttttgttattgtgttttttgtttttgtttttttgttacactagttttatcacaagacaagaaagaggggaacttttagaaataaaaattatgtgctaaaataattaaccttcctgagtaacacacacagaatgttggtatagtgtttgcaccagaggaattacatatggaagaatgctgggatcttttaccaaataagggaaagtagagttcattacaaatagaggcttctagcacagaaaagaggacattttataagtactgtgaagcattttcagagataattaaataatagaaaatattaaaccaatttaaacaatttgtagtttttttctaataaccagtaagttcttcgtcttcgaataattcttttatactgttctatttccagctccactgagtgcccctgtgttttcagagaaaacaggagtctgttttggacttcctctttggtatatatggtgggagatttgtttaaaaaatttttttatagaggtaaaattcatatgacataaaattgtccatttaaaggtgaacaactcagtgacatctagtatattcatactgttgtgcaattgccatctctatctagttccaaaatacatttgtcatgccgcaaggaaagcctgtaccccttaagcagttaatccccattcccctttccgctcagctcctggcaaccaccagtctgcattctgtttctatggattcacctattttgcatagtgcatataaatgcagttatataatatgtgaccttttgtgtctggcttctttcacttagcataatatttttaaggttcatccatgttgtaatgtatcagtacttcatccctttttatgggtgaataatagtccattgtatccagttgtatccagaagatttgcttttcattgcctaacttcagggcttcagacacctcaatctttgttctgagatggatgtaaacttaatgtatatctctctctctcacccaatgatcatgccaacaccttttttttttttttttttttttttgagacagtctcgctgtgttgcccaggctggggtgcagtcttggttcactgcaacctctgcctcccaggttcaagtgattcttgtgcctcagcctcccaagcagctggggccacaggtgtgagccaccacacctggctaatttttttttcttttctcttttttgtttttgtagagatggagtgttgccatgttggccaggctcgtctcgaactcctggcatcaagtgatctgcccgcttcagcctcccaaagtgctgggattacagacataagccaccttgcctggccatgccaacaataattatttagaagtatgttgagaatacatcccaataatagaagtgaaagctctttaaaaagaaaaatattcaaaacttaccagctgatcttatgtttcatttagaatggctgcattctttgcagtaccctagggttgtagaaattctcccccatgattgcacaacccactccttctcagccagtgtgcacctggagtcagctgtgtttggccttaaggtgtccatggtccagcagggagagggcagatgggtcagtgttgtcctgctagtgatgagtatcccatggtgggcatgctgatgccacgcaagggagagggtgtctggttctgtgcagtggcagtggtgcaaccccttaccaaggtaccgtggggacctgggttagggcaggaggaggaaggtgttctctacagactgcagggcttggaggcagcctgtcatggggaagggtgtggatgaagggtgagccgggaccccaggcaggtacggagcagttcaaggccgtcaagtgtgcttcattcttcagtcattagggtgtctctgaaaggtttttcattgaatcagaattcccctaattcacgaattctaaagcttaagtaaattcagtaataataaactgtcaattatccaagcgatgaatataaatccataaggtttttcaaatccccagaaatccctttcatctcccacctggttttgctgagcgcctgtctcttctgtctcttttctgattcccacctttcacttttcctccatttttcgcttaatggatttatactttaaagtaggtattctgaaaattccaattttatgaatggtgtgacggtgagaactttgattcattgaaagataaaaataatcattacattttatactgcaagggtcatccttaatattcttcgtatttttaatatagctgcatgatttgagtagttgagttggggattggataatgtatttattgattgattaactctctgggggtccatacatacccctctttatatccctgtggtccctttttagtccttttgtaaaaacttgataatgttaacctctgccaaagttgatgcggtagttgtgagtggtgggacgcaagcgtgttgatttattcttggagacagcagaaacagcaccaccttcaactgttttgtcatgatcatcttgtaaccataattctgtgctaagtcagaattaatgttattttgttaattcaggttattgtgaaaatctccacaggaggttatttaagcaagtcacaaattgatgattctgtttgtagaaaaactccagctcatccagccagccacattattccagggctgcatggtgtcagcgtagggaccaggctcggtgtagagaccaagggtgcctttccccttcctttccgcccgttaattgcctactcgcccagtggtaccttctgaacttttagaaatccagataggatttccacatggttcattagaattcatttatttttttccatctgtatttctttttgttgtactccctagatcattatttttagttactttttacatgcattggttaggtttttcatgtaatctctcagtaagcgtactgggggatgagtgacctcagtatttaaatttttcataggtgggatgaaatgtcttttctgagtgtgagtatttctgttccattcttcttttccaggcaggctctcattctgtgctgcagtttggattcagggagcactgacccttctgtcaggttgctcctgctatgaaggatggaagggcattttgatacatgaggcataactgtaattatccggtggggcttggtttgtgctgttttccacctcttcgtcatattttggaaaactgaggccaaaagcaaagttcattttcccctttaaaagcttctttaaaaaaatgatgaaagagctttatcaatgttttgaataacccagaaaatatttcttattgttgataatctgcagtttgcaagtgcagcgaatcttgtaggtagatttaccttgagttttttgaaacggtagaattaatatattaaaacatatggtttttagttaaaataggatgttaaaggaatagagcgcacgaacaaagaactttccacttgaacccatgttgtttcatctgacagtgggtatggtgtccctggcaggatagggcttccacctcctgctggtgccggtaggacagggaagaggtggggaacactgtgtctccatctcccaagcatcttacctcccaagtcagatccctggcattgtttgcatacttgcgtgtttgtgtgtggggtgatgttttcctgagaatgtggcaaaataatagaaggtcccagggttcctcagtctgcagaccatagctgagtggtgtgtgcctctagccatgaggtgaagcataggtgaaattcagatccataggaagacagacagactttgcaagttagtaagctaacttgctagaggaaacggtagactcctgtgctggctgccaactaaaaagcctttctccacagttctgttctcatgtacaccctcaggaccttggatgagcttgtgtgttcaggaaattgggcaccgagattttttttgtatctttgattttagttgatatgtagtccttccaaggaaagtattcgttggatgccctttctacactttggcattgtgcaagaggtatcaaattttaaagtaaaagtgcacaacctggccaggcgcggtggcttacgcctataatcccagtactttgggaggctgaggcgggtggatcatgctgtcaggagatcgagaccatcctggccaacgtggtgaaaccccatctttactaaaaatacaaaaactagctgggcgtggtggtgcgtgcctataatttcagctacttgggaggctgaggcaggagaatcactttaaccagagagttggaggttgcagggagccgagatcgcaccactgcactccagcctgggtgacaaagcgagactccatctcaaaaaaaaaaaaaaaatgcccacaactgggcatggtggctcatgcctgtaatcccagcactttgggaggctgaggcgggcagatcacgaggtcaggagatcgagaccatcctggctaacacggtgaaaccccgtctctactaaaaatacaaaaaaaaaaaaaaaaaaaaaaagccgggcgcggtgccgggcgcctgtagtcccagctactcgggaggctgaggcaggagaatggcgtgagcccaggaggcggaggttgcagtgagcggagatcacaccactgcactccaacctgggtgacagagtgagattccgtctcaaaaaacaacaacaacaacaacaacaacaaaacctcacaaccctggtctcccagagcttccatattaataaatctagacaatgtgaaatgcaaatccacttaatatttgatgcaaaaaaaatttatttgacctgttattttaactctttgacataaaatctctaaatcaaaataatcagcaacagttttaagtgtataaatatgtatttctttcagtgcttgaacatttttagacaggaagattcttgatcttctttgtaagcaaatagcatcaaagagtaacatttctgtacctttgtggtatgtaccttgtggctaatttgtccatgaagggataggcattgtgttttgttgcttaagtcgcttaaggcctttaaagcatttccaaactcacctatttttgctctaaggggtataaggtgttaaaaaatgaatggaagttaactcattctcaccttgtctgctaacttccttttgttctttttctgtaagaactcataaagctgtatgcatcagctgctcccaggggccttctaaggcctcagtccaacaacagtgctacaggtgaggaaaggaaagaaggcactatgtcatcatgtcattcttttagacttggtaagaagtatattcaagcagatcagatgctctcagaatcacagcgtgttgtactgctagtaattaaaactgaagtccacgttgaataagaaataattttttattgattgctggcatttgtgagaaagggtttaattagaccaggatatggaggggacttatcgacagttccgttgtacattgttgacatggttattttctgtatctcattttgcctgggaatttgtcattctcttctattttcttatcagtagcactgcttttacacttattagccctagctgtttgtcttgcttatttaaacttgtacatggcacatgctcaaagatttttccaggcaaaatttctttaaagcaggatttgagattttccatccccttccgtctgctggattattccggtgagtgttaatctcccgcctttgtcttagcctctctgtggtcttcggttgcttccttgttctctgtagatctcctgagttggccattagctgtcaacagtcagcacttgctgcctctcaagtctcttcccctcctggctctgccctggttttgctctctgacggggatctaaattgggattctttccagtgtggaatcctgggtgtccaccatgtcactctgacttccagatgataatgagtgtgaccatgggctgaatgaatgtctctctgctgggattaaaagttagaggaaggcaaaaacagacattgcgtgttctcacgtatacgtgggagcaaaaaaagttgatctcttggaggtagagagtagagtgatggttaccagagactgggaaagggggcgatgaagaggggtagagaatgagtacaaacattcagttagatagagggaatacattctaatagggtgactatcgttaacagtaatttactgtatatttccaaatagctagaaggttagaaatgttcccaacacatagaaaggatacatgtttgaaatgatggatatcctaattattctgatcattatacattgcatacatgtttcaaaatatcatattaaccccataaatatgtacaaatatcacacatcaataaaaaataaaggggaagacataggtgtaggcatagatttttaagctgagaaccttttgacagggaagaccagggatggttttagggtgtggggaatctgtgtaagttggccgttagctgtcaacaggcaacaatcactgtctctcaggtccctcccgctcccggccgtgtcctggttctacttgccggcagggatctaagttggaattcctttccaacatggaatcctgagtgtccaccatgtcaaaattgtgtcaaaattcgtctgtatgcatttttcttggtagaagggtccccaaaagtcaccacattctcagagacttctgatccctaaaactttagatcaacagtcaataaaaaggtcccagttgtgtcttagtccccatggcagtacttttgaacatttaaaggtggagaattgctactgaggactttgttctgtggatgaaacttcgaatgaggattgttggtgagagttggattgttgttgtatgaggaagtgcaccttggaatctaatggggtcttcacggagggggagtcagttgtggcactgtttgtgtattccattcatcattcatccctccatccaagcacccacgtggagctcagaaagatgactaacacataccccctgctgctcctgtttttctaaggtgtgctgggaccatttacatttagttctttggagaacacaactacttaggatttttgttgttgttgttgttttcctgtacattgtcttcctatctcccttctggtacccattccaccctctctccccttcctcactgccgtttcataggggttctcagattcctgtgaataaagcaaaccgatgtgcagatatgtgtgcttacacatgtggacgtatttgaggaggtaagagggacctgcacaaggctttagtgagtaagcagagaagttatttatatatagtgagacccagtaaacggcgatgtcgcaggtgaggcagttgatctggtcagaatatgcctccagagacatcactggtgaggcctgcatgcatgttgaaaagagtgtatcttacatctaggcttgggtttccccctgcagctcacttatgaataacaacgtatgcaagagatttgaacattttcatgttcaaatgaaacatgaaaagggaaaaaaatttaaggttacggttaagtttggattgtttgcttattggtttggttattggcaattgctacaaagtccagggtgttctttatcagcagcatgcttatcaagttactgacgttcaagctgagtttccttccctccctccttccttcttctccactgacattttttttttttaaataggtagggaggcatttaatcttgtagcagcatgagagtagcttaaatgtccctcctctagcagtatgtttatagcagcgtaggtaaggaaagcccagcttgcacagctgagctctaaagtgcatacatcccttaagttctcatacacacactggccagtgagacccccaaactgcgaacagagaattctaattgaagtaaaagcatgaagtttttctttattgaccatgtagcaactgtggaatcatttgaaaatttctgaaaacatgaaacaggtgtttataaggagttttctgacttaacaaaattggtgaaataccaactttactaaaaactactaattcataattttttgattaataatttctagtctggaaaagaggaattttttgaaaatcactgatatttttgatatactgttgttttcaaattgagttctcatagtgtggtcggctctgttctatggaattaatattgaacaagctgttctgaacctaagaaaggtttgtaaaaaataaacatgaaggaagacttcattcaagaggtcacttaaaaattattattattattattattattattattattattattattattattgttattttaagaattaggtctctgttggccaggctggagcacagtggcacaatcatagctcactgaagcctcgaactcctgggctcaaacagtcctcctccctcagcctctctagcagctagaactgtatatgtacaccaccacgcccagctaatttttttttttaacttttttttacttttgaagaggtgagattataggcactagccactgtgcccagccaaaaggtcactttttttttttccttgttggggaggaatcaataacaggaacaccagtcatgatttggtgttttttccagggcagacaaataaagatgatattacgatgtttgttatcacagaatatgtttgcttttgataggggttgggtgctgaagggtaagtggttagaatcattctttttctaagggtacagtcattaatactccttgattcaaatcactatttaagttataaatacatggatttattttctaacctcaaaattatagcatcttaccacatatttgcatgcctctcttgagttaactactggtgatgattcttagctcatctgtggccaagtatagataagagaattagaaagttgtttccagcgtgtgaacttttatgattttcttccttggttactgtactcagttcttttttgttttgtttctatacaagatgagtagctggtggctcagatgacccccgtgctgcatgtacagtcccatccagagagtgttgggggctgtgtaaacctcgaggctcagagtggctgccattttcctaaaagagaagtatggctgctgttggcctcaatgttcagctttacaaaaattcccgtaattaatgaaggtcaaggcatctgcaaacattaatggggtcacaagggacaaatcagttccttgaggggaagttaaaatgctagattgcttaccgctccagacaaggcattctcaagaagtatgtgcagtttcagcacaaggattaacacggagcattacttgagccatggggtgccttgggggacatggatcagcaaccatttccttttgctcacagcgcccagattttgttctggggaccactcttatctgcactgcatagcagccacacattttgagtgaaattaaccccaactagcattcgagcgtcctcccctcccccaaaagatggactgtaccccacactgtaatcagcagggaggcatttcctggccacagttcaggttggtcccttagaacgctgctcagaactgtggtttggtggctctgggaagcagtgctctctctgagtgtgaataaggatccacatagctccagtaggtgtctgacgacatcttgtgatccggggggaagccagcctaaggacaaagccattgtggggtgagagacaggattggcacaatcactgacaaccgcagtagtagcccagaataaactgtgcctgaaacctaccctatttttgtattttttccagttttaaggaaataaatcccctttattgtatactcagtttgaatcaattatttttatctctttgggattggtttttggttaatctcagcaattcagaaatagctgaagaactatgctgtgggtttagacatcatgccgtgacaaaaagaagaggatcttagaagcgggggacattcactgaagctttatgagcctttcctgaatcccttcaaatcagatcaagttctctctctcctgtgcttagaaatgctgcctgttaagtcacgttggctacagcacccatctcagatcccttgtgattcagttgtaaagtagattcttctggtctgaattagaggccaaaacacaagacagatcaaaaatggggaacatattgcaaatttccccacaaaagactgaaggatgtgtttaccattgattgcacagggactgcagtgtctatgcttttaggcatggaaaatgcagggtttgactatcgagtttagattttaaagttgaggattgtttctttaagaagaaatatagaatattattcagtcctaaaaaggaaggacattctgacacatgcaacagcgtgaatgaaccttgaggacattatgccaggtgaaatcagccagtcacaaaaggacaaatactctatgtgatttcatttagatgaggttccctggagtagtcgcattcagagacagaaaacagaatgatggctgcggtggtgggggggtggggggtggtttggggaagggagtggagtgatggtttcacttttgcaagatggaaaaagttctggaggtggctggcggtgatgttgtacaacagtgtgaacttacttaacattgctgcactctatacttaaaaatggttaaaacggtacattttgttatggatattttcccacaattaaatttaaaaggaagatgagtagtactcgactcattattggatattacatcagggaactggaggtagggtctcacttactagttacgtagctcaggaacctggaaccagactccttctccagctgggcagtcccaggtttgagtcctggctccactggaggttgtctgacttggaggttaataataacctgccttagtcccagagtccttagagggaaaataggttataatacctgagtccatgtgtatcaagccattgctggttccaggcccctggagcactcagaaatggatgacccccagctgggtcaggccaagtcctccctgctgtagcaagcgggaccattgcctcgttccccccacctccacatggaaggtgccttttgtgtcctgccccatctctgttttaacagtcacaagactgtaggcagatctaaacttgtttgcacattattatcacctggggagctttgacgattccaaagccaggctgccacccccacctctagaccaactgaatcaccatttccaggggtgggactgggcatccgtgttttcgaggcttctgggtgagtaccttgtgcaaacaagttcagggaccgttgccctagacactgttcttcccctcatgtctcaacctgggcctcctaccactgccaccaccacagctatgccacctgggatgtgtcccaagcccccacttgtcggggaagcagctggggaggggtctttggccacctctgcagctataaggatcagagcaacacctggcttctgtgcctgtggcccctgctggtgctgggtccctggtccgcactgaaggatccaggcagagtacagtgggtctcccaggtcagaatcccctgggttgcttgttaaagctcacagggctgggccccaccccagggtttccgattcagcaggtctcgggctggttggatgatgagaatttgcatttctgtcaagttcccatgtgatcctttttggggtctgggaccacactttgagaaccactggtctattaaacaaatctttgcaaattagggaggtgtgttgtgggaggaagagactgatagttgaaagaatatttgcctaaatacagtgcctagtatttgccaagtacgcagccttctttctggctttaatcatacagactttctcaatcacatgtaattgcacatcctttaagcagcttttgactgactttggttttctcttttgtggtgattttccttaaactcccgaagggagggtggaaggggcaagagaaatttttatttatttattttaatttaattattttttattatttatttttttattttttttttgagatggagtcttactctgtcgcccaggctggagtgcagtggtgtgatctcaggtcactgcaacctccgcctcccgggttccagcaattctcctgcctcggccttctgagtaacagggtctatgggcatgtgccaccatgccgggctaattttttgtattggtagtggagatggggttttgccatgttggccagactggtcttgaactcctgacctcagatgatccacgcgccttggcctcccaaagtgctgggattacaggtgtgagccactgcgcccagccagattttatttctttaaaaaagaaacttactagttatcaggacacttgtgttcttggtacttgattttgtcagcattatttttaagagcctcttccctccttccccctacctccctgttgagcccaggctctgaaataacataggtgcatgtgaagttcccctacctgccattaccagacattggtgctgggcggccctcacctccacctcctctcacctgaggccacagcggtgtgcaaggatgtggtctgtcttgagtgtgttttcaaagcagctgtttggtctgtgccttggatgtttttccacagataagcccaaaagagaaccacatcttaaaacgcccgtgaccttgaatggtctttccggaggggcggctggatttgtgctctcatcgtctcaggtatgtgtcaagccactgttgtttcagagctggacacaggtgcttaggaaaattcctcactgaagggttttcaggatttacaagttcttgctgtttttgtgaccttgtgtggtttctggtttcacagaaggctttgtttcttggttcttgttgctgctttcagccttggcctgtaatcactgggcgccagggagggctgcggtctgtttcccggggtgtgctcagataccgtgtcagttcacatgtgttgctgcagcggcagggggccaggcaggaggggcgggtgtcctgaagcacgctcaatttgctgatcagggccttcacttggattttgcacttgccgcagtggagacattcctcgtagctactcagtgtggtttgttttaagtgggccatccgttaattcatgtgacctggaacttggttaatgtacttgccaaggttaaagttgagacgctgtttgttaaacctttcaaagagggaagaaggttgccttgaattcagttccagggtttgggagtctgagagggaggtggtgaggggcccggggaggccctgagaaacaaaatgctggttaaggacacagtctgctcaccgacctcggaagtctctagacgtctaaagaagtccaagcaaggaatgatgaccgaagaggaacctcaagggtgcaggcggctctgggatctcagcacatctcagtgatggaatgagctgccggggaatgacccctgtgggggctgtccaaagtcagagcagacacaaacgtagctctccaggccccataccttggtgggcaagagggcagcaagtgcatcctcacagttgatggggagagcagcatttcagcctgcagaaaagagaaccacacagatgtaagatgaggtctgcactcacttgcctggtcatgcagagacggagctgggagcagctgcatgacttttcagagaagtggcacacgtttactgtaagggtcccaaatgtagaccactgcagatggtaaggtctagatggagggaccaatagtagggaagtaggggagaagaaagtaaaaccttacagtataaagacccatagatgctcttttgtttttgatgtgtgtacgggggttagatatttattgagcacctactgcatgacagagtgttcagcaatgacaatgcagagcttaataagaacaggttctagactaatcttttagggggtgaggatagaacagaaataggtaattatgtcctgagaacatgagagagtgttggtggacagaacggcgatgtatccccaagggcaactgaagccttcacagaagatgcaaagcctgtacgtggtcctcggagtcatgccacatggtgactggttatcttagtcgtaggaaaactgagaagctttgaggcatgttctatctgtctttgtgggcatcatcttcattatttgaacaattcagagtgcttgatgccttttgcttcgttctcacaatccttgacactaagctgtgggcttgggttatagtcactcattctgttattcatgtcattttgcctatccttccacttcacagatgagaagactgagacccagagagggtcatggttttcattagccaaatggtgcagaaacccagtggtcacagtggctctctagctctttgtcacccacagggcccttgataagagtacggtctttctccaggggagcagggttgaggagtgggggcagccctggcctgggtggccatatcctgatttcccctcccttggcccatagctctctatcttgggtgaggtgagaaagtaaggctgctccttgactgtggtcccttttgtgtctgtcctgcactgggccaccttcccaggggccttgtgtcagcctggtagtggtgctagtggccttgaagtgagagtgggtggatcacacatggcagatctctggcagtgaccttttctgtggatttccggtgactgatgatagcctctttggaagtcagcatatgcatagctctctgtcttttgaaaacaatggaaaaacccaccaccagccccaaaaccagctgtctttcttcttatgaatagatatccatgaaaagcagaagagtagtttcttgtaagtactctgggagtgcataatacattttaaataagattaaaaattatgttttattcttactagcatcactgtcagataattgagcgtgagagcattcagtgctgtgtgcttggtacgaagtagtaacatcaattcagtgttcagtacatccactttgttccagaacaatgtattcaaggtcggtgtattttggctgtgccacagagttctggaaattcccaagagaataagttttcacctgttatataatccagcacaagtgactgtgtagcagcaacctcatgtttcatgatgactttaaaatgcaattgattctaaaatttagcttttaaaaatttcgacttcagattttctctgaaggtttaaggtaggcttctcctttattaattttttcaagaaatatttaagaacactgctctgtgctatgtaccattctaagcactttacagatactaattcatttaatcctcagcctggttaggtaagtactgctattcccaccgtacagatgaggaaacagcctcagaggagttaaaacaagttgctcaggttacaccgtcagcggtttggactacttcagtttcagataatcactgtgaaattttactgttttgagctacacgtttcaaaatcttttctgatgcggaactatcattaaatcatataatccgcttctctggagtcagaggttgacaacacattagcacttgactcgagcctctccctggaggaggacattccgtctgcggggagccgagtccgaggctggagcaactctggaaccacagccctccagtagagggcacacgagagcaggctatctgtggagatatcctgttggcacaggggtgaagatgacagaggcgaacccaagcaaagagagttaattagcagagtttgccctccaggctcggagggcaagtcagcctggggacctggagttagttcccttttcagctgtgaccattgaagacattcatcaagttctctggctccgggatgtcagctgtggtagtgacttgcatgggaggttatccgacatacctcacacactttaactccacctcttcagagtttgtggccaagaatggagccaggtggctattttttttttttaaatttatgtaataacaaacattcgcatttattgaaaacttaaagtataataaaaaaataaataaaataaaaaaagaaaaaagaaaacttattcctgtgtcaggcacttttctaagtgctttgcagtgtattgtctcatttaatagttgtttaaattaacagagtaggccgggtgtggtggctcacatctgtaatcccagtactttgggaggctgaggcgggtggatcacctgaggttgagagttcaagaccagcctgacaaacatggagaaacctcatctctactaaaaatacaaaattagccacagtggtggcgcatgcctgtaatcccagctactcaggaggctgaggcaggagaatcgcttgaacccgggaggtggaggttgtggagagccaagattgcatcattgcactccagcttgggcaaaaagaatgaaactctgtctcaaaaaaaaaaaaaaaaaaaaaaaagagagtaaataaaattgtaaggtgaatatgttatctacttgatggaattttttaaactaccttgaaaagttttatagtttcctatttacagatgaaattaacatactaattataaatcatgcctcactattcactttaggcagtctatctccttaaggatctccttacggtttagatagataagtgaattgcttaatgtttttggaagtaataaaactgcatttctttttaattaaacaatccagataacaagaagtaattctaataggaaacttgtaggatgtatttacagaaaatctacacaatcttactgaacaatgtagaaaagaagatttaccagcctgggcaacatggcaagctttgtctcttaaaaaacaaaacaaaacaaaatttagccgggagtcgtggcatacaattgtcatgtccacttctcaggaggctgaggtgggaggactacttgagcccaggaggtcaagactacagtgagccacatttgtgccgctgtactccagcctggatgacagagcgagaccctgtttcaaaataaagaaaaagagatttaaatgaagcgaaatgccattttctctaggtgagaaactggaatattatcaatgtcacttcttcccaaattgatttataatttaaaaacaatttcagtacttctgcagcttgtttggagcttgataaaatgattgtagagtttgtcttgaagctttaatagtgaggcaggtttaaaattgggggcaaaaaagaaatgggttttagggtgtagaagggacttgcctgatcacttttgctagaaataaatgtccctccaaattaaattactaatgtcgcacatcagatcgtatttaaatccattagaagattttactgttccattagagctacccatagctggtgaagactctgcttatagtggaacctagtttctcagttttccatttatatttatttacctgagctttttgtaaagtagtaagtacttgactgaatttctgctatttatcaaatgctttttgaatagaaataatgagttaataacatttagccttttttggtaaatagtataaacaagatagggcaaatatgtaaactacttagaactttatctaccttgcatattttgtacctcttatttgcatatgcatgtcacatgctccttatgtaccatgtgctattactgtgccggggtactggggctatattgagtctatttcctgtctttgtagacttgatggataatttggacagcattgtgatattccaggtttaagagtcttaaggttcaagactacattaaatgttaatgtagtccaacatttcttgaactctgaaatcctctgagcatcttttcatgcactggcctaaaatgttttcatagcccagcaaaaggctgattacttatttccctcctattgattttttttgagatggggtcttgctgtgttgccctgtctgcttgtgaactcctgactccggtgatcctcctgccttggtctcctgtttatgttttaaatagcatttctcaaacctatttgagcaaataactttcctgttaatatgtagtattccttgaaagaattgaatttgtgagtccctaatctagacacttttaaagaagaaacaaaactcagtaacacatttggataaaaacctgaatatgtccattttgggatgaaaggaagcagctttgtttaccatgttgaattaagtggaaaacatcttattttaatcatgattgatagaaatctaaatttgtaaattctgatttttatgttttttttacaatgaaaatacattttaaatgtcaccatccccttccccatgaagtcttcattacaactaattttgaaaatactctctcatttatttatattatatatgcatatgttctactgtataattttaaatacttaaatggggttatctttttgcattgttctgtatcttttttcagcttaataatttaccttgcttataattattgtcagtgcttgcggacctgctctttatgcatttttaaccattgcataaagctggaatgatggacatgatttctttaatcactccaaattagtcatttagttgtttccagttttttagtattacaaataactctgcaataaacatgtcttgggtatgcattcttttagtttaaaatagtcttgttccttcagaaagttgctcaataatagacttagaaattcttttgtgctaattactgtaattgctcattttaagatctccttttattgttttcatagtatataatcctaaactgttacaactgaaatagtccttgagctaagaaagcaatgtggcttaaagataggatttctaaatagagacttaaaaattaacctttttggagctgtgacttcctgatgaagtggcagcacacaggctgaatatgttctacatctggatggcccaacatcatgatgctgtgatttgcgagaagctctctgcctgcctaggctgctggaggatggcaagttaatttatttgttgttgggagacctccccctgcccccattaaaaaaattattttgaaatacttgtagattcacatgcagtttcaagaaataataaagagtaattccatgcaccattttcctccaatagtaacattttgtgaaactagtacagtatcacagctaggatattgacgttaatatagtaaggatatatgtcatcaccacaaaggtacacctacttcccttctatctctcctctctccttcatgcctggttacaaactaacctgttctctctatataaaattttatcatttaataatgttctgtaaatagactcatagtatgtaaccttttggaactgaagtttttccatcagcataattccttatagattcattcaggttgctgtgtttatcaatagtttgtttctttttattgctgaatggtattctgtggtgtaaatgtactgcattccatgagcatggcatgtccctccatttatttagtttttctttgatttacttcattagcattttgtagtttttgtagtcctgtgtatgttttggtagagttacaccctaagtatttaatttctttgctcattgccagtatatagagatacaacttattgaactcactttttagtttatgctagtttattactaattatcaatacatgctcaagatatgtcaactccttttatttttattaggtgtcacttgctacattttgtggagaataccgatgctgttgctagaaagtgctgctgtcacaaagtgggtttatagatagtaccacgctatccttcttcctaggctagattagaagttatttatgtgctatatgcacatagagtttttgattggtctattgcaaatactatggcatctgaaattttttttttttttttttttttttttttgagatggagtctccctctgttgcccaggctagagtgcaatggcgcagtctcagctcactgcagcctctgcctcccgggttcaagcgattctcctgcctcagcctcccaagtagctgggattgcaggcacccgcaaccacacccgggtaatttttgtatttgtagtggagacagagtttcaccgtgttgaccaggctggtttcaaagtgctgggattacaggcgtgagccaccgtgcccggcccctgaatcctatttttaagtataaaaagtcttttttcagctctggattatggtgctgcaagctgatattcttctcatggcagtaaacagagaagtcctaggggtaatcttacccctctggggagtccaggatatctgagcatctcccttttctttttactgctagaaagaatttctgctagtagaatnnnnnnnnnnnnnnnnnnnnaccccccaccaccccaccaccgcagccatcattctgttttctgtctctgaatgcgactactccagggaacctcatctaaatgaaatcacatagagtatttgtccttttgtgactggctgatttcacctggcataatgtcctcaaggttccaaaatacacattttcctgctgagcaatttagtctaggttaagtcatacttgaccatatgccctagtttagcgtccagtttgtgaacattctttacctgagttattgtaattctaatctcttatgtaaaactgcaggtagtcagccctttgtctccttcagttctacatctgcggattccttcaactacagattaagaatatttggggggaaaaacagtaaaaaaaaattacaatacaacaataaagacaacaaatttaaaaactagtataacaactttttatacagcatttgtattgggtattgtaagctagagatggctgaaagtctatgagacgatgtgcatacgttatatgcaagcgctgccattttattgcagagacttgagcatccaaggattttgtatccgtgggagtcctggaaccaatcccccttggatactgagggatgactgtatttacaacatgtctagattttcgacaacttgaattaaaccagaaagaatatgaacacacagaagttcatgtgtatatatatatgtgtatgtgtttagaagggagcaagctgttaaacatgggaaatagttgctagtagtttgtaattttatgattacaattttaaaattcaattttgcaactggaatttgacttgattggttagtgccttacagtaattaacctccaaatcatcagaatgtcatcttgttatttaggtaattgaatctacttttcttgtatacagaatgctttttggaaacaatacactgtatatctagtttgtaccaagaactaattgtacacagtcagatacttgcagttcttttggacttgagtttctttatccttctatcagatgtcacaattccctcttccctttgtagcatatgaaagtagttgtgtgtgcactgtatttgagaatgtcaagtaatagaatctctagaaaacattcatgatttcagtcccaggtaatccagagttaaaaataatgttcataaggaagggtagcaaaatttagattttaatacttataggaggtgtgttaattggccccagggccgcaggctttagcgttcagaggactttagccccaaaggttttgtggaacttttccagagtcctcaccagtacattgggaataaatggaatgcctttggaagtactttgaagattgaattcgatagtgttggtaaagcagtctagcctgctgtgattgtgctattgatgcaaatattctctagcctgtattatttttccttggagctcaggaagtgatccccacccacctcaagcagtaaaggaaagagaggcaggagggtctgaccatgtgaggtgccccaataaagcatctgtattgtaaatcaggaatgtaggtattgggtttccttaaaacaaagcacacctacgtgaccactagctggagcacaatgtgggctcggtctgctgaaagagtcagttggttgcggctgtctaatccaattatggatggtcccagcgctcagcctttcagctgctgcccctcccctgcagactctgcctctctcaccctcccttttagggcttggtctgtggctaccccagaaatcacgtgcactcctaggcttcagcgagtacagccttgttaatctcagacatggaaagcaagttgcctaggtctacagatgagtattcagtttccccaccagttgacctcagtgcaggttttgttggttccagtcatttggggtcagcacctgtttgaagccaggacacttagaacaaggtggaggaaaacctgagggtacatacagtgtggtttccttggctcatctaatgcagagtcagaatgattagccacattgcaaattgtctttactcagtggtttaattgttaaccagggagttaattttttttttttattaaacaaagaagaaaacacctctagatttttctgggacagatggccccattgaaagaggccatgtgctgcagcgaatggccaggcctcgggtgtggcaagtgccttccagctcagtgcttgctttgtgctcctttgcctatttgaagacgtggatgaatcaaaatctataagcctatttcagtcaagtattctaaggaacctggaaacacaggggatttctctgttgcctctaatacagtgaaaaaccactgtctttttttgttgttgttgttgcattgggggaagaaagtccaggtttgcatgtacattttcactcataggatttttttttagaatagtttggggaggacattgtgctctggccaataactgggccagtgtctggtcacaagatgatcaggcaggtgcctgcatgactgtaggacagagaactgggcagctagagagcctgtgtggaacgtgaagcctttccccactttgttgccgtcctaaccttttctcaagtcatggagaattgatccttagacattccttacctctctcacccacttgaggattgctcagagcctgggtttcggattgaaatagcactatttctggttgatgacgacattctgtgagccagcaatgtagtttaaatatccacaagagcgccctggttccatcagcgccccttcgtaattggtcatgagacttggacctccttcggggctgggactcgggcaagggagttgagtagagcttctctttctgggctcctgggaaggattcatggcataaaagtgggacttcagcattctctgggcacacctgtctctgtttttgtcctctcctgaatctttctggcctgcagagcagaataaagtcactctgtgccaacctgacttttgttcatgactatattaggggcatggatagaaagtgcccccatagcactctcagataaaacaccttcaaacaaacccagaaacccatgctcacaaaaccacccaccttaaattatgaaactttcaggctgactaaatcctgaaggcgttggagcgtgagcaaagggaaaatggtgacacagagctttgcccttcctaatccaaatgaaaagctctgtaaccctccccccacctttgctatcaagaaatgttggacctttgggaagcagatgtagagtattgatccttaaaacagagacctctcaccctaggtctcttaaaacagagaccttaaaacagagtattgatccttaaaacagagacctctcaccctaggtctcttaaaacagagacctctcaccactttctaactgaagtgggttccacattggaagtactttgcagaaacttctattaccgcaattacttttgcaccaacaaatagtatcctcaactcagaaggaaagaattggaacactcagctggaggtgtctggtagggacatgtgtctgctttttgaatcagtcgtatatgtttttgttcctgtgcctggaggccctttgtggtgtgagaacattgaatttggagagggaaagggagacaaaagagaaatgggggtgatgcttaagggaaagtagggtttttagtttgttcaccacgcttgatggcagatttgcctctggatcctcaggccacgttcctatggtgggtagggatctctctctctctctctctctctctctgtgtgtgtgtgtgtgtgtgtgtgtgtgtgtgtgtaaatagtgatttctctaagttaataaagaatgtggggtgacctcctacacatgcccgtatgctattgtgtaggaacaaatgcatggtaggaatgggtagactctaatctgaaagcatcaagttgtatgcatcttctgcaattaggaatctgctcaccagcacgagtgctgtggtttctgtagttctgggattcagaggagcattttaaagatgtaggatgttggaggaggaggtgcagggatctccccttgggtaaagagtgggagacagtctctgagtcataatctgggaccagtggaaggtcaaagggaagaactgtcctgttgtctgctaagtcacaggcttccttcctgttctctgagccctgtcacttacccaaggtgcagcaacaattagtgtctgtttacacataacagacatctctttcataaaataatttttaaggcatttgtttggtagaagcttccctgtttgggggagtcttttccctgaatgcatgtaaataacttcacagtttgcgcaagtttgcaaacggtctatactgctcagccttgattgggctacccaaggatgcgcccgccctgctgaggtctgacagctctgggaggccagtgaggcctgtcctaatccctgttctggccggtgattcagctccaggtggaggctgtgcagaaacagccccggtcatctttgtgtgaaatacatttgtcgtcttcattttcttttttcttctgctggtatcttcatggttttcagcaaaactgtgtacattacatttttttctttaccatttctccgtagttatttctagcatttttttttcagctgatgaaagcaaatgaagaatttgtatgctccatagtcagtcaaacattgatttctctgacttttaacttagaaagtcattttgcagtggcttgcgtgtgtgtatttagactgtgcttctacaaaaaagcacacgtaggcttatggctcagtttacttgttccagctcactttcctgttcatttaccttcttgtaaaatggaaagacaaacataccttaaacttaactcagatcgtgattgccaactttgttctctgtgtgtaagtagttatattattcctaggttatggcatcttgatttatctttgaaagaagaaaaccctcactgagttgacagggacacattgttctaggcttctacaattgtgctgatgacgctttttcccattggaatgacagggatgataaggtcggctggctagcctttttttaaaatgtagaaaaccacaactttaatttatagcatcatcattttccttatgtatgtagtatgtttcaaaaataatccaatgtcagattcttgcttctgtgatcaaggtcttgtttttgccctttctttgctcaccacttccctgcccctgacgccgagtcctcgccttagaggaggtggtcagcttatattgcaacattgaaaatgttataccttacaaagaaggtgatatgccatttcttaattataatgatgtgcaacagtgacttctgatgtagacctttaacattgggccacgcagctttttctttggaggaggggcatttcaaattggatgatgctcttatagtttaataaagaaacaagcaaacaaaataggctatacagggcatgtgttcttaaactctgtgacagtggaggtgaacccaggcccctttcatggccttgggagggtcctcagctttgggggcgagttatctgggtggaaaagcaccatgggaggaagaagtcagagaggcgggttgctggagctcagagaataaaagcaagtctctgccctgaaaatggccctgatttgcttcagatgtactctgtctgccaacatttagtgtctgtgacttagccaaaggaaatgtacattaactgttcagtttctatgtagtttgtgctctaggattttgcctccggaggatttctgtgaaggaagctctgttcaagtggctctgttccacttgggtttggaaagaggccgggacaggtgatttcgaaggaaggatgaggacaatggaggagatgggcttggtcattgcagtgtgtgaggtggcccagcttatctggcattttggggtactatatgtgccatatgaggtgggtatgggtgtttgaagggaaagggggtggcctgggcaacttgtgtccttgcctagaaagatcatcactctttttatttaaaagaaacatgtgaaagagccatcagggatagttttgtcctccctcttcttacaagtgatcattcccttggtagggcagtgccagaccctgcttgtgagcacagaaaacgccataagctcctcatgaaagcatgtctggggaagcttatctcaaatgcagtttgcacttgcaaaggtcctgtggtatagcgggggagcaggggagatggagtctgggagcggtgaaggctgggtcactagctggctttgtagcctctgggcgtgttgtttttatcctcagaggggccactgcacctgctccatggtctcttcccacagcagacccttctgtctctgtgcctcgaggggctatgtggaaagcagagaaagactcaaccagagtcttcccttaaggaaatcggaaggaaaacaaaattaacggcattagaactgagtatgtattaaaacttctactgtcttacaaaatttagttttctttcttatttttctttccatgttgactcagtaggtaaatggactaaacacacattcatttagggcaggaagaacttcatcatttgattacctttagttcatttaccttataatgcctaaaacaaagcagaaagtgacgttggttaatcaaaaagatcactttcttttttgtgttcttttgtgctattgtgagatgcctcttctccagcaagctgtagttgttcacaaagtaaagctgttcctaagccttcattagattgaagcttgtcccagactttctttaaagaagtttgcatagcttagttcatgctcagatgattcagtgatgatgatgggttgttggttagaaattacttaaaaatgcctaatacattattgactgataaatgttaagacatattctttaagggtctaaatcctattcttgtggagctgcaaagatcttgggggtgtggttgcccttgtctgttgcatcatctttcaaatgcaacagctgtaatgatattctgtatcttgaaaaacttaaaaaagcaacaactaacttatttgtatcttttcctctaatatttagtttttacttcacttgtaacttattacatgtattaaggagtttatttttttatgacattttactcataaaaggatgaaaccaagattggtgatctgttcacatagattaaaatcctgtttgtgaccacttaggtgtgtaatgtgtgacttgtggactgtgtcagaggaagattttccaaccaaaagtacccattggtatcacagatgaaaagtccttataccatctgaaaaaaagtagaaggtggggagaagcttgaaaacctaaggaggccattaggaaaggctgtatattttctgattccgtttaaaattttaagttggtgaaaatactatgtgatcgaaggatgaacatattttagtaaatagagttatagtgctacaatgagataaatttcacaggtaaatgtgacgtagctaatgcataatcattctttgtgttgcatggcaattctgtacaaatagaaggtagcatgtttaacgttcctgttatttcacataaatacagactgagagtttcagtggtctggtttgaaagggaagaaatagaagaaggaaggagagaagttggcagaggagcaatctgctctaatatcctccagtacacaatctagctataggtcctcacctggcagggtttgaggatcagaatggtggctcaggtttagacaattctccctgtttgtggggcccagcagctagttaagagaaaaatcttttttccttccctattaccctataaggtccccaaattcattgtatgtagaatacttgagtcagaataactttcctaacacttaagtttcaggtttgttaggtatgcctgacagctctcttatcaactcccatttatttgctaatctaaatgaaagtttgatggtagagtattgtaaatgtagggaaggtgaagtgttcaccttccagatggtagctatttatctcagcaagaagagcagatgactaacacccaaatacataaccattattatatgacttagcatttataaggcatttctatgcatcctgagagactagagcactctcaaatgaggtttcagagtaagattcatctttgcaaatgaagacaaattagcaaaatcttcctatttttaaagtgtgccttttgatttgatacctatttatttgtttggaaagaagcttttaaaatcaaaaccatgaatctgtggttatcttcaaaggataaattatgataggtagttgttacccaggttaccattttaagatgattatggctggcccaaattaggggatcttttcatatatgtattatatattttaacttcagtcttttaaaaatgaatattcctaggtggcatgggagggtgggaaggtcaaaagcccaaacttctcttacttattggctgcttccttgaacttagcgtttttcttttggaaaagtgagcttttgtttttggatattttgtactgatactctgtgcctacacagattttgttttggttcaataagagttgatattttgccaggggttgcctcccatgagattccaaatacagatgtaagtttaacaggcttctgaactggatgtttctatgcgctgaaactctgtaaacgcgtgtagctttgtctaccattgtatattgctgtattgatttgttgggttgttttttttcttcctcctgaaaagctctggtctgtcctctgctgatacaaagactggtccattccccagggtcactgcaagagaacctccagggcctggccactgttagatattactaatctgtgaagttgctccaaattctcttgccccgatcataaagttccattgagttcaattttatgtgaaggttctttgtcaaaaggaataaatgtttattcaacagatccagttgttgtcagcattgacagatgtgaaaattagcaaatagcaagaagtctcccctttagaaaaggaaaacaagtacttaaaaaaaatcttgtgttgtcaataaacaagtccattttaaaagcatctttgaaggtgtgtaatgaaaatggaggccttaggttgtatcagggtttatgaggagccagcttatctgtaatcagatgttcctgttactgttatcactgtagtatagggcttagttctgccctttaagtcacagactcaagttactcctgattttaccagcagtcagaatacatttttctttaaaaggaaaagagacgatatcctagtgcttctctatactaaaacaggaagagaagcttccttgttgaagtgacagtttagatgttgttattttgacagaaatattagtaaatatgtcacattatcccttgctaaatatttatagcatagaacgtatactctgatgcataatattttatgaaagaaatatcttttgcctcaaatccctttcactgttttgacatgaatctataatttatacccagaggtctgcaggaaaaagactttattaagacccttttatttcagccaagataaaactccatcctaagagggaacaccctggaatctttgagacccttaaaggtggggtattctgaaatacctgtgttcgttcctttgctagaatttagatagcttcacttttgcaaaaaggcacaaaatgagggcaatttttgatggaaaattttagtttttgagatgaagcagggggcacagtggcgaagcgccctatcttagcacttaggtagcagccgtaacaagtgtcctgggtattcctccctagaaaggaaatgttggtcacaaatggcagtgtcctctgcattcagttcagctatgtgactgaaagacactgttcttcagcagctgtgagtttacaagatgtcgcacattgagtatttttctctagcttatttagaaacgccagtctagacttccgcagttttggattcgtggccatagttttggcctttattagatggccctcaaaggtacttttcaggtggacattgatttcatgccagctgtcagagatgattttccctagaaatggctgggtatatggagacattctgtattagaatggaggtatacacccatctcttctgtattagagagcaggtgttgccccccgtggtgctcagattgcttagtgtgagaaggaaaagaccagtgataagaggaggaaaactgcgccttccatgtagctcagttaacagcatcatgattctccaggatggccccatttctgtttttatttacaaaatggacttgagaattaattagtaagcaaactgtctccattaggtaagtggcattctgatttgtctgtgtaaagttccatttcccaagtaatgtgttccaaagcatttttatgtacaactactggaaactgctgtacaaatgtttgctgctatttggttgtaacaaaatcagtaatgagtttcaaaatggaataatttcagagcccttcatctacagtagtttgggaaacacttgaaataccaagtgatctgaattcactacaagctctccaactggaaaatgtgcctggtgtcgtcttcaagcaagaatcccccgccccttaaccactgctgctgtggacttgagtcttcaaccttgttttgtagactttagcatttgtattgtgtcatccttgacacctccccaaccccagccttcccagctttgattgcttaccttagcaatgctctcagcttggaccagaaggcacggatgtttccctgaccttaacctcactgtgtatcagctcaaggaagaagccagatttgctgatgttgtaagcactaaattatgttcataacatttaaccctcacatccataagcaaactaagtgggaaaataaagattgactattgtagcagtcatagattgtttaggaagcagcaaaaaggcaaatttttctttaaagttcaaaatggggcgaaagagggtaggaaaggaaaagtttattaagaaaattgtatactacattaatttgactttgccgtctagacttaaattaaattcatgtatttttttggtcttaacacattgacatgtatcagtaagttaaaaacttaaaaatacacaaatgattagattagcattattatgtgtttctttcttgttttttgttttgttttgttttgttttgttttgagatggagtctcactctgttgcccaggctggagtgcagtggcatgatctcggctcactgcaagctccgcctcctgggttcatgccattctcctgcctcagcctcccgagcagctgggactgcaggcacccgcaaccacccctggctaattttttttgtatttttagtagagacagggtttcactgtgttagccaggatggtcttgatctcctgacctcgtgatccacctgtctcggcctcccaacgtgctgggattacagtcatgagccactgcgcctattatgtgtttcttatagaaaatctctctaattttttaataagcatgtttttacaaatgctgtttcctgagaactgtcgcaccacatgcgacatgccatgcatgcgactggaacatgccagatatttgtgggtggtcccttcgtgtcacctgtgccttcttaccaagtaatttgaaacacccgtgtaaactacctttggcaaataggatagctaaatcaccgctaagatttataatttactttttggatatctgaaacatcaacaatatagccatccatggcgtgttcctctggagtgtggtccgtgccgtctctgcctgctccatctggctgatcccaggcaggcagctcagctctcagcagacacagatccccagcacatatgaacgtgaaagaggcttctccgtgggagcgaagtggccagcaggtgtcacaggctgtgtgggcccagcatcgtgtgggcactgctgggggaatcccatcacagcatgtgctggcgttagtagtagactgtgtgtgtctcagagggtccagaaagtaatacagtaaaggcgcctgggggtgtgtgggggtggttggttggggtttgcttgttagtttgttgtaaaagcccagcttttcattcttggaaagatttcagccaactcgagagggttacctgccaggaatgctgcagaagcaagaactcagtgggtgagcacttccatttcttcaacaaatgcttctgagtccctgacctgtgccaggtgctcttcttgagctgagaatcctgcagggaaaaaagagataaagaccccatagtcctgtggtttaccttctaatgagcatacttttgtcgatcaaacagggtgacctctctggtgtctctgcacactacctgtatggtctttccgtagctgatggggtctcctgactagtgattggtgattttaatctggattttgccacagcacttattttctaacatatgacttaatttacttaataattgtgtctattgaatgtattcttatacatacacacaggcatgcacacacggacacgaatataagctttacaaggacagaaaccttatcttttatttatttcttccttgtgtatcctgagcactgagaacagcctggcacaaagcagggctcaggaaatgtttgctgaatgcatgttcacactggatgtgttcgaaggctctcactcgcgactcctgttggcttgtggagagtgcatctagctgtaaaagccatggtgcttggatgtcttggggtgctgagcctgttcccccctcatttgggggtgtggtgctatgctggcgtttgggtccatgccccgcatttctgatggctgccccatctgccctgtgtggggtggcagagttctgtgtacacagagttacatttcgttgttcctggcttctctatggatgacagcagcactgataaatgccacacctgctttctcagcagtcttgcggggtgatttttcctcttaaggaagtcacctgatgtccatgctgagtaggaaatgcatccaaagctttgggagctcagtgttggcccctgggctgcagcccgagccccgttttagagctgtgtctcccaggcagctgtgatgactgctcgaaagcccactcagggggaaggtaaacctgatgcccgggtgtttggacagtgagcatggcgagtggaccgttacctgtgcatagagttgttcatatgtggtgacagatgttgggctgttatttagtaacttcaaattgtttttctttgcgtcggagccatgtctaggttctgagtgcttctcccaggtcagatggagagctcttcatttggggttgggggagcggggtggtgttttcaggtgcccaaggcattccatgcacatgcacctgcagggtatgtgtcatctggggtaagacagagccctcccggttcctcttctggatgtgtgcttttagtttttaaagaatgtcagtatatacattgccatttattcaacaaatacggactgagcattctgttgtgctgacgtagctacttggggttacagagacaaagccaactccattctccaaatggaaaacaaatggaaacattctagtggtagaaacagacaacaaacaagtagacagaaaataatgtcagacagtggtaagtgctatgaaaaaaatacagactcactgattgtgatggagacttttaagttggattctcatagaaggcctttctgaagaggggacatttgccctgccactgtgaatcagccatgagaagacgtggagaggaacatgaggtggtaggccccagcgagggaaagatctccatgatggcatcgattattcgctccacaaatattattgagcacctgctgtgtgccaggcactgttcctggtgtcagggttatagaagtggacaaaatgaggcctctgcctctgtggagcttttattaaagtagggaaggggatgggagggctgggtcacatgttaggtgtggggtacagggtacgtggtgccaggcaggtatccgggtacctttttacgtagggtattcagagaaggtctctagagaggtgacatttggacgaagacctaaaggaaagggaggggaaaggcgaggagcttggagagcttggtgcatcttggtgggggatggggtaaactgagtcagttatgtagggccctggaggccacggtgaggacttcggctttgactctgaaaggagatggcagagtttggagctggtgtgtacgttaacaggaccatgctggcagctgcgttaagagagactgtaagggcaaggacagaagtagagagaccagtaggagtaggctgttgccccagtgtagggcagagaagatgaaccttagaccaggatggtggagatggtcagtggagagaagtagtcagagtctggaagcaccagcaagactgtctggtgcacacaggatgcacgtgggatgtccagtgaggaggatgagatgaggttgggtggctggagcctggtgagtgacaggcagagagggctattagatcacatgggccctggagccatggtgaagaatttggattttgttctctgtgttggaaagttagcagagagcttatatggggggtgagatggcatagggacaatgttaataacagcaacgaatatttattgagcacttactgtgtaccagctgttgcaacagcctctcaagggttcgttctgctattagagccatgttataaatgaagaaactgaggcacagagaggttagctaacttgtccaagatcacacagttagggacaaacttgacagaattatgtgtgtcctggtatgtatttcagttttctttagggaaggtaccacaactttgggtaactatgcccctaccccaggatttaagatgttttgatggttgaagggcgatgtttaagagtgggaccagagaatattgaggtattaaaatctcactaaatctgtattcattatatctgtattcatggtataattcatgtgcctccccctttcgtgagcccctcaaacatgatcatggatatgttttctccacccgtaaagtacgttcatattcatagaaaacccacagagaactgcagacctgaaggtttctttgtaagagctttcattggatagctagaagggctgcagtaagtttaaaaaaaaaaaacccaaaccaccctggattccaggctgcacagcctctaggaggtgtgggtaatccctttataaagcttggcataatttctgttaagacttgcttattttgctctcagcttgctatcttgatatgtttgcctttgaggaggttagagttattgtgatttaatcacagaccatgtatttcgcaagattcatttggtatctccagcttgttttcttgtttcctcggctgtcagtccacaggcagaggtgggaggcggccggcatgggggaccgagtgtggtagaaaggagtgtttacttagcggaggggagtgctgagggctgctgttaccttcccagaatggctgatccccagcagtgatgagcaggctgggatcgtggtgttaaatttggtattttctagaaatatatagcaggctttcccctccacctgccccccttcaaggtttcgaagccttgtgttttgcaagagttgagaggggaacagttaatagcttggattatcttgtctctggagagaatttatgtatcaattcaccggaagactgctctggtattagggcaacaagaatggttttatttctcccttcctttcctgcactctgttcttatgtaattcttgtattaaaaccattcctggtaaattagaacatgctcttgtatttgggccctgctttgaagaaggctgctgagtctaaaaagtttggtagcctctcgtttctcatggtgatttctgagatttctagggacttggtgttttacagagcttgttgagttgcacaaaccagcctccttggcccttctaggtgataaaagatgctgggctgggagggcagctgtggaaaagggtgtgggcgagggagacagtgcttcatcctgcctggatgaagcatgttggttgttggtttattcataaattagaaaaatatattaagaattgaagttgttccttatctcataagatttctagcaggctgcataaagtctgtagatggtaatatccatttaaaagtggacaatgaaaaaattacctctttgggagttgtgttgctatctctaccccaatttggcaatctttaattaacttggcaacccccgttttaccaacaaagaacaacctttgattaaaaaaaaataaaatgtcagggagtgaaagatacggagtgtgactcagcagatgggaattcctttaataacacgctgggtgttagcgttagaaccgccactgaacagctctgcaggatgccctcccagccctccctccgcctatttggattagaccaggagactgcagcaaacttctcaaggggaggcgaacttggtgttggtatctgagcgattgtctgtttcaattgtttccctctgtcttggaaaacaccggcacaaaacacaaatccagtcccagttcctgcagctgctggggcgaagcaggctttttatgaatgaggcccagaagggggaggagagggcttgtgttacagcagcagttgggtaatacatttcattcacttgcagccatctagcccaggcttcattttaaaggatattgttcatttttggcaattcagattagactttttttcttccttgtgcaactgttggtaagttagaacacgaagcatgtgtgtgcattctttttgcttgcttttttgagtgtttgctcctttagttgggataaatggtaggagaggtaggaaggctttgtcatccccggggaccttgcttacttctccctcccagcaccacttaagagaagaggaggtggcctccctctccccaacctcagagccctcaaagcccttgatagtgagcctgagcacttgttaggaggtgacttctacctggggtgtgctggggtccacatgtgccagtctctctgccctgctccccgtgagcggctctttatttgtggcccttgaggccccattgttgtggccaccaaaacctgaattggaagctgtgtgacaatgctggtccccctccctgcactgcttcctgctgggggcagaacaaagagagcgggcattgtctctggcataaatgaacctctatcaaaacaaacacccagagagaggggcagcctggttacagctgcctgtgtgagcctcgacagtgggcctcattcctcacaaagggagctttgaggcccggaagaggcctttccttgatgatcgagctgtgcacagggagcaaaccccaagccgactgcttgtctgtgccaccctcaaacaatgatttccccaaattggacagcctgggtttgtatccttgagcacggttttgggaagagcattctgcatgaggcattgtagctatgtgtatggagtataattctgttttcaggttgctctgccacagaggttaagaactccctcttccaaggtagacattgagaacagagacgaccacactgggttttcactgcagcttttaaacaggatgactcccagcccccatccccgtggctagcagcaagcagggactctgaaacactgcaagccaatggactgagcatcttacttttgctgtccgtgttttggtgttttgtaaacccatctggtaatgaccctgatgccccatgtcccagcaagggcataggtacctgccattgtgcaccaaagtccctttcctcatggccctggctgttctcctgcatggggtcatgtgtgtcccgttaccaagttgtggccccttttcaaccttgagtgccacatctgggctgttgtaggcatgggtagtacaagctgggtttgttactctaaaaatgaaagggaggatcagttgttaataccttcctgtaggtgcgagagggaatgagttgaggattcgatcactgtttatagccagtctcggatcctgattgtgaagtcattctttctggataataactactatatccagcatcttgagagtataaaataaaggcacatgttgtacgtcatctctgagatgtagcgatggcttggactttggaggctgatgagagaaaactcatggtggtgagctggagcagggtgtggctggcggattctgaaggtgctagccctagttttacagctgaccagggaaggtcattgaaccctacagtcttggccctgagagaaccttggaggacttaaggatggagaaaggtgacaaaagagatgcaagccaacagcaattttgtggaacaaagtgtgtacaggatttgaacttaactctgcgaaagacaggggttgcttgtatgcacgaattcacatctgaagaatgcatctgattgtggctgcaatttctgtggacgtgcaaacatctacctgtgcattttatttgtctagcatcattgaaagagttttttgcttgagttgatttcccaggtaattgaagcttacttctcaaagcacaagatattttttctcatatattagcggtcttaagtgagtgagacccctaagaattcttaattcctttatcttacttttcctacaggaaacttattatgttttcctagataggaattgtgctaccaaaaatgaaaagtaaacgtaatatgtaatgttctactggtaattgtttccattttaggttgacaccgaactaatgatatttaaattgtagctgacttgaaacacagtgaaaaaatggtttcctgctgtttttttaaagctggattcagtaacatgaaggtaattaaaaatgtacagatctcagtaatagacagtcatatgttgcttaatgacagggatatgttctgagaaatgcattgttaggtaattggattttatcattatgccagcatcatacagcgtactttcacaaacttagttgatacagcctactacacacctagggtccatggtatagcctgttgctcgtaggctgcaaacccgtggagcatgttgctgttctgaacgctgtaggcaatggtaacacagtggtaagtatttctgaatctaagcatagataaggtgcagtaaaaaatatagtgtaaaagataaaaaaatggtacacctgtatagggcacttactaggagtcaggcttgcaggaccagaagttgctctgggtgagtcagtgagtcagtggtgagtaattgtgaaggcctggataaatactgtacacttaggctacacttagtgaatattacattttatttatttatttatttatttatttatttatttatttatttatgagatagggtcttgctctgtcccccaggctggagtgcagtggtgcaatcacagctcactgcagcctcgaccgccaaggctcaagcgatcctcttacctcagcctcctgagtagccgggactagacgcacacaccaccatgcctgactaatttttgtgtttgtagtagggatgaggtttcaccatgttgcccaggctgatctcaaactcctgaccttaagtgatccacccgcctcggcctcccaaagcactgggattacaggcatgagccacggcgcctggccacagttaacttttttaataagtagaaggtgtacactcttaaataactataaaaagtatagtaaatacataaaccaataacatagtcacttattatcattatcacatattatgtactgtgcactgttgtacgtgctgtacttttatacagctggcagcacgggtttgtttgcaccagcatccccacaaacatatgaggaacatgtacatcttaccacggttgcaatgtcactaggcaataggaattttctagctatattctatccttacaggaccactatcgtatatgcacttcatctttgaaacgctgttagctgcctcatgactgtatttctattcctcagtcatgggctcaccatgcagtacacatgtgtggtcactggagggaatggaagaacactgaggaaatgcatagcctgtttcatatatttattacactattatttatttagaggaatgttaagaaatcttgcttttatgtagttttagaatgccatgaaatatctagttggggcattatctgccattttgcaaggtaatcttccacttctgaataacgttacaagtaacccgcgtttggaggactgatttgggactaaggcaaggaatttaggaggcacaagtagaggggaagaaataaacacatgacttttgtttttgtttttgtttttgttttttgaaagaaggacagtggtttgcttgttgattctgctttgagaggatggggatgcactccagagaaagtgaaacggggctatgggaggaagagagcagcgcacacacagcacctgcatttgattgtgaatgcgattgtgactccttaggcaggaaggagagtgctaagaccgtcatcatggacactcagaaaatacctgctaatccgtttactggaagatacagggagctgcagataattattgttttttaagatggagtttcgctggagtgcaattgtgcaatctcggctcactgcaacctccacatccccagttcaagcaattctgcctcagcctcccgagtagctggaactgcaggcgtgcaccaccacgcctggctaattttttgaatttttagtagagacagggtttcaccatgttggccaggctggtcttgaactcctgacctcaggtgatcctcctgccttggcctcccaaagtgctgggattacaggcatgagccgccactcccggccgctgcagagaatttttaaaataaatgatagattctcacagataagaagaacaggataattatttgccaaagtttgaaactgccattatattcaaaggcattctcttttgggagtggttttatatttaaggtttgaatttagatgacctcaatcttgaggtgttatcggagcattacaggggagtcttatatacatgcaggtgcgatttaatttgaagatacttccatttaaactttatgctgccagagttggccagctaagcaaaaagaattctgataggtcttattctcctccccatcccacacgctgattttttttttctttgtgtttggccgaaacattttacatttctcatttttcacagagctactgtttctctaggattgttttccctgaagtgtgtaccctgtgtttgggcagagcagcaagaccagacttccaaatggcatgctgcgttttaatgtgctttcataattgtctgttccaaaagggtgcctgtgtgtgtatggtgtgtgtgtgtgtgtgtgattcagagcacctgagagcacactgcccgttgtcccctccagcccttctgaaatgcaggccaccctttctgtttcagttgccccttgggtggcagtctgtgataactcaaggtcaggaggaagtatttgttttggttgtcttgtttaactaattaaatctttaatcttggtccttaaaagaaactaaaataaaatcgtaaagtagttctgataagtccttgccataaattattgcttttgtaaacgcacataaaggactctgaactgttgctactcataacatttctgacgccaaatgtgtggggttttgccataccaacaaccagttctctaactctccagacaccaactgggggccttacaattcagtgcagttctgacactcaccacctggagttagcacagactccacagggatgagggttcagtcccacgagtctgcccttgctgcagatgcgagtagcaggtatggggtgcccacacttctgtctgacttgcctgaaaggttgagagtttgttgccaggccccttgctttcaggtctgataacttgctaggttattaaacctgaaacttgataacttctgtagatgttgaaattagaacggcctcactcacctgggctcacaaaattccagaaagtagttgacgtcctattactggtttaccgtgaaggctctatgtccagagtggacaggacaagtggaagagtggcacagggcgaggtgtggggggtggcgtggagctccttttcaggagtctctaagaaggtgggactccagcggcaatgccttgtccatgtgctaagccagccgagggcgcacgaagtgctgtgtggtgtccaagctgacttgggagggaccagtttggggccagccccccagcctcacttgtcatgtcccacctctgctggcatctgtgggcttaaagtgccttcactcccatccttttcaactatttcttgattaaaaaaaaaaaacaaaaaactgttgaatagtaggagactctctctctcattggtatttgtgggaataaatattaaataaacactttctaataggtgttaccaggacgcctaaggaaattatctcacagagttttcaacactgtgaaaagagaagctgactgccagggagagatccctttttcctagtccttgtgaacatgtgctggacagccaggagtggcactgtggcaagaaacacccgttctctggcattagtaagagggatatagccaagggtatctgtataccagtgttaggcccatacatccataaaacattgatgtgagagctttagggcacagctgaccctaagcctaacgtgatcattaatgtcatgaaaattggagaattggtcaggcgcggtggctcacacctgtaatcccagcacgttgggaggccgaggtggatagatcacttgaggtcaggagttcaagaccaacctgggcaacatggtgaaaccccgtctcaaaagaaaaaaaagaaaagaaaattggagaatttataacgtctgatgtgacctgttctttaggtgttgaaattagaacggcctcactcacctgggacattcttcagctcatgccctgtacctggcttacagttgctcagtgaaatgctttcttgattgtagcatggtgggatttttataaatccaaatgacttagaggtaggtgtcacatttttagcagctaaaatcatactaatcgtaaagctcagattcctgtaagtagggcgctgagcacaggctgcatcctggatatatgaatagatgaaccagatcgtgtacatgtgggacacgttctttgtcctttgggactttcttttgcttggatgttggtagtaaccatgtaagttcgggcagctttctagaaactttccttgttgtgcaacattatgcaataaatgcactgctttgtgatatctgagacgttttggttttcttcagcttgtttgagttaaatttagactcctggcatagttttaggtttgaatgcattctctgagataggataaggaccaaaacatccactcagcagccagatgggattttatccttgtgctgccatttttgagactcatgcctctgtttcactctctgtaagatggcattaatagtgagggattgttgtgctgtgaggtttaaatgagctaatccctgtgaggagtttacagcagggcctgggccatagtgaaacactgtgtatgtggaagccacttcacttttgtcatagctttgttgtcattagtgtataccctgtctccttgccgtttatgggtccttctttcaagcagtcggattttctgtctgacatagtataagtttagaggaaacaatagcagctgtaagataatagtaattttccttctgaaatcattttggtgaatttagtcagaatatctgatccataaactctcattataaaacattgccttatgattggagttttttctgagaacagttccaatgaacatgattttttggtggtgaggtactatttctgtgcagtaatgaagttgtgaggacacacagataccacatccatgttgtttgggaattgtttgggaaaggtacgtgggatagcctggcatggggaagaatgatgttagggtattctccttgaggagctcagaataaccaaaggtaaagcatttggtggtataagatatattcatcttaaaaataagttgaaaataataagatattgggagatgttagccaccgaagtaaataactacagtgaaatagctctttattaattttgaaacctaaagttgaaagagttccgtattatttgtcagtatctttatcctcttcaaaaatgtttccagctttgggataaattgtgaataattgtttcactttgttttttaatattggctatgtagtgattttgcattgaactgtgatataagaatgatcatcagccccttgagattactgtgtgtacctgtgtcaccagtggcatataggggcttaaaagcaagcaagtttaatatatacattcattgagaacacactgtagactgttaggattttcggtgctggagccatagtgatgaatatgacaaggccctcacccttgaggtgcctatagtcgtgtggaacctaggtcctcgcagggactctagggcaggtatgttcttgaaagatttttttttttttttttctttttgaagagacagggtcttgccttattgcctacactggagtgcagtggtgcggtcatagcccactgcaagctcaaagtcctgggctcaagaaatcgtcctgtctcagcctcccgagtagctaggactacaggtgtgcaccaccatgtctggctaatttttatttgtattttatttttatagagacagagtcttactctattgcccaggctgatcttgaactcctatctcaagtgatcctcctgcctcagcctcccaaagtgctgggattacaggcatgagccactgtgccctatgtaaaagattcttatcaacagttaaaataagaagctgctcaagacatttacctatcctgaatgtttcaggccctcaaggtgccaggtagctgcaatatagttctagtgtagaaaagaaaaccctgatgaggtctatatattccaggactctgtctgaggccctttgacactccgggggcaccctgccgtgaccctgactctttcctgcatgtactgaggatggaggtagcctatgggtggcacagagatttgctgtctggctagcagtacttcagggtactgggtggcttgaggacctcctgttagaagcttggattcacttttcccaaggcaaccaggattggattctattagttctgggtcttgagagcctgcaagggcttccttctgcgaaggtgagtctgggagagacgccatggagtcagtgtgagttctgcagcctcccaagttccgctggcgtgagaggcttgcctggtgccagggctctgggcattgggaacattgcctggtctaccgggcaagaaacgtgaaccaccgcagtgaactggcagcgcgttggcatttttccctccatgtttttataaaaccgctgagtagacaccagattataaatcctgtgtaaatagtcttgaagagtttctgggttcagccccagagaagactggtttgggttttgaggaatacttcaagaaaatgtttgttggttctgttttccaacgtaaagtgctgcacaaggactgtgctgtgagatccaggagtgtcttttcagccctcagtgagtgcctgcaggggacacagctgctttggaggaatgtggttccggagggtttcccactctccatcctagttgctaaagtcacgttccacgtattgtgttctgatgatagaatgaaagcccactccccgcaccctggggtctaggtggggaaaggagaggtgtatatgggatagccacggggtttggcatgagctcagtagagacagcaaactgacccagacagactcccgctttagggaagctgggatgaactaagtgaaggtgggtcatgggagcaatgctgaaccactttggtggttacagtgaaggctgctacacacccagctttgggaggtggggcccagggtgtccagctttgtagaaaggcatggtgtgggggtggctggcggagggggtggtgggtggttttcctcttgaatctctgagaaccttgactggtgtactgctctctgctttcctaaggggtccgtagctgtgctggtggtttgcttggtatctgtattacatccactctgtgcttcagcctgtttgtccagttactgtgtctagtgaagctagcattcacatattttagattaaattccacactccacccccaaattaaaaccctgctatttaaggtaaaaataattttaaaatgttttattttggtctctttggataaattaatcttgaggaaagcaatacttactgaatgttgatgtgtgtatatgtctttctctttgtaccatacttaacaggcaagtaactctcttgtaaaatcagattctaaatgattttcttttcttttcttttttttttttttttgagacggagtctctgtagcccaggctggagtgcggtggcgcgatctctgctcactgcaggctccgcctcccggcttcacgccattcttctgcctcaacctcccaagtagctgggactacaggcgcccgccaccacgcccggcttatttttcgtatttttagtagagacggggtttcaccgtgttagccaggatggtcttgatctcctgacctcgtgatccgcccgcctcggcctcccaaagggctgggattacaggcgtgagccaccacgcccagcctctaaatgattttcttaagtgtaattcaggagttggcaaactacagcccatgctgccacatctggcctgccacacctgttgttgcacataaagtttcattgagtcacagtcatactcatttgctttcatattgtctgtagacaacctagaatgttagaaaattctttctctggctggacgcggtggctcacgcctgtaatcccagcactttgagaggctgaggcggccggatcacctgaggtcaggagttcgaaaccagcctgaccaacatgggagaaaccccatctctactaaaaatacaaaaattaaccagatgtggtggcacatgcctataataccagctactcgagaggctgaggcaggagaatcacttgaacccaggagttggaggttgcggtgagccatggctcatgcatgtaatccttgcactttgggaggctgagacgggcggatcacaaggtcaggagatcgagaccatcctggctaacacggtgaaaccccgtctccactaaaaatacaaaaaaaaaaaaaaaattagccaggcgtggttgcgggcgcctgtagtcccagctgctcgggaggctgaggcaggagaatggcttgaacccaggaggcagagcttgcagtgagccgagatcacgccactgcactccagcctgggtgacagagcgaaactccatctcaaaaaaaaaaaaaaagttatttctctatgtaaacaaagaaaactctccttccttataacttgtatgtgttgggtctatttgtattctgtgaaccataagaaataagtcaactatcagctgggcgtggtggctgacgcctgtaatcccagcactttgggaggccgaggcgggcggatcacgaggtcaggagatccagaccatcctggctaacacggtgaaaccccgtgtccactaaaaatacagaaaattctctgggcgtgttggcgggcgcctgtagtcccagctactccggaggctgaggcaggagaatggcatgagcccgggaggcggagcttgcagtgagagatcgcgccactgcagtccagcctgggtgacagagccagactctgtctcaaaaaaaataagtcaactatctcaaggtaattacccttttgaatacttgaggacatcttttctgtgccctctgaatatttccttccccagataaaatatttctagttcttttacttgttctttgtttcagagttttaagtctccatttgataaagtatagtttaatagccttcgaaaccacatcgttgagatttaaaaagccctccttgagagacatgaccagtagaaatcataccaggaccgtttagcaccctaactctgggagccatggctcttgggatgcggctgaagattgtgttatcgtcctgaagctctcttggacagctgagtcaatgactggaggtaggaaagttccttgaactctttcttgtgcccttccagctgtgagctgtgtcaccattgtattatttttacattgttgttgttcttgaaaaagcttttttttttttttcaaggcagagtcttactctgtcgcccaggctagagtacaatggtgcgatctcagttcactgcaatctccgcctcctggtttcaagcatttgtcctgtctcagcctccccagtagctgggattacagacgcctgccaccatgcccggctaatttttttaatttttagtagagatggggttttgccatattggccaggctggtctcaaactgctgacctcaggtgatcctcccacctcagcctcccaaagtgctgggattacaggcgtgaaccaccgtgcccggccaaaaaagcttttgaaaacttcgtcgtataatattatggccatccttccaaacgtgacctttttatgttgtattttatctaactaatttgcccttgcccccaacttttatcttggaatttcttacgtattaatatactgtcagggtccctgcttggggcattgtccttgggcttgtcattagataactccaagttggcttgactccagaggagctgccttcacacgtgctgtgaaatgtactgttgttgaccagagaccatcgttatcattaagtccacaaacctgcttcctgtctcttaggctgttccagtcttctatcgaaaaacagtggtttaagtggcttctccgatagtgctggtgaattggaagcttctcgtcatcccccttggctggggcgaggcttacttcctggggccttggcagttttgatctaactgacttatgttacctttctgtattaatcaagcctttttattttccatacttctgatgctttgacatcttggggccttgctgaccctgaagagaccagcccccctagggttagccagttcctaggtagtgaatgagtacaatgctcatatgcaaaataaccaatccaaaggccacgcccctcactcatatgcaaaataaccaatccaaaggccaggccccttaccacctttattgggatttcatactccaggccaatattgccctaccttaatcaccctagggccagataccaggcaagagacagcccctacaccccagagcctgtcagaattactccagccagctagtcctaaacctgcttaccttgtgtgatttattccttcccaaggaaaccacaataaaggctctcctccatgttttcctaccattccctctgcctcaggaccaaccttggttcttctccgtgtggccccttggcatggtgcactacctcttcttggggactgtgagtaacagactttttcagtggcaattgtcttttaactgttggcctcaccgtacctgaatagcagtaaaccctacatcttaaaatactttgagattgtcacatacagtacccagaataggtgaggatgaaggcaatttactggatgcagagcggccccagtccattccttatgtccgaatgctaagacttgagaaaggtggagaggagcctgactatcaagagttgccttcttggatgaagtgggctgaagacacacgaaccccttccattaatacatctacatattttccaccattgtaattgtattaataattggagaaaataacaatgactgtcaacaacaatagcttaatccagtagagatgaggtccggaataggttctggcctacctcagttcatgttttttactttcaatgctgaagcacaagcaaatgcaaaagcttctcttgaatgttttgtaaattgtgggataattgaggtatgtgacatggttaataacccagtgtctgctcattgagcactgggttattaaccatacatagcaaatggagcacatcatcgtgggttgcttgcgtcactagatcctgttgcaaaaccaagattcaactttaaaatacattttaatttaagttactctttctggcatgaatgatacatcactttggagcaacacttaccaggcagtgaaagctttttttaatgccctgtgtagcactgctttcggtgcccttatatgatttggatggatggatggatggatggatatagccacagggtcttgctctgttgcccaggctggagtgcagtggcaccatcatagctcactgcaacctcaaactcctgggcttaagcgatcctcaacctcctgagtagctgggactactacaggtatgtgccactatgcccagctaatttttaaattttttgtagagatgggggtctcaccgtgttgccggggttagtctcagacttctggcctcaagtgatcctcccaccttggccttccaaagtgctgggattacacgtgtgagccactgtgcccagcctgtttatatggttttaaaaacaaaaatgtatatgctctcaagatggctttcagagagcttattagtgtcttggccatttggaattccatttcacttaaattagaagagtgaaagagaaatgaatggaagaccaaaaatggggagaagaaattgtatctgatataagcgtggctctacctgggagaatggccattccgaattactggaaacaggaagaagacttgctatgatgcttccttatatctgtgggggaaaatcaaacttacattctgaaaggaaacttaatacttcatgtttttaaacacaaaaggatattttttcagagtagcagttataaagttgttagtttaatcttttagttcagctttttttcttaccagaaaaataattagtagtacaaaaatttatgcgtttgttttagctctattctgatactgttaagaagatacatgacataaaaacaggaatattttcagtcagtgattacaatttaaaatcatattcgaaatttaataaaaagtttaaaagaaatcaccagcataagatgttgtcatttggctcttggggcaaaccagctctcttctggtgaaagaactttctggatgaggtcgaaaggcaacagaaaacctggggaacaatggctgtctttttaatgggagttgctcctattcctggtggtaacaacctcttcctgttgctcctttccgaatggaattgcctcagtgaagttgttgaagaagtgaggagggcgaaatatgcccatccttctacagtggggagaggcctggcgcatgaaagcaggcctttgtgtatgccgggctgggcccatgcaaacagggcacaatcaggctattgtttgtttgggaaaagctatggcatcctattgcaattatttatggaagaaaatatttgatgtttttggaagaggttaggtgtggggggtgatgagggagggaggaaagagactgggcttacctcttgtcccattcactccaaatctctcagtgcgtaggatagggtccatctggtccaaaggagagttttgtgtgactctgtgtgttggagtgttttcgaaatgcagagaaattcagagcttctctagctttggctagagaaggaacaatggaagtgagtcttattctacctaagtttgatgtggggcagcctgttctgtagttgccttccaagcccttcttctttctgatgctttcttggtaccattgcccacatgctgcctccaccctggatgaggtctagacctgttacattgattctcaactaattaaaagtcaatatggtaaaatatttgcagcattccttctccttccctgtgttcatttctgaagctcaacagtcttccatactcaagctgtggggaggtccctttctcctttgacaccagccattttgtgatctgccctttcaggccaccccagccaccctactttcccagtcttgcctctgcctacttcacctcttctctcgaacctcagaagcttctggagtcttcacagtggccctaatcatgggtctcatccttgttttcctgtctctttgaggttccagcagccagctttgcctcatcaggcctttctctgaaattcccatcaataactacaagatctgcccagtaccttgtgcatatcaggtctcaggaaattgtgagtttcttgtttcattaagcatttttctttccaggaatcatcattcatcgcattgccatatgtgtccagatcccccttttcagggagccagtaattcgaaagcacttgcctgtgttgaatatggtggaaaaaacaaatgtcaaccctagccggccatcactccccatcggcccaccccattctcttgtgccagtaggacttgcctgtgttttctttgggcagttcaaagttgggctcttgagaagttgcctgtaaattcaattgaagtgaccagatctcatccttacccactctgtagctgcagataataaacactggggacttcccttgtgcctgtgttttaatgtaaccttaagacttgatgctccctggagtgtaagaatatgaatagctactcgctgtggatattgcagttaattactccttcctgtcccatgtggtccccagaggaatatgagattgccacaaacatggcagctttctttggggaggtgggagagggagatgaatcttggggcaaggcacattctcataaccatgtggctccagaaagctgcctgactcagagaatggctataaatgcccggttgtatggatctgagatcctcaaagccaggttcattcacttatttattaatttaacaaacattaggcagctgtggtgctctgtctgctccagcagtgatcaagacagaaaagatttcttcaatgctgcgtgtggtggctcacacctgtaatcccagcactttgggaggccaagacaggcggatcacctgaggtcaggagttcaagaacagcctggccaacatggtgaaaccccgtctctactaaaaatacaaaattagctgggtgtggtggcccatgcttgtaatcccagctactcgggagtctgaagcaggagaatggcttgaacccgggaggcagaggttgcagtgagtggagatcatgccactgcactccagactgggcagcagagcgagaatctgtctcaaaaataataataataataataataataataataataatagtaagaatactggggtggggatggtaggatgcacagtaaagagaataataagctagtgatgagcatctaagaagaaaacacaaaacagtactgtcatcacaatgcaggagtgctgggttgggggccaggtgtggttgaggggtgctgtattacgctgggtagtcattgaggcctctgtgaaaaggtggcatttagactaagggagattggaaggtccagccatgggaagttcaggagaaaggataagaagaaaaagctgtcacatgggcacagactgatgaccagcaaggctggaacttggaagatgagggaaactgagagtgattgtcagctcaggctgctttgacaaattactgtagcctgggtggcttaaacaatagacattgcagcattccctctccctctctgtgttcatttctgaagttgaatagtcttccatactcaagctctggggagatccctttctcctttcacaccagacatttcgtgatttgccctttctgaccaccccagccctactttcccagtcttgcctctgcctacttcacctcttctctccagcgtcatggttggagaagcatattctcatggttctggatgctgaaagtccaaggtcaggtgtcaacaaggtctggttctagtgagggctctcttcctggtttgcaaacagctaccttctcactgtatcctcatatagtggtgggagagagcaagctgtggtgtctcttcactgattaaggacattaatccaattgtatcagggtctcacccttatgacctcatttgatcttaattgtctccttaacagccctaccttcaacagagtcacatgaggggttagggttcctacatatgaattggcagggtggaggtgggaggtggccggggatgagacacaattgatttcatagcgtcgagttataagatgggtcacagtattagatgggaccagagcagagagggtctgtaggccatggcaagagtgagaatttactcaatacacagtggaagttggggatgagtgagaagcacaagagtggcacactgatttctacaacagtcagtctagctgctgggtggagaaggggagaaggaggaatagtggaaaaagcagggagaccgcttaggaagctgctgggaccgtgcatatgagagatgttggtggcttgaaccagtgctgggtttctcagcattggcagtattgacgttttgggtgaaataattagttggggagtggcagggcggggggtaggggtgcagtcctgaaccagtgccaggtttctcagcattggcactgttggcattttgggtgagataattagttgtggggggctgtcctgtgtattgcaaaatgttcagcagcttcactagtctctacctgctagatgccagaagcccacccaccccgccccctagtcatgacaatcaaaaatgtatctagacattgacagatgttaacctgggattagggggtggggagaccaaaattgtaccctgttgagaaccactggaccagagtcatagcaatttgcagtggatagatttaggaatatttgaagacttgtaaaatatagcctgaagggaatggagactgggagagtgaaagatacctctgagacattttggcttggacagaacagggggtggaggcttccattcctgagctgcaaaggagtggggagggaggagcagtgtagtttgggaagtgtgtggtggagaaggcagatggggcaggagctctgtcttgcatctctcaggtcagaaatgcctcagacatccagggggggcaagctaagatggagttgaacacagcagtgtagggctcaggggacaggccaggaatggagagaaacatttggcactcatctacttgtagcttccctgtcgagaaaaatgaaatcatccaggggttttcaaattcagtggtctctggaccccttcacactgttaaaaatggaaaaccctgccactgtctacatgtttatgttgccccagtaatctatgcattgaaacctaatcaccatgtgatgatattaggagctggggcctttaggaagggattaaatcgtgagggtgggggacctttatgaatgagattgtgcctttataaaagagagctgctttgcctcttctgctagaaggtgccctccgtgaaccagaaagtggagccctcacaagacactgaatctgccagtgccttgatcttggacttcccagactctagaactgtaaggaataagtttctgttgtttaaaagctacctagtttaaggtgttttgttataggtgcccagacaggctaggacaaacgccaataagctttcgtttatgtgggttgtatccattgatacttgctgtatgaagaattaaaattaataactttaaaaagatttattgattcagaaacagtaacaaaacttaatatgcgttaacgtacttttatgttggataaaaactatatcccaccccagtatatgaatagagtggcattgttttatgtgtttaatctctggcttaacagaaggcaattggatgatcatacctgcttctatgtttattctgctgccaatatcacacagcttctggaaacttccacggcacacattcatgagacaataagagttaaaaaggtaaacagtgtcttagtagtgtatgaaaatagtttaatctcatagaccccctgaaaaagctgcagaatccttacgcgttcacaaaccacactttgagaactaaagatcaaggagtacagttttctcatttttatgctgttcagagtgtggttgaagttcagccatcactagtccttcacggatagttcataccccaagttgatggccttgtggaattgctgatgctattttcatatatatatatatataattctagcctttttctctggtcttataagagtcacatacgtaggtaatttcatatcctacaaatatgttctaaacagcagaatattccaggaaaccttaagtgataactgagttgaaagagtcatattttttaagcaatacaatttaaataatttttaaaggaaacatttctaaaggacgttttacattgcttgcattaaaaagaatataatgaacataatccaactttttctcaatactcagggtcatcactgtgaaagtaacttcattctatgataagataatgatgctcccaggtgggcaaggcagtttttcatctaaggtaattgagacaccttttaaaagcaaaagataaattcacagaccctcagtgtcattataaattacttggtataaagatacttaaatacctacagccttataaggcctaggtgtcaattttttacgcttgcagatcttttacaactgtaagttaaatgattttacacattaagtgcatataaaacaaaaagattcaaacccaaatattaatttaatgacatgggtaatattttgctaaaagtaaaccactgctcagaatgtgaataaactgacctcgaaggcctgagtacgtttgaattacggaacacctctctttgacatcacaattgaattttttctttaagtatcgcaaggccccagttcacggaagtaccacaacataaattggtcttcacttggtatgtgaacacatatttatatgttaaatgtgtcttttctttttggtgtacaacagctagagtaatgcagtttgcttgcaatgtgttttttatgtaaatgctgatgccgaatccacttggcagcactgagttacaagaaggttaagtagatgaactagaagatggataaacgaagatagataaaatgaagaaaaacaaaaatcaaggagaactcaggcgtccaagagtgtgtaaacaacttctggtgtgagacgcgctacattgcgctaaatggcctgtgcgcttctggtttttcccttcctctgttgattttttatagttgtcttttattttaaacacgcctcccccccccctttttaaactgattttaccatcactctctctagccctgcctccctagaattagctgcttcttacctcccttggatctggaacttaaatattaacgtgtatataagttaatagtaagtagaccgtgaatttagaagagtaaaacagaatcatgagtacgtagtcactgtggccccttttctgctggatttcaagttcgtaagcatttttggaagagagtcgaaggggaaggggtggcttgccagtcagttgagtgatgcgtgagggaggcgttaaatgtgcatgatgcactaaaatgcatgtttcgagatccagtatgactgctcttccatagatgatgaaaccaaggcagagaaataagatgtaactctcttaccttgattagtgatgagaatgggacagctttattcatgaaacccggaaaccactagcccattcttgggatgattgatatctgcaaggatcttcaggaatagagtacctggggctcaggagccaagactagaagtgttgaaaggtgagcaggaattagctgctggcctcagacgtggagagacacacgggtgtatgtgtgcacacacacacacaggcacatgtatattcatgatggcttcttaattcccactccaggccaactcatttccctttcccttccacaggtacttataccataaaaggtatatgaagtgctaaaatacttgtaggtatgttgtcaatatgagctactctgtaaatgataaataataattgactggtgagtctaggcaaggcaagtcaatgagattacaagaaaagagatgttaggccttcagaaagatggaaatttctctttgtccctgcagggactgttgcagagcattagagccaccctcaaacagttacccagtgagtctcctcaaagcaagtggcactgagatacaaccttcctacaggttttcaagtcatctcgtgtggtgcacagtcctcgccctacctcgaaggcccgggcgaagttttcctgagtgtgtatactcatctctttgtgttgtctctggcagggagcaagtgagtacaggattggagtaataggcatttttaggcttgagatggctttgtgtgtttggttaatgtcactacatttcctaggggataataaaagtctagcatgataaaagatctcgtcttacaaggtcccgatgtaaagtttggagcctaacttagaatttaaaataaaatacattttgacccattgtattgagagctggtataatttaatatagtgagcccctcggcttctggttggttgggttataaagcttcttattcattcgctcatccattaatgcatttctcctatgaggaagctttttcctttgagctgaacacacaaaattaatcgtgctcgaactctccaaattttgtgagttccctggtaactgactgtatggaagacagaaataaaaatcagaataaacttttattttctgaatcagaaagcagttgctccagcttttggtggtcacattgctaagatgtaaaaaacagaagttaggtgaaataaattaagaataattattttggagaaagagagggtagtgtttgactaaattagaaacattctctgagtcttagaagcgtgaatgatttaaatgaggttccagcatagtattgcatgtggtttctattttagagttttcccacttgaaaacaaactttgaggatttttattgaagtccatcagttttaacttactcaaagcttagcagccaccttttgcttttcttcccgttccccccacctcatgctgtgaagaaagtcatacaccattgtggtgttgattgaaacctttatttctccaggtctcctctcataaactgggctaagaaacacaaaggacatttgacacttcatgactacataagatgtgctgttcctctctctttctgtttgaaagtgacttggcagggtgaagttgagaaccccttggaaaggaggaagccgaaatgcaaacaaagttgaatcatgaagtgatgtcactctgaaccaattggagcagtggtgtcatgtgcctggcagctacttcaaatgcccacaaaacaggagtaatggtttaagctgtttccctcttcccctcccaccaccaatcagcagcagactgctagaggacagatgcaaaacagttattagaccaggcttagttagacatggaggatgcatcttaacaagttagtacctttttgcaaagcatgaagactaattcaaagtctattttctggttttgctctaccagtacggccaaaaccatttctttttaagtgagaagtggggatatggtcaggtttgattccagttgaagttgtgagctgcacagggctggtctgagcccagtggcatctttccaggtgtcagagccatgattttaagctcctgttaaattcacagtgcttagtaaccataacttcttggtttcatgatcataggggtttttgcatagctgccacccccattttctgtttgtgatccagtagttaaaactcccagaaaatatttctcaccctggtttaaataaacaaaacagccaccacaaaaacaaacaaaaacttggctaaccactattttcaggcatattctgagagagaaagagggggaaaaaaagactagacatcctaaaattaagcaacattatttttggaattgtgttgtttcttatactcagtcatttgtgaatgatgtggttcaaacaaaactgaaacaaaaatagtttttctcattaaaaatatgtttgtcgcatagccagcactcggaactagggagggtaacatggaagtattgtcattctcggggctgactggttgacagcagcctatacaggagtggagaatattgacagggctgcccgttctccccaggtcgaagagagcaaatgcacatccctgtgtgcacggccacctggttcctctcctcacttgctggtgagtattgaacggctcacataattaggcagaactcaggaactttcctccctatctctttcactcttctgaaatgccctttatgttttcctctgctctttcagtcccagtgccttttctctggtgcagcctcatggttcggtctcaccttcagcttttccttccctccaatacatcctgtaaattattgtcagacttcttcttatctaaataactcgtttaggtaaggtactcatatgttcaaaataccatggtggctccctgttctctgtgatgtgaagtcctaaccattagactcagctttcccccaggacaccttggcttatcttcttgctgctttccagaggcatgggccattaggctggttttctgaaggttctgccaaaaggctgggcccttgtctcccaccccactgctgttactcatgtgttctcccacttgctcggcattctttcccatgctttttccttgatcatcacttactagctaacatctattttttcctaaacactctgttgcagttgtagtctgcagtcactctcctaagacttgatcatctattacgctgtttcgttctttattttttaacttttcttcttcttttttttttttgaaacggattctcgctctgtcacccatgctggagtgtactggcacaatctcggctcactgcaacctctgccttccgggttcaagcgattctcctgcctcagcctccctagtagctgggattacaggcacgcgccatcacacctggctaatttttgtatttttagtagaatcggagtttcaccatgttggccaggaggtcaggtcgaactcctgacctcaagtgatccacctgccttgacctcccaaagtgctgggattacaggcatgagccaccatgcccggttgttttgttctttaattttacaaacttggcatagcttagaagaccatatacagtggcaccatatacagtggcaccatattagtggcaccatatacagttttccctgagaaaactggtacctcccaacagataccaaaatctgggaccaccccaacagataccaaaatccacagatgctcaagtcccttttataaaatggtgtgatatttgtgtatagcccatgctcatctttccgtatactttaaaccagggatccccaacccctgggccacagaccagtcccggtccatggcctgttaggaaccaggctgcacagcaggaggtgagtggcaggccaactagcattaactgcatgagctccgcctcctgtcagatcagcagaggtcctagattctcataggagtgagaaccctattgtgaactgaacatgcagggaatctcagtaatgcctgatgatctgaggtggaacagtttcatcccaaaaccatccctctcccccacccatctgtggaaaaattgtcttctacggaaccgatccctggtgccaaaaaggttggggaccactacgttagaccatctgtagattacttataacacctaatacaatgtaaatagttgttatcatgtattattagggaataatgacaaggagaaaagtccatacatgtttaatacacaagcatcctattttttttcctgaatatttttgatctgcagttggttgaatccatgggtgtggagccctcagatatggagggcatgctatactgatcacccctatgggtgtgaatgttgggcagatcctccagtgtcaccagccatgtggccttggtgacctttccatacttttcaatcagaatgatgatctccacctctcaggaaagttgtggggatgaaatggtatagtctgtgtgtgtagagttgttaggctggggcctgccatgttaaatgcccatgaagcaggtaattatggtagtagtggttgatatcttgaaatcagggggattcccaaatttctaccccaaatctggatgactgcatattgcgggagttcagtaaatatttgttgcactaatacttatgtgcatacgctgaaataatctaaatatttaaaaaccaaactaacggtaggactttcctcagggatttaacgtttgctgtagaagactgaatgatagaatatataagctgtatttttcttgtgattctacacattgtccatgttgcaacttaaatatttttggaatgcaatgtaaaagtgatttactgtcctataattgttttcctgaaagcaaaatgatatttaagtgaactgcaatgaaaaatgcaacgactgtaatttatcgttgaagggcattttcaaagtgtatagaatgactaaagcttaagtgtattaaatattctagaggaagacatatttaggctataaatctagacttcctttggaatttgtttcctttttctcagccaggtgtatgaagattttaagttcttaggcctcagtgggaagaagatttaaggttccaagagtacatttgtatctcttttaaattttctattgtttatcagtgacatatgtaaatgttttagggagctgtttactgtaacattacctactttagctctgtgcagttgtctggcaaccaatgtgataaagacagagggaagtgctgtattttgttgctgacaagtatatcttaaaagtgcaggtgcacctgaataggcaataaagtattaagagctgctcctggagcagtttgctctctgtgacgtgtgaaaagtctacggggtttataattggtctggccatacggctgcctaggattagactcttttcatatcccactaaacactctccttagaagcaagcacaaggagatagtttattttaaaatgtaattgctatgttactaagatttgaatttgagtaccgagaataaaccatatttctgtttagaggctggttggcttaaaattgtgtctaatccttcccctgccccccaactccgaatcagagaatgaataacaaataaacatgacaatgaagtctcatgctgttgttttcatatttgtatttaggagtttcagagcaaatgacttggaaaacaggcaaatccactgacataggcatttttagccaccttggaatccgaggagggattctgcactatgccctgtaacctcgttcacatgccgtttgaatgtataccatgaagaccccttagctcagggagctttgctctatttaagtaatgtttatattcttaatgaaccaaagaggaagtggtcatgggaaaagagccaggactagatttcattctaatgcttataaggagagttctaggaaaccctcagacttggtaaaccaaggcatttggagatactatgaattggtttaaaaggccatttaccacttcttttgtaattggccttttaaaccaactctcacttagctgattaaatgtggtcatttaaactgctagttaacaatcggaagtgcagtggcgcaatctcagctcactgcaacctctgccttccgggttcaagcgattctcctgcctcagcctcctgagtagctgggattacatgcgcacgccaccacacccggctaatttttgtatttttagtagagatggggtttcaccatgttggttaggctggtctcaaactcctgacgtcatgatccacctgcctcggcctcccaaagtgctgggattacaggcatgagccaccgcgcccggcctaagatttcttattgtggtattctgcagtggagaatgggagttggaaagaaatgttttctcccacacctgtcccgctcctgtctactgaaagctgattaatcagtcagatagtgagttcctattggtagtacgcctccaaaatttggaagaggggaggtggcgtgatgtgaaaaagcaaggctttagggagagattcccgctgggggcattcaccctctggtccagcgtgcctgttacagtgatcactccatagtggttttgcatgaacaagactgcccagtttgcttaggaagaaaacaaaggacataaggtagttctcatgtcttcccagcaccctaaatactcgggctaaacttccacagtcagaccgtcagcttcaggaagggctgctgttgggaactttttttttagtttgcagttagttcagctccagccaaaaacctacaaaaagccactgcaagccctctgcctgctcgtataagacaccttggttgggcccctgtgactgtccatccataggatggttggccattgactgcacagagaggtagggcaagataaaacgactcatttgtggatctgactccttgtacttctgtttggattcaaacagaggaagatagagtagtggccttgggaaaccgtggagagagaaaaggcatagtcagaatgttttcagaggagcgcagacttttcaaaacccctctcatcacgttcccactgaccttcagttccagtgctgtggccacagggtgtctgcaccccaacttctttgccaagaaattaatgatctgtgaagacacacagacatgaggcggacttactatttaaaggaatcctgaaacgaatatttttctgatacatatttatcctaatatatttgctgagcatggtttttttttttttttttttcctattttggagtttttgggttttttaagcctagggaatgcctaatatgtactgtggagtgcatttgttcatttatatcccagtgcattgtaaaatcgagcaattcagtgccttagaatcctttctgtgaacttgatgctacgtgaactacttgagaacaactactttcaagccctccgaagcactcagttacaactgtcggtctaattgcacattattctaattcattaaaaaagtccccaagggcttcttaggatactgctctatgttattagaagtccttccaaatagaaaaactttattaatttaaaaataaccgccaattcagacttcgattcaaacaaggcattttaccaagtccggctgaaagagcttcttaccacatctggcatgtagaatggcagaagactatttttgctagattccttgttgctgcagccgtttctgatgtccttttccccttcacacctttcgtgttacacatgtctgagatgacatgatgctaagtaaccaaagtactgctgcgatggaattgctctgatgtttttttccagagtgaaagctgctattactttaaaaaaaaaaaaacttgaggtttggtttctttccccctctatccgggtgttatacaaatatgtaattaagatgtttgggggttcagatgacaaacaaggagtctacttctaagaatgcatttgcaagccaaaagagtggtgaaccacttcagagtgcgggtctgtgggggatgatgtctgctttgcttcgttttgtggaataatttttaacatttctatttagcattcatgatactctaaatagaagcaggagaacactgtggctctcggatccaggagaggcaggccacgagggctcctgctgtttggggacagtctgtaactctaaatctttttatatgcagcaattatgaccttaaaaatgggtgactctaatactggcattcattgcctaaaaataattttaatgtgcaaatgccagagaccaggtcatctcagaaatggactagaattgaccactgctatgttttggtgaaacctgataaccttgcttttctccgtgtaccttgtttttcattgtaaaactatttaattatgaaaatgagagtgtgaaaggcaaagtatgattgaatttagggggcagttccatatagttgtaacaaactgattatcaaatgtccaccattagtatgttaaaatacggttttctaatactgagacaacagggatggagcagcctatccactgaagtcttgttgtttgtccctgctgtgtcccaacctggaatctctttcttcttccttcagcagacccttcgagatcagcttaagcttcactgccttagagaaactttcctgtctacctggactgtcttctagatttctagagcagtgttcctgcccttttcctttctaaatggggtgggagttctcagagaactcatctcctttatggctttatccatcacagccacacagataggttctgtctggaccatccttttccctgagctttcttctcctttgccatgtgttttcatttctgccagacactggcactggggaagcctcccatcgtctcagactcagggtgtgtgaaaaacaaacctgctttctggactctacagtttgtgcactagcctaagccgaaaatcttgaaatctgtcatcagtgactattgtagtccataggaatacccaagactgggtaatttataaagaaaagagggttagcttttttttttccggctcatggttcttcaggctgttcaagcatggttccaacatctgatcatcatctttttttttttttttttagatggagtctcattctgtcacccaggctggagtacagtggcgccatcttggctcactgcaacctcccacttctgggttcaagcaattctcctgcgtcagcctcccaagtagctaggattacaggtgtgcgccaccacacccagctaatttttgtatttttagtaaagatggggttttgccatgttggccaggctgatcttgaactcctgacctcaggtgatccccccaccctggcttcccaaagtgctgggattacaggtgtgaaccaccacgcccggccaggatctgatcattttctaggaggcctcagggagcttttattcatggcagaaggtgaagggggagcagttgtatcatggcaagaagagaaagagagacgccagatctcctggtagataactaacagagtgagaactcactctttactgtggggagggcaccaagcccttcataagggatccaccccatgacccaaacacctcccaccaggccccacctccaacaatgggaatcacatttcaacatgagatttggagggaacaaacattcaaactatatctacgaccaaattttcctaattcctttctacttaaatgctttcttttccatttatttcacccacatctgaccctaggatttcaacgtgttctaaaatgaatttcttgcacccattttcactttctctccaccagaatccatctcaccacccacctgccagtggcatactccttgcatagaccctgctctagcatgaatatagcccactgttatctgttgtagaacctcacgcccagcttcccaccctgtgtgacatcttcaccctcttgccctggcttgtgccatccacattccgatcttgatgactctggttctcttctctttgacggtggagggttgatcccttccttccccatgatcataaaaggtcatgccaacactcctaaaacaaaagatagattaataagagaaaaacctaacaaatttattatatgtgtgcatgggagtcatacaaaatatgaaaactcaagaaaatggccagatggttgatccttaaatgctttatttattggtgagaaggtattgggggtgtaggagtaaatgattttcagggaaaatgaatatttccctgagacagcaatttacttgtaaatgatgctctttagaatttgaacacgctccagaggcagaaattgtcttgtgaaaaagtctgtctgggtatggttgcattcctcagtcttgagctggtggatggcagggtgcaattgcaggccgtagtgttcctctttggggatctggtttctaggtgggtaagggaacttcagagaacagccttgtcctgtgctttgcgagagacaaaggatgaggaaggggggtcagggaccttgaggctgcttcagcatgtcaagagtgccatgtttgggacgcctcaacactggaaatagccttcattcctctgcttcttgggtctggatccttttctttagactccaagaaattcttccttttgccccaaactcacattgtttttgtcttctgtccctctacttctatgtaattctattattatgcacagattctgtgtgcccaaggagactgtaaactccaggagggcaggaattatgtcttaaaacactagcggttaaacagttaagaggtgtcttaaaacattcctgtagccccagctacactcttgggtgcaggaatcacaagtgccttattccccacagggtccccagcatattccaggagctcattatgtttttaaatgaatgacctactgaaggcaagagaccaggaaggaaagtttgtaaaagtttacattattagattacccctgagatgtgtaaccttctcacgagttagatttcttgaaccactgcccgggtattgtattcctactctaggagcttgaaggattaatgataatccttttacagatatattcacaagtttctgtgaatgtgaattaagtatgtagatcttgattgcctttcttgagtgcatggtttttttctagaaaaacaaatttaagttaggtgggacacctaataaagctctaggctcctttcttttcctcttttaagacacagttaattaccttatgctaagttggaatataggaattatcttccaaaactgtgtttgcttgctgtgtctacataaaaattgatacaaggtatgccatggtttatacaatttctggcacatttacctggtctctgttacaggtttgtgaaaccaatttttttattgtaaatagtacgttaccagcttaattgctttagaacctagacagtctatgtctgtgatagtaattacattctttcatgactttgtttggtaacctgaatgttgaactagctctacagatttaggtcatgtctgatgctagccattcctaggaaaaagtggtgaggactacattatgggcctttccccctagacttaaaactgtgaagaagtcattttgggttgaggtatcccctggtaccctctcctgaacttcaatagaataacatgatgtggtgaatgaaccatattagaaaaaccagccaatcagccaagattcttgtattgactcttctgatctccctctacctctcctttccccatctgccaaacaaagggtttggaacagttaaattctaaagtggtgtcattgatggctctcagtattctgtggactttcctggttgattcagtacttgtgattgacctggaccccctggtttggtccagccttagagcgggtttgcaggtagacaccttcctaatgtttgttccacgtaagcccccggagcacagtatttccatcagctattttgtggaagtgagcgattctcttttggttgtaaaccttcactatttcatgtgggtgacttgacaatggctccatttttgaatggcccattgatagttgtagtctaaaaatttccagagattacacaagggtttatttaaagggaatgggaatagggagaaggtataacctttccaaaacaatctttaaggcaattataagctgttaggaaatgtcatgtaataataacacagatacccaagcttatatcacataaatcattcattttgcatgtttttgacagggagatttattttccaggttaaaaacaaaaaagaaaaatcttaaaagcttaagcttttattgtttgctttttttattaaaaagtaatttggagccagtaacttaacctgtttttcataaacatgctatctagaggcagccaaaaaaatattcatgcttgcatagtcagggtcctcaaatgaacttatgtgttggatcatgataactctggtaattactcgaattacccttgttgagtaatagtatggaccctgaatacaagggtttgatttatgtggccagctctgtgctgctgggtttatgaggacttgccagatgtcatctcctaattaaaatccttctttacccttaatatcctctcctctgtccccaagaaattaatccattctattgctggagcatgtaacagctgatgttgaagttacaagtttacagcttgaactttgcctagactgtaccttttttgggaaagagtttgcaaagcttttaagcctgactcttgtctttagatcaccagcatcaccatggtgcctggcatcagtggagcctcagcaagtgtttatggtggaaacctcagaagctgtcactttctctggctgtaacagttgtcatctttgtttacagggaaaatgctcttgagaaaatggaggtcattaaacactccagcttcagcaatatcatcagagctttccgtcacgtgagttatctcacaaaagggtcagattctggtaaaaactcttgccttcacacttacttctgttttattttgccttatttgacatttcaccagaattgatccataggttcaataaggctccattctgttgggacaaatcaagctagaaagacactgaactctgggggttaccagaaatatctgaaagcaaagcagtgactgtgaggtgggaatctctctgagaatcctttgcagaaccatgtaacagctctgcatcactagacgagccaagcgaagtggtcctggatggttcagtaggctcaagcattgagggtccagagcatcctttgcccctggacatggaagggttttcattgggagatggcatttagggcatccttataaacgagcaggagtaaacctagcaataaaaaccaaacctctgccttcagaggtatatgctattacttctgcttaaaccgttgtcagagctaacagttttggttagggatttttgtgggtccagggcacgcccagacacccagatgcttctctatgtttgtaagatggcgagtgttgagatgtcttataggcttatattgagtgaaaaggaataggatcctttgtcagtagtaacttaggctttttaggtggccagggcaagagaacaccccccctacacacacacacacacacacacacacacacccctacacccacacacacccacccctacacccacacacacccacccctacacccacacaccttcccacacaaacctacacccacacaccttcccacacagacctacacccacacaccaggatttgaaggctctgctaagaggctacaacaactgtagcatacaactagcacacttgttgctattatgtgtaggggactagatggaaagagtgcagataggactacctaccattcacccctaccagcgaagtggaagcactcatcttctttcccttcttaccctttcaaagcaagttgttgagggatgaagaggagagtgactttaatcgtggctttaagtagagattttctttaggagtaattgtttctctcgacagagtggataggcttccatagttgtcttaataccttttgtccaccccaaggattgacccaggcaaggaggatgaaccctcctcaatttgggaaagttaaattttaggcacagcaggtcaaagagtagggaagagctgcagttgttggaaccaagtgacattgatttagtctggaaaggagtcacagaggaatcaaaagccagaccctcctggcagctttagatgtggttggggtctgggaataatgctggtcccaaaatcacctctggaactaactcctgtaaaatgaagcctctgcatccttcagtaacttacttaaaattttgttagggctgcattttcttcaaagccaagttctgaataagaagtatttgttttgggctctagccagattactgaagtattgttgagggagatttgctgtggaaggtgttgggggtacagggattgtgaagataatgtaaaatatttaacattttaaaaattttcagtaagttctctttccccaatgtcagcatgacttcttcattcatgttcttccatcactctccattcagttagaatctcaattgtgtaatatcagtggtagcgacaattatgaaattcgtccagtgaggaaaatccgcagagctagagcccaaaccagcaactttgtagtgaggatgaccccactggccggggagaaactgaactgatttttttttttctctctctctcagctttttattttgaaataattttagacttacaaaaaagttgaaaaagcatccaggcatggtggcttatacctataatcccagtgctctgggaaaccaagacaaatctcttaaagccaggagtttgagaccaagctgtgagactatctctacaaaaaaaaagaaattaagtagccagcagtggtggcacgtggctgtagtctcagctacttgggaggctgaggtgggaggatcgcatgagccaggagttccaggctgcagtgaactatgatcatgccactgcacaacagtcttggagacagattaagaccctgtctctttaaaaaaaaaaaaaaaaaaagtttgtaaaatatcacccagttttccctaacgttagcattttacataatctatacaccaattctcacagccaagaaattaacaatgacacaatactgttaaccatggactatttgaatttcaccagttttcccactaatatcctttttcagtcccaacatccttcattgtgtttacttactatatctagtcttctccagtctgtaaaaatgtgtctatctttgcttgtttttcatgaccttgatatttttgaatagtatggacaggttgttgcatagaatgctccaaattggttctaatgtttctcatcattaaactcatttttatacattttggggaagactactacaagattgacattgcatctcagtgcgtcacatctgtgtgatgtcagcatcttaccactgatgatctcttagccttgaacacttgattgaggtggtgcctgccaggtttctccagtgtaaattttctgcttttcgcattgttactgatatcttagggctgatactcacagtatgcagatgtctcgtttctcttttttcatatttcttttcttttttctttttttgagacagtcttgctctgttgcccaggcaggggagtgcagcctcagacttctgggtttgagcaatcctcccatctcagtttcccaagtagctagtgtgcaccatcactaattagtgccccaccagttttgtttgtttgtttttttgtttgggcagaatctcgctcagtcgccagactggagtgcagtggcgcaatctcggctcactgcaacctccaactccctggttcaagcagttctcctgcctcagcctcctcccaagtagctgggattacaggcaggcaccaccacacccagctaatttttgtatttttagtagagacggggtttcacatgttggccaggttggtcttgatctcctgaccgcccacctcggcctcccagagtgctgggattacaggcatgagctaccatgcctggccttcaccaatttttaaattttttgtagaaactcactatgttgcccagtctggtctcgaactcctggcctcccacctcagcctcccaaccacaactggccaaggtcctgtttctcatcacattgtcactcactgatcttgtcatgctttggtggagcttatctacaataattattactgccatgctttaatggcaattttctatcttattgtcatttattcattggaatttttacataggaaagacctgctccttctcaaactctaaacagtttcattcaccatacttttctccaggtaactttctgggtggctgaaagtgactttcaaagaatggagatatcttttcaatgttgagagagtggcagtctgctggttcccaagatgccttcttcacctagcattgagactctgcagaatgccttgaccacagttgtgatttggatctgttggcttgcaaagcccatttgagaatttacaaaatcattttcacggcctgagagtcttttaggtactgatttttttcatcccttctttactaacagactttatttagtagagtattattggacaggtttggggttcacctttatgagaaaaaacttagattttctaatttcagcttttttattttcttccatcagtgggacaaagttgacatcattgcctaaaagtaatttctgtgattatctgtgtatttcagttaaccatgttctttggactcactgtggtcttcagcagggatggtggccaaactatgtttagaaagataaaaattaaaatgacatctgcatccttcatgtaaacccataaaaaatagcacgtgaccctgaagatcctctgcctctcattccaggcattacaattgaaaatgctatctgggatgttaaaaactaaaactattctaggacttagtggaatattgatagttagggaatgctgtttgctttcttgaattttgaacctgttattgagaaggtagatgcgcctgtttaccccaggaaggctcctctttgaagacagtgcccctggagcacatgaccttttcatgcccttgcctgtcaagacttttccagtactctaaggtcaaagggcgttgggccaggctgatctaatcagggtattaaccttgccccactcatcttgatttattcctagatcccagttcccagagcatccctttagagcctcagaaatggaacaaaagacagctgaaataagcccgtggccaaaaggcactctgagcatgagggaagtaagcaggcttccctgtcactgctgaggctctgtcatccagccccagctgtcctcttgtgatcactcagcagacccgggaaaaattcaagaatttgttttttagtgtcagtgggagacgtggggatcctgcttttgctgggagagcttcagttgtctgagtccccactcaaccccaggctcctgccaaggccaccaagggcaggagcactggaaggctgactatggagtgaagaggccactgggtttcacaaacagcactgtcagccaaagctgtagcttgttagccatccaaaagaatcttgcacctgctgccagtgagcttacacctagatgacagctggagctgacactcattcagcccttactctatgccaggtactattctaaacacttgccatatactcagttgtcccacagatacaactatttatccccactttagagacaaaaaattgaggcacagaaaggttaagtaatttggccaaggaagtgcagctagtaaatggcagacctggggtttgaaccgaaatcagtgtgactctagagtacctactcttagaccctactctctactgcctctcattagaagtctcccccacctccctaccaccaccatcaccacccaccctcccagccacatatatgctcacactgggtggttcagatggctagaagtggcagctcaaccttgtgtgcctcggacacgaaaatattaggttcagacaccactcagacttcacattttcattagttttgggtagaggaatgagaataaatattcagcgagacagccttttctaactgcaagattgcattcctcttctttctagatgcagtggcaagaacagtaccctggatggtggagctggtagtggtagatgagatagagcagtcccttgattctgctttgtccccattaatgacagatctgagggcatccagaaggaatctccacaagcccagcctccacagtggctgcttcctctacatggtagagtggtgctcacctccactcctccatagatgccaagtcatctgtggtatagatgtggatgtctttgttcaaatggtccttgagtctttgctcagatgatccttggttcttcatttcacctgggaaagaaaataatttgcctgttgtcattttatccataatattaagaaaacttaatggcacaatctaagctttttaccatgttatttatcatgggattacttttttcaggtgtcttctgaacacgcagttgtcccaccaaactttgacactgcccttgtgattaatttttgcctacattaatcactctcccttgttttaattgcacattacattcttttctgtccttcccggacatctttgctagcacagtgagtgcagggaggactgtcacggactctctcccctcttgaatgggggcattccagcagagtgtgttacatgagctcagagcacatgatgtgagagcctcgtgatgaaagatactgcaaaaacagtgcgcactgttatcaaacctgactgccttcacatcttgctttctgtggtgcaaaataaggtttttatagtgtcctgtttcttctgttatcatctaaaccaatggggaacggtgagtaagtagtaatcttcagaaaagaagaaaagacagggaggagaaagtgtactggaggcctgctttaccattaagttgttaagatggagtctcactctgtcaccccggctggagcgcagtagtgcagtcgtggctcactgcaacctccaactcctgggttcatgcagtcctcctgcctcagcctcccaagtggctggggactacaggtgtatgccaccacaactggctaattatttatagagatggggtctcattttgttgtccaggcggggtttttgttttttgttttgttttttttttttttttgaggtggagtcttgctctgtcaccgaggttggagtgcagtggtgcaatctcagctcactgcagcctctccctcccaggttccagcaattctcctgcctcaacctcccgagtagactagctgggattacagctgcgtgccaccacgcctggctaacttttgtatttttagtagagacggggtttcaccatgttggccaggctggtctcaaactcctgacctcaggtgatccgcccgcctcggcctcccaaagtgctgggattacaggcgtgagacactgcgcctggccgtccaggctggtcttgacttcctttcgcttgtagcctcccgaagtgctggaattacaggcgtgagccaccgcatctggtctctaagttttttttgaaagtgtgtgtgtatgtgttgaaaaacaatcttactgccatcatattgaagttacctagtgcatttcttcttcagggtacgaagaaaaaagaaaagtatgtcctgtggttgatagaaatcagtaaaatggagccctgtacgaggaagtgctgatgagactccaactaactccatggagatgagctacaaaaaaaaatactgattgggttcaaatccttggcctgccatttactggctgtgcttccttggtcaaattacttaacctctctatgcctcaatgttctcatctctaaagtatggaaaataattgcatctgtgtgaaaactgagttactatacgtaaagtttttagaatagtacctgacatacagtaagtgctgaataagtatcagctagagagagagagagttagtttccagcagcctgtttctgtttggggtcacatgtggtctctgtccacctggctttttaggcctctcttacctgttccctgtttatccttgcctgccccagggaggagtttgagttggtacatcctgactgggtactctgcctgtggttagcaaatactctgcatgttgagtgctttcaaaatacagaaacaaacaacttgtggaggcattggaaaagtgtgtttgagaaacaagcagcctcaccatgaatgggagtttgtttccctttctcgtctttctggtcatctgctgcacgggcaggaggagctgtgggttgcttttcttccttggaacatggagcaccactctcccctgtgctgatacacttacaaagaagttcacctactccttggaaagttctggaaaaggggcttctacactgttggcctctcgaggagaacggtttttgtttctgtcttcctggaaaagaggtgactgctggcatcatctttctagataaactccttgctatgatgccattagaagcagtgttcttttgtgttttgcttttgtttttccctgtagacaggaataacattttgactagaaacttccctgatgtaataacgaagatggcctccttagaaagttccagaacagaccccttcacctctgtccccagaagcagaagtaggtgatgcactttcttggcaagccacataactaccatttctctacaatcgaagctcaaaaatctgtgcttgtatacgttcattttttgtttttacttctttacttcctttgataagacagaaacttctgtattaaaactgatttaactctgaggggctaagtgaacaacaatctgttgtcctatagaggtcaaggcagtgctcacaacaggatcattgtgctgctgtagttcagtttaggggacggggaatgtttataaaaacaaagttttgaaatgaggacagggaaaggctttgtttacctggggctctagacttaaggtactcattttgcctgcagaataatgaaatgcagagttgtaattagaaaaggttgatgtaattgatgtgttaacaatttttgaggtttttctctttccactttaggacagtcatgcaattatttttctgaaccaaaatcagaaccatcagtcgaaggctaaaacaggcctggggaaacactgtcttttggcaaagaaagacaaagatccttgttctctaggccagtgtgcatatgtgtgtaatgctttaaagaacaattttgacaagaactcttaggatgcaacttgtagagtgatttttaaggagatgcagtaggatttgtgcaagtattctgctatgagcctaagattttcaacatggaaatctagccatgcagtgactcgttcactttggcagtgtctatcttagtctgggggtgagcgtttgtagaaaatatttagagactcaagtacactcatttgaatttttgctgttagcaaataaatggcaatatgtgtaacgtggtgaatgggatgtaaagctgtctttatattaccacggttagaatttaattttgaaagttgcaagtcaaactgcttcctcttgcgtcattaagttgtgcctcttgtttgctcaccggcatgtgtgtccttgtgtcattttggttgctgtgaaattgctcttaccattctttcatccttcaacctgctgtgctacaatcctaacatgctgtttttgttgaaaatgcattcactctttttggcatcttttttccccagaaagttagaatattgggaattcattggtattagtgaaattcccacctaatgcagcagtttttttctcttacctgcataatagacgcagaacaaattaactctaaacggattagagctgtcaactgacagatactgtgcgagatactgaggaagcctcagagatgataccaataaacaggacagggccttctggtcgtgtttctacttctcttattggtttgtcttagcaattttgaattgcactgaaaacgaaatttcataggtacacgatacagtagttagttttaaaagtttttaaaatattaaaaaattgaaagtatttaaaatatttttaaaatattttaaaatctgctgtgtgagatagataggagacctagcttttcttccttcttaccttgatccatagagaaagcaaccctgaaagaagaaaaactcacccatttgagctttcttttgtttccactgagcaatacggaagaaattcaccgctggttataggtcttcagtgctttcttcagagtgggattgttttttgtttcaccataagtagtagtctattaaattaacagttgctagagaagaagctgcatctatatatgcagttctcttcttgtcaagcagtatattttcacgatagcaatgaaaaaattccatcctcaccagccgctgaaacatagtaatactgcagaaattcctgtgaactatgcgtttgctgcttccttttgtttgtttgttttcagagcagatgggcttgtttgctttttgcttaaacattaatcaaaaatcaatttatggctatgtaagtggcattagataattctcattctgactacagtaaataatatctatttgttcatgttagataagtctgggcggcagtggaatgtaaaatagaattacatgagatatgacatatggctatgtgttttataaattaatgcttttatgcatgtgggaggagaagtaatttagcttactgacaaaaagaaaagcaaaggaaattccagagaaagaacaggataccaagtctaaataaatttggaagacaaagagaatatcatagtttagttcaatcttttaaacaaattgtcacaatttatacgttgggataagagaaccatgagaaaaggtatattctaagtcctgaacatctttctataccctgaagatgtttttatagctcttctgctgactccctgccaaaaaaactatttacggtttggggtagggggcgtgtcatgccatacagctaaatacacttttttcctaatctaggaggcatgtctacttacaaataaattgcttaaactagttaggcttgtgtaaatgtaactgacatttccttgagatcagaaaaagttttgctgattaactatatttgtgtgtgtgtgtgtgtgtgtgtatttagagagaaggagggattttataattattacaatttgatttgaaatgtctagagaaagtgagagattatggaaattaccataaatgctccctttttcatagatttagatctgttaattgcaagaaatctttttttaagtgaatcaatgggaactttttatttcttccctaagattcatttagccttgaaaaggccaaaagttgaatgaagcttctaaatgccaatctttccctccttctgttaaagagtatgcttcaactataattacatttgcattgtttaaaatattagtaattctacagccagacctctgagatagctgagaaaccaaaaagtgaagttcaaagacatcatcaggcaccctctccacacacaacataccaggcccaccaaggagtttacatgagtgtttttgccttgttagccgtggaacgacctgggcagtacccaaaacttagcaaactcttcttgtaccttgtattcagtagacggtcagtagcaccgagagtagggagaagagtaaatatgtttctaatactttattcaatgtatgttgttaacagtgtagacactctgactttccttgtgaattgcgcctcagtatttagttttcatttaccctggatcagatagggcatgataacctttgaggggctttgtgcatatgtaatttggaatctgagtcagtcgggctgtgtctctcccaacttcccttctcatattcttctctctcctcctcctcccctccctcctcctcgcctccctcctcctccccctccctcttcctcccctccctcctcctcctcccctccttccttctcctgccccctcctcctccctcctcctccttccttctcctcctcccttcttcctccttcctcctccccctccttcctcctcctccccctcctctctcctcttctctcgtttctcttctctctcttctttctctcttctctctctaccattgctgtcagttgagatgggcctgtgcggcactttgtttgcagttgattggcaatcttctgttctactactgcatctgaatcatcacttgcttccaccagttctctgaatgtcttacctagtgatcctggtggggaaattacagtgattagtgttccaattcttgtttgcccataagtgtttcaaagtagtatttttaaaaactcttctaagacattctctcttctcatagtagatgcagtgaatcttaaaggtgccctaactaaaatttttgtgctataaaattggcagctttacaaaataaaaggttcgagatatgagcctgatcaaggctctgcatttgcaacaatatccttggtttgcctggccctgttatattttgctgttgtgatatgactcctgccagtgctatttccatttaacctttgtttttctaaaagacagtaataatttttcatttctagggagtctctgacatcagctaaaggaaagacacttttctttgactgtatatacatttctccccatttcattaatatcaaagttgctctttcaaatggcttataaaattttaaaattacaccagttgcataagcctgcataaaaagcagactcctacataagctgacaatgcatttgtaccgtggtgttgagcagttttaacatcctccgtgcctctgtgcttctgctagctactgctctgataaagttatcaaggtatcattggatgcattgaccaggatgaagacacaacagtatggccttattaaatttggaaataatgaacagacgagtagagaatttaggagcaatataggcaagcttaataggtctttactttggggcctgtaactccaactacatatggaagaatttaagtacaggaaaagttaagctcttttcccagtagttctgctgacaagttgggtgacttcgggatggttacctcttcatgataccacacggtgatggtaacagaggcactgtccagtctctggttcatgcacactggtcttctcaggggtccctgtataggtgacacagtggagaacagggcagtactgccagactcagggacccagttcatcgagaggggcagtgtttctcttatgctgccttaaaggcattggatgccttttggaaagccagtggacaactcctgcatccacccaagattaatgttaacagcttaaagaatcattgcaatcaagggaaattttgcaacactttgttgggatatttttaaataaatgtgtgaacaccttgttttaggcttgctgaaaatgacccaggaattccttgacccgggaatatagtgtatggctgccaattattatattccttcatcagacaaaggcggaacagttcactctttttcttttttttggacacaaattctcactccctcacccaggtcagagtgcagtagcatgatctcggctcactgcaacctctacctcctgggttcaagtgattctcatccctcagtttcccaagtagctgggatttcaggcacgtaccaccatgcctggctattatttgcatttttagtaaagacagggttttaccatgttggctaggctggtctcgaactcctgacctcaagtgatccttctgccttggactcccaaagtgctgggattaaggtatgagccaccttgcccggctaccggacagtccactctttacaggggggcgtcttggtataagtatggaaagctccgtagatgccgtgtcagtccataccctcaccaccttcttgaccctgtgccgataaactaagagatgtgggcagtgtaccatctggaaaggaaaaggctttggagccaggtagtcctgcctgcatttgaatctgctttctaccacttacttacatcaggttttccttgtctataaaatggaagtccttgtacccaccacctagaatggaagtgaggattaatccagaccaacgatgaagagtccagcatgcaggaaatgctcgtttataaccatggaagtttcgaggacttttgaaattcgatgacattaacctttgaggtgcattttagttggcttgtgtgatgaggcctttctacttctagttccagaatcgtctggatctacattatgtgggaatgtttattcccccctttactttcccaaaatttgctaaacattttcattgctatttgagttttttaggagacatactgagatgaagttagggatgtgaaaggtttactgaggataacaccaatgaaaggaagagaggaggaagatgatgggtgtggggagcggtttgaccaggactctgataggacagacactctgccagccctccgggagctcatttgcagagccccctgttagatggatataaccgggccctgggaccattgctgggctcagttactggccaggagctgcctaggaagagtgtgacctaggccaaaagttgaagtggaccctagaagagctagcagctggagggcatctgctagtgacactctggagctggacagcaagtcctttctgaaagaggatctgagctgagtatccctgtggtccagtatttcaagttggaacctctaggtttgaaaaatacatgttttgggtgagagtttgattattcttaaagggacatatctttcaaacatatggctgtggaagaggaaacttgtttttgacttgtaaaataccagcagagccttgcagtgatcacaacttatgtgaaatacagaccatcacccacagtttacgtgttcacactaaagtgccagtctctctatgggttttagagctgatttagatacatgcattgctaatacagtcagcccagccaagatagtgccatcctccgcaagcatccactaaggcatggagtcagcttccgtcattgttagatcagtacttgtttctttcccttgcttatttttcctaacctctctgaacctgctgtgttggaagcttaaggaacatcatcctctgttgggcagaattcttccatggccaccccagcattatgccccacaccatttgacttactcatttgtgaatgccaactcagaatgtattgctttgattcttgattaggatctcaacctctatttattgttaagactatcaccctttgattcccccccatcccattgtgtccttctaaaggcacagaatagaacatcttctgccagaaataacatacaaatttatcatcatacaactgtacaatatgcaaataacttgctagatgatattactgaagattctacatccaattaaaataaaaagagaaaacaccttaagataaccatactattaaaagatacagaagacaactggaataaatggaaagacataccacatttattagacaggaataatcatcattagcaagatggcaagatgtcagttctccgtaagtttttcaatttaatataaatccaaatacaacagatttttttcttttagttagattctgaggttatcattaaaacaaaaacaaacaaacaaaaaactgaacaagagcaaggagtccttaccaggtattaaaaacttccatagtgcctaaataattaaaatagtgagataccaatagatgaagagacagaccaatggaacagaatagaaagtccaaatgtagatgcaagtacctgtggaaatttagttattcgataaaggtagcttcacaaatcattgggactaagataaactcttgatttactggattggggcatgtaaattatggcccaatcatgccatgtttcttttctctggaaaagaaagtaaattaggttcatacattataccatgtaccaggctagactccaagtgaatccaaggtaaaagtgtaaacaaaactatgaaagtcctggaagaacacatagcgagttcctttttataaccttggagcagagaaagcctttctagtttcaactcaaaatccagaagccagaaaagaaaacattcataaaaattgaatttaaattacaaaaaaactttctgcatggccaaaaaccataagcaaagacagatgccaaactgagaaaaatatctgaaacttctatcacaaagagctaatctcccttgtttaaaaaaacaaagtaaaacagagctcctagaaattgttaaggaagaggctaacagttcaataggatttgggatgaagtattgaacagatagctcacagaagaagaaacacaaatagctaagcatagaaaaaaagtttgatttcactcatacgagaaatgcaaattaaaactacaccaagataccattttttcacttctcatattggaaaaaatccaaaatatttgataacacactctttggaaaacaaccccacatggctgggaggacggcagaatagcacatctatagaggagaatttggcaatatctctcaggttataaacacgtattctttgacccaccaatcttagagggggcatttaccccatagacttgcacacatgtgaaatgacagttgtgcagttgttcattgtagtgtttcaaatggcaaaagatgaaaatgtcccccaaattccatcactgagggaataagtaagttagggtgatagctcccaagcttattttctcttcagaatcacctcatgaagaaaatgaaggtctgtgtgatagtagctggcaggtgggcatggtggtgagggtggtgtttgagcggagacctgaatgaaggttgagaaggagccagccactcacagacacagaggaggccttcaggctgagagagcagagaaggaccctgtggcagagacaagctggaaacagcactgcttccatggtctggagactggaatatgtgggttctgcagacacctggggggggcaccacctggtaaatctgcctttcagctcttggttcttccagcaaaccatgccagctgtggctctgtagccatgtcctcggaagatggcagaggttgcaacgaggcctctctgaggtgctctgggagcacagaggagtcaggtggaacttgtggcatgttgccaagggaagaagtgatttttagacagaataggaatttgccaagaagagaagtcagaaaagcataactggcagaggaagcagcatacgttacaagtaactgcatgtgtacagggaatcactgagtgatggacaagggcttggcacttggtgggggggggtaccatgttaacatgttagcaagaaactaggtaggggtacttgacttgggggcagcagaagcaggtgtgagtgttggacaagacgagaactgagtgctgcaaatgtttggcaagacttgattgagtgcatattgtggacctgtgtctccactggagacacaaattagaatataacaccttgccctggtatgctcagggtctactgaggtggagaaacctgcaagtagagtcggagtacagtgttgaaaacaccatctgcaaccttaacacagtgctaccaaaaccgatttcggagcactcctgcaggaagtgggctggccagggcaagggaagccgtggagaacagtggcctctcccgggcaggcagggtaaggcctagaaagaataagctgagtgaaggtttgtgtgtggcccatccagggacctgcgacaggaacacagcggctgaggaacggatgcttggagaggagggggtgctttacatgccaggcgggcagggccggggtggggccagatgctggaggagagggctggccaaggggtggcagagaggccccccaggtggcaagtttgcaccctgttgcttcctgcaaggagcttttgtttacgttttcagcttggacagtctggctgtctggccaagagtgacaacgtgacttaccatcagagcgaagcaccaaagagcacataaatgaagtggagatccctcctgtgtccagcctccccctccccgtggccttctcctaccttcccagtcctccatcagtaccccggggccttgccagaatctcagaaagaatctctggactctggctcaggacctctgaggtgattatgcatctagaggcatccccaggtgctgcccaatttggggaagcagcacttcccgctggaagctgggaagtttcccctggctgggggtcctgtgaggatggagaggccagaatgaggaatgggttgtgagtcaagaccaaccagaaggggacttagcaatgtcagatgatagcctgggtgaactacatcctgtgtggaaaaggcaaggtgtaactgcttatttcttgtcaagtgagcctaatatcatcatgtttctttttatgcctgctcccaaactcagcccctcccagtgagatcacagctccaggaacttgcaaggaaagggactaacggggcatctgattcacccgtgtgcccttaatggcgtattgtgtgaataaagcaacaatttttagtacagggatttaaaacaacttctgcaaagacagaactaaaaattaatcttaaaaggtggagggttggggtggagggcaggaaagaggaggaactaaattgccattctctttggagactttctaaaacctaagacgaagaagaggagccgaattatggaaacaaaacctttgcggttttccacagaacaaaaatgatgtgaagctgcaagtcagcagttctggcgcaggggctccgggggacgcccgctccgccggctgtggtgtgcgcccttcctgctctcccctccgaggggctgaggctccttttgtctggcgcgcgcgccccaccccgccccgggcgagggaagagggagcgggcaccccgcgcccgcgccgccgccgtggaccaaggttgtttactactttccactccgaataacacgccaatcaccagggcccaccctccccgccggccaatcgctgcgttgggaaattccacctttccgcggggcccgggcagcgactggctggagtgtctgtcagtcaagtgggcatcccgcaaggatgcagcaggagtattagggaggcgatcaccagagcagaggaggagtaaccttccccataaacaagatgtgttccccccactaagaaagcgggtggagggtggaggagccaaaacacatcccagccccggggccccaccggagcgaagcgggccgagcgcagagtgcagagtcggggaatccctccctccgcctcccgccgtcgctgcagttgtaaacacgtttccctccatgtctgttttcccttctctctcaccgtggccattacgggctgctgtttacaaaaatcctgcaggcctttgacaccccgtcctcccttcccccggcatccctgcccttattctggctttcttctcttccatctcctggtgagcacagcatactgttctcaggcttgttttccttttattgctctccatgtgggacaggtcatgctttatcaacatgtaccattttctacaaatgccgcccttcctctttaaattgcttggatgggcagatcgattttgattagcaacactgcagcagaaacaaggtgcatctctggaaggactgggtggttttctcgttattgttgctggtttgggtcacatcggatgctattttaaattctgtgttttattccacgatgggtcttgaatcctttccctattcctaggtttgaaatatgtttcctccctttaaaaaaaagaaggggggcagtattgtgttgaaccaaatgtttttctaccttctcctgtgatctgaatcaggtttcccatttccagcagtacaatgtggttgtattcagtgtgataggggcgtagtggacatgaattatttgcgacagggctgcctggaagatgcggagcggagtttgcgtggcccggagcagctccagtgtctgaggcttctctgtgtcacaggctccaagcaggaagcgcaggcaaaatggcaaaatacagcatgtggcattcagttcaaaaatgcccttttttagaagtcggtattctaaatgacatccagtcttgcttagttttttaagagaaaggaaaaataatctatgaagatggtttggaatattttgtgaaaagccttttcagcataaaaaagatgatcttgagggtctggtttgcggagtggaggataagcctccctcctgcgattctgaattgctttttggtttgtaggaatttcaggaacatgttgcaaagccgtggccgcttgaaagggtcggtgccctgcgccccgtctcagcccctgcggcccctgaactttttcagtgatggggcacttggggagaagtgcggggagtggaggaggaggggaaggtgcattgcaaatagaaatgtaaggcgtggcctgggtggccaggatgtgccagagcagcctccagacctacttaaatcccaggaaaagtcctgcctcaagttaggcacaacatctgacttggatttctctctgtttttttctcttccagttgtctgtctgtgcgccctctcccacaaggaatagttttccacactgatggaattaatgcatatcgtggtattattggtggaatatgtttaacctttgtttcgtgatttgagaggaatggttcttgtgtatcgtgtggtgacagcaggttaaggagagtgtcagagctggtgcagagttttgccccggggccatgaggttctgggcatcatgactctcttatgaagttacaaaactgggcaagtgattgaaggcagaaagacactgtaataaagtgtgctccagtgatgtgtgctccggcttctctcccttactcatctgggccaggtgctttcgccacagtgagcctgggtgtcccctgcctgagatgagcacagtgatgtctatgcgaggttgtaggactcagtgaagtgccttagggattttgcctggcactctcctgggctcatgaggtgcctagggctgagacttccccttctctgtctggtaaatcatctctcccattctttcttctgcggcccttcatatgagctttgtaatttactcagggtggcagggtgaattcatcttttgctgggtttctgcatcacctgctcctttctggccaggtcagcctgttcattttttccatgccaacagcctctaagtgccagtaagtcacgtctgaacaaccaaagcatgtttccctgcgggagaatgccagggcaggcgggtctgggagccaagaggatttctcctgttcagataagtcgggggaatagaagagccctgtgacttgagacaagctttgagtgacacccagtgaatctcccatcactactttaatccctgccccagtgttctggttccccctttcctgcatgaggcagtacgagtaccctggcctggctttgggttctacacggtctgactttagcctgccttggtctttgttcccctctcactccctccacccctgccccccccaacacatgtggagtaccttaccctgccttcctagttctggaatggctgcccctgtgccaggccaccccattttctagaaccaccttcatacagcccctgcgcatcccactgtactatttccttgtttgtttttcctgtcaatcttgccttccgcgctaatgggacactgatgctgtatggtgatgtgttctcccacagtcatcttctcctcctgtggttggggtggggagctttctctgtgtccccccatgagagtgaggacagtctcatttaatggcaccatggtctgtggagccaggcaggcctgtgtgtctgactccacttcagcgctctcagccagcgtgggcacctcggacccagacagacgccccgagcctgtctttctggagaaggaagtagtaataccttttccttgagggagttatgaggattaactgtgcctggccctgaattcgtgccttgcaggtacttaggaagtgagttattacaagcagtgctttttatcatccatagatggagatgttatctatgctataggactgcagaaagaattacagagaattatgtagaatcactagggacttgattaatatttgtttacctttcccccacatggattgatgtcctttattatacttttgtacccccgcttggcaagcccttgacaaatattgatccaacaaaaaattagctctttaatgtatacgtttagaacctgttgctttgtcagtagtggtttttatgaaaatgaatgcttataggtcagacttctggaaaccctaatctgagggaattgggccaaataggaaagtgagccccttaaaggcagttgtctgaccagtacttggagcacaacaggttcttgctaaagcactgtgtttttaaaacagtggagttattaggttgaaattctgaatagcaagaaaaagaataatggaagtgctgccagccccgtgatgctggtgcagctggtcagtttgcagaaggaggccagttactagagcagagtggccgtagaggctgcaacacggtggccaaagcatgaagctgctgtatagtggcaaggtcacagtgatttccccgcagcctcggtttagagggagacggggtgtgctgagctgtgcctgcttctgtagaaggggccttctccaagtctgagtagccttaagccattaggactgctgagtctttctccacaaaaatatgtgggaggcctgcagggcaggtgctcaactaagctctggggctgcaaagatccagagccatgcccctccttggaggcaggtccttgtagacgaggacaatcgtagccttcctgattaaagcaggaattgtccaatcaggctatatgacgggcatcgtccatagtcttcaccaggggagcttttctgactatacatctctagccctgtggcttgagccagtcacttaatttcccctgagctttggtttcctcctcctggtagcagagagactatcagagtgaggggcagatgcaatagcatatgtaaaacacttagcgttgggcctggtgtttaactgcaataaatgttagctcatattttactgtgacatagatgctgtatgccttttgctgagtattaaagatactgagctgtagcatgcatacttgcatgaatcagtctgctaagttattttaagtttgcatttgaaaataaagggtggattgctatccaaatataaagaattggaaccaggctctaaaaggatgtttgctgttctttagcaaaataccattcttcttaagtttcattcaatcattccacaaaaatttaagcatctgttttgtcccaggcaggcactgtgcttgtaatggatgtgcaatagcaaacagaacacttgctttcagctcacacagagctgactcctgggcagagaatttcgacagtaaagaaatacaagtgtgatgaaggagaaaccctttggtactacctgctacatgttttaatatttaaatgttgacttagggaggtctttccatctaaaaataatgatttgccctttctcctgtaaatgacccctttctcttaagttttgggtgagagattttttttttttaaggaagaaagatattctacaatcgaatgtacaactgagataatgcttaggagagaatgtatactgggtttgtgccttggaagttgcttaggggaaacagttgtgtgcagttggaaagctgatgctttaaagaagcttctataaagtgaccccacaattaaactgttttgtgtacatctttatttatttatttatttattttttaattgagacagagtctcaccctttcgcccaagctggagtgcagtggtgcgatctcggctcattgcaacctccacctcccaggttcgagcaattcttctgcctcagcttcctgagtatctgagattacaggcatgtgccaccacacccggctaatttttgtattttcagtagagacggggttttgccatgttggccgggctggtcttgaactcctgacctcaagtgatccacccacctcggctttccaaagtgctgggattacaggcgtgagccaccacgcccagcctacgtctttaaaaataaatgtaaatacccaaggctcacagttccgttcttccatctagtctagcaccgtccagtggaagtttccaccatgatggactgttctgtggatgccctgtccagtacaggagccgctagccacatgtggctatggagcacttgaaatgtggctagtgctacggaggaactggattttggatttttttaaagttttaatttaaatttgaatagctacatgtggctaatggctactggacatcacagatctaacacaggattaactgacaaaattctttcctcttaaaaatatgtgtttattttgataaggataactgagacctgtacattccatttttcctgtcatatttagggctcataaagggggtggtatgcacgttttaaaaaatgcaacacaaccagttaaaccagctgtctaattgtacacatttcctggagctgttggtgttgattattagcaaatactaagtacttgtaatgacctaagaactataagacaagcaagtcgtcttctgtaactgagtatcagcggattcaagcgttaaggaaaatgattaagagaaaacaaccaaaaaagtcttaatggttctgtcaatcaagtggctatcaattcatggctattcaaaagcttttgtggctatgaaaataaactagattgaaaaaattctaaaacaaaattgaaacactcatttgagtttaaaattttagttgagttgatttttatttcttgttttggttcatttgtagtttccccccgcttcgttgtttcctcagatatggagaataaagcctggctggtcagtttcagtttttatttaaattcattttgtcttcattccttttaatctagcacagtcctgtgatgtattgggatcacagtgctctggggaaacattgaaatataaaaacattttcctgaaaacatttccagttatatttaattttcctccttgaatagaaaaatatttccaacttaatcctccctctcccctcttgaaatgaattgcatgctttggaaataacatcaatccacccaagtacacaaggacaatctcagccatttaatcgagatataaaggcttagagaactctgggcttcggaggcacagactccacctttcaggatgctaataaacgtggacgaggtctcgcctgggcttcctcctccattgttcagcgcagcaaaccagcacagcactccgtggccagggtttgcggggagaaatctctcactctgttttagtagcatcatcatccttatcagcaccctgcttttatttttgaacagccaaacttcctctttccaaacttcgtgtgacatctgggaccagctatgtttgaaggagtctgaacatgccacatagtggctcacgcttttaagggaggaaggccagtaagcctcctcaatggcagaattctactttcagtctaccctttggttctgttgtggttgttccttagaactttattctgctcattaggaagcccagcctccggggagggtttagcttctcatctaagcaagaagtaaaatgtcataatggaggaaaaaaaaaaaaaagtccaaactttttttggacttttagaaacacatccagtttgagctccactgagctatcattgcagttacaaagcccatgtatattgagatcggtgtaaaaattcagcatgtccacctgcataattatgaccagtgtattgaaagcacatttcatttagttttgcaacagccgatgaggtagattctaccaacattgttttacggaagaacaaatggaagcctggaaaaataaattgtctacctcacacacttcgcaggtggtaaacacaggatttgaactaagacatacttgattttaaagtgtttgcttttcctttgcactactgcatctgcgatgtttgcactcagacactctagaatatttggtgttgcatgtttttgccccaagaaagaacccattaaaatgaaactttccagttcgtaagctttgccctcaagaagggaaagaacttcttgcaaggtttctgaaacaaaaagaaaatgaaaagtaactttactgtatctgggttttctgattaaattacggtttttgcaagcttgtgcatttctcagtgtccagatagccaggatttttccttttaataaatatcactttaaaaaacaaacacacacattcttaaatgcatgattaactgtatagattgatttagttataagatgtcctagcctaaatataagaaggtgtatgtgttagaattaatttcttcaataaagagaaagaaattcaggaattgtggttctgttggtcttctgtactgtatatttttgtgcagccaaagcagcatgccttgcttcttggtttcatgaccacatgggtagtttcttgaagttttttcttttgagatggagtcttgctctgtcacccaggctggagtgcagtgacgcgatctcggctcactgcaaccttcacctcccgggttcaagcaattctcctgcctcagcctcccgagtagctggaattacaggcatgtgccaccatacctggctaatttttgtatttttagtagagacggggtttcgccatgttggccaggctggagtttcttgaagtattgactgatccttgactctgaactgtatgatcaaagacttttgaaatggcacaccgtttcttaacatttaggccaatttcagttgctcatatccaaaaataagtcatgattttcggagtcagtgcgcagcacttagtacaacaatccaaacccttgtacagaccatcctagtagaaatgtggatcttgagtatctcagcttcttagtagattttgaactccgtgaaagcaggagccaggcctctcacagcaagtctctccaatatgctcagtaaatatttgtcagatcgagcaatgaccagatgatgaaatacattaaagccttagggagaactgagactactgcaccagtttttgtgcactatcatgctggaaatctttccaacatgtattctgtacttctttgcttcttactccagtgaatataatttagtcatttctggccaacttgaggacatcagcgagcataaattgttgtattatgcataatacagtgataccctcaaggctgagtgggaggcagtttgccctctgctgaaggtttcttgtgcttattgtgttcttatggtttggttttaccatttttatgtctccatttctgtttaatagacttatttcagtaagaagagaaagccgtctccatcagcccctctgtaggtgattatttgccacttcctttttgctgtgagtgctttgaaaacagatttctaagcttgttagagttatgtgttaagagtaaataggcagtaagtgaaaccaagcttcttcctggtgcttgactaccccagaaatgtttatttgctgaatagttgagttctggaaaggtgaggtataaatgtgtgataaatttattcctttgcatgatttttttttctttttcttccctccctccctccctccatctatgtctctgtctttctctgaacatctctccgtctcagtctgtctctctcatgatagttgctggaataatttaaatgaatgtaactcatttacccacatcgaagcccaactcagtagtgaaaaaacaaatcttccaaatgaatgcactttccccttgatgtgctatatacaagaccttggcacacctagttcaatgacatagtattttagaagggcctccttacaccttcctctcagataaatatacatgcagggacattctgaagaagtttgttatcggtcttctcccctcctactattagctccgccctcctagtccttctctttcaccatgctgacccgcgtagggaggacccttacaccctctgcatgcagcgctggtgctccttagtgttcataaccccaacctccatggcctctctcgcagttctcaggttaggccctgcttctaggggacattagctttccaccctctactacatacttcctagttgttgcagcctttgcaagcaaaacttgttttcatttgggagacagcatggtctgacagagcctagatcctggggtgaagacattctgggtttgtatcccgtctttaccacctctgagcctctgatgctggacaagtcagcaagtctttgcaccttagtctcctttctgtaaaaaggagcttatggggatgtaatcagagaagccttagcatggctcttggtacaaggcacggaccaaatccatggtacgctcactcctttcctttcagtaatactgcctaaatagggcacatgtacctaaaaggattttgtacattccttgacagcagaattctcatcttctgttgcatatcccataatgctgggaacacaaaataaaaatggtagcttttcacattcacttttggcctcaattttttgttattccccaatgaggatcatttcatttggggctggtctccggaaaaaagtagatcaagcttttcagatgagatttgggtgaaaccctgacaaactcttttttattgccttccctaccacatagtggtggatcaggaaactgtagggcttatgatgctgggaaatttctgctaatgcaataaagatttttgctgttgaaagaatttgatctgttttatgtataacatgcagagagcagaagcatatattatctgtagcagatgatagagcagggtatatgggcaagttagaaaaacacagttctcactacatttgaagaaaaaggacaaggagttgtcacaaggatccaggagagtcgcacataattttctgtcgtgcattttgttgactgttcctctttgcatccttcaaccatcttaacttcccacttgcacctcgctggaagacaaatctaagctaaattaaatgctaggcaatatgtcagaatggaaagggccctcaacttgggatgcccggttctctaccagcctgaataaactccagcaacagtatttctctaggaatcatctgtaaaaagtagaggtttgtcatatctctaaactagggattcaccttatttattaagctatcagtgactttatcttgaggtgcacggcttttagtaactctggttcaagtgcaaggaatgcaaagttaagtgtatcattggaggtgggatttttgagtttgtcagtcatttattgatttgcatgtatccttatagttcaaaggtctttttctcaacttagttgatgatcatgctgtaagttgttttcttttgctttatcaacttttaaaaacgtttattaacttttaaatttgaaataatttcagacttgcataaaggttacaaagagtaccaggagttctggaacaccctccacccagcttccacagatgttaacatcttacataaccgtaatacggttatcaaaacagtgttcactccatactccagtgctgttaatctccagactgaattcggatttcactattttcccactgatgtccctttttttggttccagatccaagagacgatcctacctggcatttattgtgttcagtttttctaattctgggacgttttcctgggttttctttagtcattcacgaagttcgcacttttggagaacatggggccagttattttgtagaatatctttctgttagagtttgtggatgtttcctcctgattaaatttggggggtacatttttaacttggagatcacagaggtgctgctgtttgtgtctttgcgcatcctgtcaggagatgcgtgatgtttcctttcctggtgctgttagctttgatcccttagttaaggtggtctctgtggcttcctccattatcattactatttttctctttgtaattaggaagaatcttttggaggtagatacttgagactatctaaacaagcattctgttcctcattattctttcacccactaattttaacatccattactgtgatgtttgccaaatggtgattttctatttctgttttctacacttagtaattggattctactctcaggattttatgtattttttaacagtgagggacataaactttttaactagcagtggcaagtccacttttatttgggaggacaattactagtcacatgaagaagaaaaaatatgcagaagcttaagaaatcccacatatgaatgttatttgaaatgttcttgccctttctccctacaaaggaggtgaagaagatgacaggagatgttaattgccaaaatagtctcatagttttggtcctggctgcaaatctctcgtttttgatactcaagagaatgctattggggaactgactctgaagcacagcccagatgcttgagatgggttgggaaggtttacatcaacaccatgaatttaatttatcatgtgacattttatttctgagtttttaaagctgtaattaaaagaagtgttcaaagtgttgctttcctcttttagaataaacgtggctgggtgtggtgcctcatgcctgttatcccagcactttgggaggccataggcaagaggattgcttgagccaggagtttgggaccagcttgggcaacatagggaaaccacatcactacaaaaaaaaaaattagcctgtcatggtagcatgcacctgtggtcccacttacttgggaggctgaggtgggaggatcacctgagttcaggaggtcaaagctgcagtgaggtgtgatcatgcccctgctctccagcctggacaacagagcaagacactgtctcaaataaataggcaaacattaccaacatggcaaacaagttggaggaggccccctatttaattaaatttcagcagtcccaaatctaattggtatgaagaaatcattattcagaattttccatcactgaaatactaaaatcacttgttgtttgagacatcttggcctgtcacccaggctggagtgcagtgttgctctcatagctcactggagcaggagcctcaacctcccaggtttaagttaatgctcccacctcagcctcctgagtaactgccactacaggcgtgtgccaccatgcccagctaattttttaatttttcgtagagatggggtctgtgttgcccaggtccctcttgaactcctggcctcaagctatcttctccagtcggcctcccaaagggctgtgattacaggcgggagccacagcgctcagcctaaaaataactctttagccaaaagaaagttttaaaaaattgtctgttgtattctttgattttactctatgtggtcttttctattatttttaaaataaaaaagatttatactcctcaagtgtaacattttatcaaatctcatgcttctgtttgatgaaaccgaatggctaaattttttaaatatcatgcaatccatcccagtttgtaattttattatggccctcacacaagagcgtgcaagctatactaagcttcctgtggccctcgtttttcctcactgatatttgtaactcattccaaattaaattttaggagtctgaaatgtagctgttatatttgggagatgtgaagaaaagaatcgtaggcatctcagtaggctaggtatcagatcacacatgcttgctggaccaaagaggactccttacagtaggatacatgattctgagttagtttgtgtactaagtatatactatatagcttttgaaggggagacgggcacagaattcacaatatcatgcactaagggttattttgtgtttgcagtttccagatgaatgttttaaagttggctgcagaatacagcgagataggtaaaatctatttgagtattacttacagaccccaaaggatatcccaaaggatatgttggactaattcctaaaatatcctgtaagtcattgcaggtacaggcgtggatctgggtttggaaacgccgcctggatcgctggctgggctcctgcagccgccaaggaggggctggctggaggtggggctcggcgtgcatagcggccacgtgactgcgccccggccacgcccaccgtccctcacgtggtcccaggccacgctgggcttcggcatgtgctaaagtggatagaaaagggagtggggcccgggcgtggctttgtggtttgggaagatatgaactccttggggtttttttctcttttaattctttaattttgatatttggaaatgcgtaaaaggtttttcatttgtccttgaccacgtggtccaaacctcaatttccctagcagaacgcggtttcgatcactggtggatccgtctcacagcaccagtcatgctgcctcgctgggaagtggagggctcaggattcccgtggttcacgatccattttatgttggaaggaaatcattttgaactatctcagtacacaccctagtgtatctttaaacctaattgagtgttgatggaaaatctgcggtccgagaaccgtaagaaaagggggctcccacctcccgctctggggtcgccacttgcctcgcaggcaggaggaggctcccagagtagatacaacttgcccgtcacccggatgggttggtagtgcacatatgcacggggcgcagtttaaaatgaaagtaaaagatgcaaatgtgtttgcaaaagaaaaattaacataggatacgtgcgggcgttctcagttgaactcggtcttactgttccacgcgagcaccccatgactcagagcccaaatctcagcggaacagcccaggacgctcctgccgtccacaggaagacgcctctgtctctgtcccccgccgccaccacacagatgcacgtactctcttcacttccgtgtacccagtaaatgcagatcctgatttaaatctgcagcatgctgctttcttcccattgcatgtgggaagcttcaggttctcttcggtttattttctcatcacctttattaaaatgcagtaaagcaaggagtatattaatgcgggcctctgcaaatagagggaatttattgaaaagcagaatggcttgaaagattgaacttcatcttaaaaatcagaaacagactcttgttattaatagctttagaaacgaaaatctaacttctgataaattatttcagaggagtggttcaaacgtgtagtagatagctctgcctggtcatcaattatagtgacgtccttgcatcagctccagaaactcagaatattcatgagctttccagtctgactcagaccttcaggagccatgaaattttcctgttgggatgagaggaagcgctggcggtcgtttcggcagcttaatgaaaccagaaatagataagcacgagtgaggggtgatgtccgcttgtttgctcccatcatgttgtttttaatgtgtgaaagtgaaagttttaaaagtcatactaaatgtgtgatcctttttagaattcactgggtacgggtacgtggaggaagtgtttttgtttttgtgaatttgtttaaacaaatgactgaggctttgttttccactctgtctggccaagcaccattgctacacttttttaaattcatgacatcctgagcagtgaagctgttcttcagcccgcctctccatttgtgactggaagacaaggaggcagacaccaatggcgcctctcacaatggaggtttatttttttttaatctaacggagggattgtagatggtgtaaaacttccttgtgccaggagagaaagggggagagagagagagagagagagagagagagaaataacccattctaaacaactttaggaatagatgatccgtaggcatcaactttgcgcagcaacaaaagccactttctgaacctcgttctgtgaagttttaaaacaaattgggtttgtttaattaaaatatttcttaaaggcaaaaagcactgagctaatttttaagaattttaagttatatattaatatgagtagtgatttataattttctgttgaaatacataaattcgagaagccccacccctaccacttgccagtcttgagtccccacggctcctttgcctaggtctaaagtcactgcttgcacactcctgccttgcatatgccttgccatcgtgtgggcctcttggctggaagtgttcttgtcctcccgttaggtatcttttatgacgtgaatccttacctctaattattatctgtgtgtacatctcatcacctgcatctgactgtgtgccttgtgtatgtctcttagccctcacaattgcctgacatgccttacaaacgggtagaccaagtgttaaatgaacaaatatttaataagaacttaaaagctttttgactttatatatttttaaagccattgtgattaaacactatgtttgatgtggtgctaattctgtgctttatcaactgtgtgaattgtagtatttttaaagtaggaataattgagaaatattttgaagttaggttaagcatagcagtaaagtttccactttttaaaatagccaaatccaggccaggcgcagtggctcgtgtctccaatgtcagcactttgggaggccagggcgggcagatcgcttgaggtcgggagttcgagactagcctggccaacgtgacgaaaccccgtctctgctaaaaatacaaaaattagatggttgtggtggtgcatgcctgtaatcccagctactcagagaagtgtttgaacccgggagttgggggttgcagtgagttgagatttcaccactgcactccagctggggcaaaagaatgagtgaaactctgtctccaaaaaaaaatcagagcgtggtggtgcacacctgtagtcccagatacttgggaggctgagatggaggtcaaggcttcagtgagccatgatggcaccactgcactccagcctggacaacagagtaagaccttgtctccaaaaaaaaaaaaaaaaaaaaaaaagccaaatctgttgggtttttttttttggggggggggtcctttagaatggccctgacagatctttaaggcatggaaatgagccttatgcaagctcctggcaatcagtatgtgagttctgtctccttggcaagatacagcctcttagaccctcagtctggggaaataatgctgatttctcctacgagttacgagaattacgctagaaaactctgtggcgcatacaggtgccctgtagcctgttggttagaagcactgaccctgaagtcaggtcgcccaggttggaattccagctctgccttcttcaagctgtgtgactctgggaagtcacacacactctctctttgtgcctcaggctctggttctgaagatgggaacggcaggccctccctctttggcttgttgcacagatgaaatctgacagcgtatgccaagcgcttagcacgggtagcagtgagtgccccgtaaatgttaggtaccttcctactactactaaacattcattcttcccttccctgctagtacctgcagctctgactcatctcacacccttgagagaggattatcttcattaaaaagtttttggtctgcccagaagcaagtgttacctgtgagagagctgggcttgtgcataggttagattatttctttgggttattcctggggaaacctgcaaagaaatgcagccagaggcctctggttcattttactgctcatctcctaaaagtggtttctcagatttttatcctttttttctctttttcgaggaaggggcaaggaaatattttttcatattattcttgtcatcgtctatttatttaataacagttgactgttgaaacataggaaagtacttatccgccaggaaactcccttctattattggacttacttgctttccatttatatgttgtctaattccaaagagatttcgagacagctttcaattaaaaaaaacaaacaacaacaacaacaaaaaaaaacaccacataccgcatgggtattacacaggacctgtatggtcaaattggcaacgaccacaccacatgagaaggaagattattcttcctggaacctggctcccttgagattcttttttttttttttttttagacggcgtttcgcccttgttgcccaggctggagtgcaatggcacgatctccggctcaccgcaacctccacctctcgggttcaagcgattctcctgcctcagcctcccgagtagctgggattacaggcatgtgccaccacactcggctaattttgtgtttttagtagagatggggtttctccatgttggtcagggtggtctcgaactcccatcctcaggtgatccacgcgcctcaccctcccaaagtgctgggattacaggcatgaaccaccgcactcccttgaggttcttgtaagccaaggcagaagaagagacatcttaaagtctgtatgtgcacacctgcctccccccattttatatacaattcaagggctttgcttttggaaagtttgcctatgtagtcgtccagggctaaattaacacctgtctctatctgtgtgtaaggctctctgggaggagctgtgaggcaaataaaaataaggaatggtgtcccgcaaggagcttacaatgtgtgcattacaagtatatactgagcatggccctgggaacacagtgaaaaaacaggattcctgccctagtacagtgtacactagtggaagagagagaggcagtaaacctaaaagtaagtcttttaaaaactgtggtaaaatgcacataacataaaatttaccatccaaccgtttttatgtgtacagttcagtgacagtaagaacattcacattgttttgcagccgtgaccatcatttatattcagaactcttttcatctcgcacaactgaagttgtacctattaaacagtaactcctcattctctcttccacctaggccctggccaaaaacaaaaataagtctttgattgtaaacacgatcagtgctttgaaggagatgggaaggatgttatcataaaatgatggggctgcaggaatggcacctactcagagagggcggtcaggagagacctcttgggaatgatgacatccagcaggcaggtcattaaggcatctctaggcaggtccagagtgcaaggaggcataagccaggcaggtggaacagcgtgtgtgaaggcccagagtcaggaaatggtctgcttccttccaaggaaaagaaaacagccagtgtggttggagcaggggctaggagagaaaagatgtgcatgtgtgtgtgtgtttgtgtatccccatcatgatttagtactgtcagcgcttctgtgttctgaacctggagtacaggcagacacagccgcatcccagaagctcaagagtgcccataccaggaaattacagaaatctttgccaaatggatgaatgaatgcaacttccttgatacagggtcagagaggggaaatctgagaaaagcaggtgggcaatgtactcctgacatactcccttccgttgcaatggccttgagtgatggagcaagagtgaaggaatgttcccatggcactggcaccaggatgactttttgtgaagcagagcagttggtcttagatagtggaggtgcgggaggcatgagaactgggcagtctgacggctgcaccagccagttggctgtcctttccacctccatgcccaggagctggcccagggcgcgcatgcacaaagccagtgctcttttcaatcagaaaacagcctgcgtatgttcttgcttgcaactcagatatccagcccactgatccaggaagagattcctttgacctgggaagtcataatggcagatatttagacccagctctcaagcaagcctccaagttgttccggtgaacccgtaactttgagtaacctctgattgaaccagagagtaggaactaggtgcagaaccttgttgaatagaattgtttagcatcgtccatttgttagagcatttcaggatgcctgtcctaaaatttggtatcataatggtatttacctctcactcacctccatctcagcccagtaattaataacaagggacttgcttcttcacctgtttctttattggttgtaggaagtcttttccttaccacagaggaaggagcttctggatccctttgctacgtccagagagttttcatctaatctgggtgtattagtccattttcacactgctgataaagacatactcaagactgggcaatttacaaaagaaagaagtttattggactcacagtttcatgtgactggagaggcctcaaaatcatggcggaaagtgaaaggtacatctcacatggcagcagccaagagaagaagagcttgtgcagggaaacttccattttaaaaaccatcagatcttgtgagacatattaactaataacagcaagggaaaaacccaccccatgattcagttagctcccggcgggtccctcccacaacatgtgggaattataggagctacaagatgagatttgggtggggacacagagccaaaccatatcactgtgtaaaagttgaataaagttatttaggagcacattgtattgggagtttgtttgtttgttgaagagccaagtaaagtcattggaagcatgggaaacttttttccctgtctaaaaggaactccttcctagtggaagttgaaagctttcttggcagcctcagcccccaccctacctccaccaccccagtgggtacctgcatcctgaagacccttcacaatagcatctgaactatactgggccttcaaatgatgtcttgggtaaacccatgtccaacctgcactaaatgaagattattttcgagcgaatggattgaagaacagtgctgaaaaactagaatttgtaatattttcatttgagcagaggtgaaatttgaaatattttagaatcttgtcttatgattttttttctttctttgccacatagccctcccctggaaattaaatctgtggattactagtatatgaactgatcagagacatggcttggggtctccccatttacccacttcccagcacgttataatccactggacacctccaaggatgagagaccagcgggtcataatgcgagactggacatctctcctaccccatgtacacttcagctgagcaggcagaattagcagagtcaggactagaagttcagtctagggatcaaataataatagtagctaatgtttaaagagtacctaagatccgccaggagacatactcagtatagttccgtggtttgccacatttcatcttataccagtagcacaggtgaaatttgtcttatgtgtatactgaggaaaacaagtccctctgatacacagcagccaataaatgacaaagctgggatagaaacttacttcattctaacccgagagtccctgttcttgcatgggcacagcctgccatccccatgctctgcctcctaagcagaggatgaacttaagcatcttaaaattttaaacattgactttccctaaaaccaattaaaaaaaaaaacaaaacagacagacagacatgacttgtgcccttaaaaatgcagccaggctggcatataaatgggcgtaggctgtttctaaattttttgctttaaattttgccagcatagcttctggactggtagttttgtttgctttttaatatatttttgacactgtgtacagaggaatgctacctcgcgtcatcatgtcctcctccctgaaggcaagccaaggatgtcaaggggccacttcaggggatgtgcaccctgaaggtaaagctgctccagtgggaggggttggggtaaatgacaatgttagcagctggtaaatttttttacatgggatatctcacaagacttattgatgcatgttatacgtaataacctgaggcacatcaacattttccactttttcctattctttctgtattttcactgatactttttttcaaaaaaatctccaataagtttaggatcagcttcaagatttctctttaggtaaatagatttgtatttttgatggccatcctagtccagtgtaaagatatggacaagaaaccccacataaaggaagcaagatcgctggctgctttctctaggtagcttgagttgtatactaatttgtagattatttctcttcatcgaaaaaacaaaacattctgcagagggcagtcatgtgtccgctgtgcctctgctcctgtgtgcaccataaaacttgaaagtgagccagaatttgaaaatatcggattgggatgtgatttctttaagcctctggctaatttaatataaagtgtttacacttcatttttctggcagtggattttctatgtaggtggtggaagatttcctgtaagttttgcaagttccagggcaaagagagttgcaatatgcaatatctttctgtggtcacaccaacagaaagggcgatttcttaacctgctgcagttaccatgtgtgtaggtggatgctggctattacagatggtatcctttcaaccctcaaaattgttgcaagttcacaggtatgttaatgaaaatgaataagtggcatttttaggaattccaaatactgagtcttggaagtagataatcttttccctaaatgtatgctccggtcagaactgctgcctaccacacctcgtgggtgaaacagatatttcgagcatgactgagcttattaagagccctgcggcgcttcctctgccgggggtttagaaatttcaaaggatgggggttgagggagggaggagttatgggcatgtgatgtggacagggcgggcaggaggatggaagtaacaggtccaaaatgtatctttggtggcccggcagagctcttgcatggggtgagaatggtaatttaggaagagcaagtcttcccatctgtgaagcagaagaaaaaagtggacttaaggagaagttcgggtgctgtttatttagataggagtaaggagagtgcagttggggaaaagcacttcagaggctttacttagactagcagaagtctgtttggcagggtgggaagcaagtgcagttgggagaaaaacgttttcaataggcagtttcagaattggaaattggaggagggcagtccatttcaacatttccaacagtattaaagaaaatttgcgggttgtttgtcaaaaggggtcatatgctttaaagattgagagatcttttcggtgaagtaggggagctggggacatcgtgatgtgacaagagccgtgggctcagaggctggggacctgggtgtttaacccaactcttgtgagtggtgtggctttcatagctttggttctctggtcttcactttatctgccaagtgaagacatttgactggatgtcgtgatcttgagttgctttcagctccagaattcgaagaccccttccattgggcattcatctaatttcaaagatgctccctggctccagctctgcagtgaagcagaacaaactgatacagcctagcttgggggtggggagtcggccctccttttcccctcccttcccaggtcctctgggtgattgggggaaactgagaagccgttctcttctccagagcactccatttaacaagcattgcagagcctggctcgtgctgcagtgaacaaatgctgacttcagcctttaccctgggtttcaggtcacactgattgtttgcaaaacatgttctttttttgtcacttgccagtacttgttctctgtgagtaaaacacaaacacatcctcagggatgttgcacaccagtttgcagcctgcagcttctgccctctggcctgcccaggtcctcggctccgggacgaggatgctccgggatttcgggagacagcagttgttttgacatgaatctcaaagttcctacaaagcttatttctttgaagaaggccaaaaaaaaaatgaaacattttcagatctttgttttcagattattcaagtccagaatgttggataagatttttgaagaagagatttatgcttgagattccttttagtttctttctttcttttcttttcttttcttttttttttttttttaggtgacttggccagtttgggtttttacggtgttcagggaaagggttaagaagttaatttgggaagtacagtcatgtgttgtacaagttgctgtctactgatcccttcattgagcaagtaaacttcacacattctcgtgtctgcaaagcatgtggatgcatgggcagttatgtgtatgaactttttttttttttgagaatggctttagtgttcagaccaaggatggaatgaaagatcacgtgtgctttccactgtagagctgccctgcttgttttgattttatagttattctaagtgttaagttccttcatctttcaaagcaaattcctttgatccctgaaaatcagctaatgtttgggaggcaattaaaagatgaggctgtggggttggggtgaaggcttccccagcaggaagagaggagaagcccactggatctgggagcacggtgctaggactctctaagcgtgacctccttcagtttggcccagagtggtcagatagtttgccggggcataggatggatgacaggcctcatacgcatcacgtctgaagggaaagcccttgaattttccacgctactttttagtaacagtaggctttgtcataattggcttcatgttccagctttcctaaaactgtaagtgatgttgggtgggccagcagcaaaataattcactttacaatttgcatgatagtctggaatgaaccgaatacctaaaaccaggaaataatagtagatatttaatggtttggggatcaaataagaatttactcccagatgtttcctaattaattggaaaaagcagaaggttgctggaaggccatctccattgggcatttacaggtgaaattcactcttcaactaggattttactcatgggatgcctgtgttcttcatttgaacccaattttacctatcatctacaaaaaaagaaaactattaagagttaaaaaaaaaaaaagagagagagagtcttgaactttgaaatccttcatccacgttttataaagtgtggggtcagattttttccctagttgaaattgaggaaatgagagttgccaatatgattggatttgtactgccaagatggggttttagcacttctaatgcattctggcaaggctggtatacttgtatcaagtgcacagccccactaccaccacctctaccacccacaaaaataaaaactagcaaaataaaatatgagccaacagaattctgtgggaatggcaagtgttttgtttttgtttttagtagtaatctttgcgagaacattccaaagatgatagttttacatttgtatgtttttttccgaggcacttttgaatcatcagatagattaaatataagttccatgtatttttgaaggtgggagtgttctttggtacagttcccccaaaaaactggttctcatgaggcttatgtggtaattctgttaacgagaatgtatgattatctgggatactctgttctgctctccatcctggataagagtttactttgaaagtctagttgatcttttgtgatttctgcacaatgtaaaaggtactttaacttcaggagatagggccagcaatcagatttgatgatggaaaagagtagtgtagcatttaagcataatgtatactctataataaatgtttacaagtccaaaagtgtgccatcagaaagtaaccagatcaaaggagaggtgaccagagaagctggaaagataagaaataaacaagtttcaaggttactgatctgtagctgttgctgtccatgcttcttggcagctttaattatgacagggagagggacccagagggagagagagagactgacttacacataaaggcattttatcacaaagccatctaaaacaaaagtgttaaaggcacaatgctgtgtttaaaaagcatgtacttctttaagagctcaaatttaaatatataatacaaacttaagatccaaggaagaaaatggacccaggacacgaagagaagttaacgccacaggtaatgcagatggccaagagatgtgtgaaaaagataatccagcctcaccaacagccacagaattgaaatgagatacctgtttctgcttctggcattgggaaagaaagaaaaatggcactagcagccttttttttttttttttttttttttccccaaaaaatttgctactcttgaggttctgtcaaagaatgtgctgtggcctctagaagcatttttaaaaagagactttcacaagtgattgtgcaaaattgtgaggtcactgaataggtgtgtatcctcctaaggaggtagcgttggaggagctgttcttgttcaatttactcagcacctgtgaagaggcttcactgtgatttgcctgtacaggtgtgcaggtaaaaatctaagttccacaggtagtgcaaaaaaatctacctccctaggtacctcgtacatttatcacagtttcctggtaaacagttctgctgttgttgacaaaattttatcagaaacattgcatactcttctctaaatagtagtttccctacaagtggctgtcttcagtttagtcgtttaagttatgttgacataaatgattatgtgtgtggcaggggcttttgcgtaggttgttgaaacattgcaccttttggactaacagtttttaccaaaataggcagaagtgacatttgcagccacagctgtgtggcattgagcgtctaaggtatgtgtaataggcagtgtatcggtagcattgataccttggtcaacaccagtaagccatgtaattgcccagaagtgggctctaacactagttttaggagatgcagccaaaacgacaaagctggaggcctctccctctgagcttggcctccacttggtcaaaacagtccccagtttgtccctacgggacacaggcctgccttgttaggaaatcagcaacatttaggagcccacaatacctcacataactctgtgtacagtaacagagaatggaaatagggctgtaagcatgaacaaccagtcaagttacaaatatagaatactctctcaattccactttagttagtcatggagggacagtgtgagttttataaacttataaggaatatacaaacagttccaaatttaaaataacttgaagtaacttttaagtgtgtgaaaagaatatttttttccaccctgtccatttaagcatctgtgacaggcagtattaagtgatgggtgtctttacgtacacatgcctgttgctcacagtactggggaagagttgcaaaatagtcacccattctgcagtgatttctctcttcttatttgtgaaagactcaaaaaaaaaaaaaaaaaaaaaaaaaaaaccaccaccaaaaaaaaggccaggcacggtggctcagacctataatcccagcaccttgggaggccaagtcaggtggatcacaaggtcaggagagcgagaccatcctggctaacacggtgaaaccaaccccgtctctactaaaaatacaaaaaattagctgggcgtggtggtgggcgcctataatcccagctactcgggaagctgaggcaggagaattgcttgaacccgggaggtggaggttgcagtgagccgaaattgtgccattgcactctagcctgggcgccagagcaagactctgactcaaagaaaaaaaaaataggggggatgtgggttgtgagagcgacactgtgtgtccatgcgtgaagaaacccggctcatgatgacctcgccccagaacgccgaagcagggccggtccagcctggatttcacagtgttcttcattgcctttgtccttgattttttgtcgttaccattataacttatctctctttcccaaatgtataagtaggctttgaatatgagtttaaaagaaagaattcggggatgatttcagagtacactagaatattttttaaaagaatattttataaaaatacagtgatagtaaaagaagtagaaggccaaattccgcccccagccccttcttaatattggactttattcctttgcttttttcccttgctgccatctaaggaggctttctgtgctatagcatccagttcctctgccaggcatttctgtaaagatgaggcaccttccactgttttattctccatcattagagcacgtgtcctgctgactcggagcagaggggaggcacacgggggtgaacattccctgacagattggatgtctcttaactcttttttcctggtatcaaagaatggcacaatttagttgatttgatagcgttaccaaatcgtttttcctttagaatgaatctagaatgcagatagattctgaggtccagatgggcctctctccaccaacctgtgaccagtgtacctgtgattttatcactgcacattcatagaaaggttacagggctaatcttcccgtgatatgaatcatgaaagtcaaaatttatgaatgaaaataaaaaggaatgaagtactgatatatgccacaccagagataaatattgaaaacattacctatgctaagtaaaagaagccagtcacaaaagacactacctattgtctgattccattcatgtaaaatatccagaataggcaaatctatagcgacgaaaagtgtaatagtgattgcctgggaaaggggcgtgggaagcatggctaacgggtattgggtttttctttggggtgatgaaaatattgttaagattaattgtggtggtgtttgtacaactctctaaatatactaaaagctaccaaattgtacactctaaatgggtgagttatagggtatgtgaattagatctcaataaagctattgtaaaaaatgtgtgaaggaaggggaagcatcctataacctataccatcccaacagcccagctagaggacgattcctgagcctccttctcagcctttgtgttaattctttgcattgatgacttctctctctttacccttactaattagctctcaaaacctctatttaataatgatgctatttataactttcctccttctggtttcttgcttgccctttttgtggtgtttgcttgtttttcttttttctcaatactctgcccagcgttgcgtgttggttccggagacttaagtgatccagtgggcactgtcaggcaattatttcttttgctcattaattaagtgttcacagatacattcagcagccaaaccttgtggcatgccttctgtcccagacagtgagaatctacttggaacttggatatttctgtgagccttgattatatacaccaccaaggggatggcatagaactaagttttttcttcttctccacaacagactttgttctttaatttcacaagcttgacatagcctataagacatcatagtggtaccatagacagttttcccttgatgcccatgggggatttgttctgggacctcccacagataccaaaatccacaggtttatcagcaagggtcactgctcaattgcaacaactgaagcagaagctcctctcatcagaggcagttactgcagcatgttctgtagggcaaatataaccatatgtaagtgactgtgctatcaggagacagaacaacaagacccagaaagactcagtgacccacagagccagttccacccaaacaagtcttactaatgagattagataatgagagtgtattttcttcatcaattcatgtagctcagcaaggctggaaactgcttgcacacttctgcagagaaaaaaaaaagttccatttgctggaactcaataaataaagaaggccttagtgggtacgtgttatctccttagcatcacctggatgcctgacccttttccagagtgtcatgttgcctgggttttgtccttcagtctaagtgatacacctcttagtgtggcggagaaaagggtgctgtatttcttcctgatggatacatgcttaaatggaaaagtagcatgagatgaactcccatagccccttccttttattatttttaaaatattcattcatttatttatttatttttgagatggagtctcactctgtcacccaggctggagcgcagtggcgcgatctcagctcactgcaacctccgcctcccgggttcaagcaattctcctgcctcggcctcccgagtagctaggactacaggtgtgcccaccaccacacctagctaatttttgtatttttagtagagatcggctttcaccatgttgaccaggctggtcttgaactcttgacctcaggtgatccacccgtctcggccttccaaagtgctgggattacaggcgtgagccactgtgcctggccggcccttccttttagacaatagaaacatgctgcaaccacataccaccataaacacggtgggggaagaggctgcaatcaacagtcaggaggatctgggttccaagcccaggtttgcagtgtaacagctgtgtgctcttggtgtgaacatttggtcatgtacaaatgaggataatgatactgcccccttgtgatcattagggggattaaattaaatgcagaaatatatgtgagatgcttaatgtgttgtaaggcgcatggaatatatttagtgaatattaactgtatattaatacaaagtcctgtattcagaatctccagtataaattacatttatatagtagagatatgaatagtttttgtgaacaagaagacctggaacttcaggtgactagaagctcagagtgagccagctatgtttgatgatagttattcttaagatcacacagagaaacggcaagcaagctgctttgggcaaaaaagagcatttctacactgttcagactgcctctgtactgttagaataggtctagggcgtgttgcgtgagtggtgactgagtaagatgttcagagggaagccgtgaccgtcatcttggaatattgtttgaaagtctgacctgtacaaagcagcactcacttcccctgcgtgtcagacacctgcatgagggctggggagggtccagtacaggaaagcgcatttttaatatgtgtatggaggaagttcgtcaagatgggtgccatctggcagtggagtagcacttcctggaaagtaatgagctcccttggactttgtttgaagagtcacccaggtttttgtaaagaagtgtttcagatcagtatgcaatggatgactgtaaatttctcttcagatctaagaatctgtgattggatgaaagggagaaaggactgcataagtgcttgttgcttgtaaactgggccaggtggatgtcatggccctaggagcttcttgcctgcctttgcatgccataaagcagtcctgcaacccagtgtcacctcagagggatgggaatgtagaagaagagagtgaatagggacagtgatgaggggtgaaaatatgtaactccttgccccttctgtataccctagtacattaggaagttcacccttgtctaggcttcctgttaggaagacagcagactcaaaatggagtctcaacccctttcaaagactgcaagatctccttgtacacactggacttgggagaaaatgagagctttcaggcctgctatcttaacaggttcagaaaggtgtggtccagccccctgactaaccagccctgctgtgcacactgagaattctgctcaggtgtacctttctgtgtgctcctgggtgcacccccaaagtgctggttctcttgaaaacctttttatttaggttcagacagacaaactgtggtatcttccattctgaccataaagtgtttcttctgggtctaactactatagtgggatattttctctagaacaagaggttgtttctttttggcattgagaaatgttgccgatgtgattttcttttgtgaacgtttaagacacagcgcttgccacttgaactttcttttgccgtgcgtagctgattccacataatggctgcagctccaggcagaaacctgtttggaagttgttttaaactcttcctggaatctctaggcagtggctcagtggggtttttttccaaccattccttaggatgaccagaagcttgacagaatcctcttgtcttcattttgagaaaatatgtctttactgtgtgtatgtgcagcatttggttttacctcgtgggtctaagcattttcaactaagcttccttttccaacctagcagacttgtttaaagaacttcaaactaatagccaagctgtaatacggtggctctctcagcctgagaagcctgtgctcaccgtcactctcttcttccctggggtgatagggatggggagtagtgtgtgtgagaggacagaagcgaggattgattgaagattattttacgaggcgagagcatggtggcacacctgtcagctgagtggactcagcgcctgccccggctaggctgtcctcctcctgtgccagccgtgggttccctgagtccctctgcagtcattcatgggtgctgaaaataaagataccctttctgtcgaaagtgttcgccgggctgcctctgcctccctggaaaagcagcagggcacacaggcttcctaggcagcccctgagggaggggctctttttattgtcactctggttagtttgaagaccagacagaaggcagcaaaaaccaaccctttgttgaaaactctttgcctttaggcccttggtaccatgttcatgaggctccagataattccacaaatacattattattgttacctagacttggggacagagaagggtgaaacatgggtctgggaattcacagatgaatatactgtaatcccctcgagcacatttcttttaaaggaatgggggtattctaaaggagtgaacactccactggggggctgctaggcccctgtgaacggtggcagccttggccacggtgtgtgctgtgatctctcctgggtcccccgggcatcctcagacctcccccacacccaacccacagtcccttctccatccatctgctgaccacaccccaggatgtttccagctcagatcacgcctgattgcatccacacaaactgcacgccaggcatttccgtttggatgtgtacacaaaaacaacacgtcccagactgagctgatctttctgtacccctcaaaagaaaagttctgtacccggccaggcctggtggctcacacctgtaatcccagcactttgggaggccaaggcaggaggatcacgaggtcaggagattgagaccatcctgggtaacacggtgaaaccctgtctctgctaaaaatacaaaaaattagctgggcatggtggcgggcgcctgtagtcccagctacaggagaatggcaagaatccggaaggcaaagctggagcttgcagtgagctgagattgagccactgcactccagcctggtgacagagtgacactccgtctcaaaaaaaaaaaaaaaaaaaaagaaattctgtacccttccagatggtcctggacatatcttgaatctaccctgcttttcctcatctgcactgctgtcctcttgatctgggctactgaggctagaatgcacatctgatcatgtgcctcctgcttaaaatagtatttttcctcttaagagtagtccaaactcctattgctggattaaaaggctgttccaggctctccctacctcagggcacaccatctttcctcccagtctcccctcccctctgtctccagtgcttccatccttcagtcatgctgaggttgtctttgttacctttgcttctcttggcccgcactctctgttggctctgccagcatccctatgcacctgctagctcctactcacttgtccagctttggcctggaagtcccttcccctggcaggcagccctaagctaccctttgcttgctactggctcatattctcactgcttgtcctcaggctgtgagccctgggagggctgggctgagtccccgaacctgccacgtctatagggtgtaacctacctgaggcctgactgctaaaatcaaaagaagcctttctcatttgcttagctgagctaagtcctttctggagaagaatgcccacgtcctgggtggacttctgttcggcctggggcaggacgctgcatgtcagttcacctagagcccctcgcttgccctcacccctctccctttccttctcctccccgtgttgtctcatggtcagttcctctcctggcaaggcaagagaatcataaaatctctttggaccatgtgtctctctgatgcactttggaggttgaagctcactttcgtgaagttaggagcggttaatcctcctgcacgaggatgcatgcctgctagggaaagcctccctgcgtttatatggaacagtggtgtgtaccttagggcaacccagaaacagctgagatggccctaaactcttccgtattttgattcagaagctttaccttatttgaacatctgcagaataagttctttcctttagaaatgattggggataaaattgtttgcattatgaaatattgtatggccaggtggcccctctttcatgttttgttccttgtgaagaggttgagtctcctattttttttttttttttggagatagagttttgttcttgtccctcaggctggagtaaaatggtgcaatcttggctcactgcaacctccgcctcctgggttcaaacgattctcctgcctcagcctcccaagtagctgggatcacaggcacgtgccaccacacctggctaatttttgtatttttagtaagagatggggtttcgccatgttgggcaggctggtcttgaactcctgacctcagttgatctgcccgcctcggcctcccaaagtgctgggatcacaggcgtgagccaccacgcccagcctatggtatgcttttaaaaatggtttctctgcactaatgattatttaaaaaaaaaactctggcaagaacaaaaacaaatggttttttaaaaactctagaaataatttgatacattcgaggactctggagagggagagagttaaaggctgatgtgtgtgactctttttcctctccccccaaggaaaaaaaatgaagagaaggagcttttaagtgcagtgcctcgtttttatgtgattgcaaacctgaaccaatccttttagtggtggatgtgggacatgttagcttttccaacagtttagatgggcctttgtttttattgttggtcactgtaagaattccaaggaatagaaggatctcatgggcaaaatcagtttgcttttttctctgtatatttgttagtttatagcagcttctattttcctcctatttttaaaagctgaaatgcctttaatcgcactcagtgtgtttattcatggaagccagagaagagggtcccttcctttcccccatagcgccgtaattggaaatttggtagtactaggtgaaattctcagttttggcgctcgcatggaacagccatccatctgctggcgagacacactgcccggggcttttcaagaaatcccttaatggtcctgaacactaataatatttatatacattgagatgagacaaaatttacagcgggctctggggctggctccaggactctctaatcccacacttgctcacgttctcttgcttgcctcctagaatcctttcaggttgtgcttcagtgaggggagcatggtgtccgtctctgcagcaatgcttatttatgcagttcgtcctctaacaaacagagcaactttccttttgaccttcccctcttctccccatcacattccattgctgcccccgcatagagcatgtgcttatgcatagtttgcatcatttaacacgaaggaaccccttgatttgtgatccctttaagaagttgctctgtatataaagaaaatgatttttcctggttggttttactgaagttccttcagaaatagctcccaccaccgaaacacacctgacttccccagcctgtgtatcggttgtggcacggactgactgactggatggtataatttcactcactcctttgggaagtttcgggggactactgctcagatgtgtgggaaatgcggaatatatctacaggtactttgtcagtttttttttttcttttctttctcatcctggaaaatcccggcattgatatttaggtataactatttgcaagcaagtgcagagggacatttttctgttcttttcaacgttcttattactactgcattaatagctacttgatcttaatgtctattacacatcattttatataatgttttctttaaattgtcagggaaagggattctgcaagtagatgttggtccccccagttagtgtctgatgatgatggtaagattctcagagtttccttcctctaatgacaaagcatggtgatggtgatgtctgaagagcagcctcggtgctccaagatgggtgtatgcttaatactgctggcacacgcctgacgagcgggaatgtgagcgttgtttctgtaaccagttttactgaacctcacagatccattatacgacgtgaattttgtgggaataacataggctgggagtctgctctcttccagcctggtccctctcttctttcagccctaccctctctgatcatcatgtcccttgcactgcggccaggtaacctttctgatacgaaggtctgggcatgttgttcccttgcctaaaactttccatggtttcgtattatccacagttgggctaaaccctctgggacaggccttcagtgcctccccgggcagtggtccctggccttcttcagtaacacccaagcccttgcacccacagtgacctcgttgcttttacaagcatttacatgtgatgttctttattcctcccttgctcatctttccactttcaactccacaaaaccgtcctcggcacccagaagcccaggaaacaccaggcagctccactcactcccgtacttgctgtgtcgtccgttccctggggacaggattgtcgctgatcctgcgtgcatctgtctggcacacaggtgcagcacacattaaatagctgctaaatgaataaatgaagaatagatggaattatattctgttgtgaccagtttaaaaacatgaaattggaatacccaattgcagtgtttctttagatcttggaccttgaggtgacctctgtaatggatatatttgaaattattaactgtcttcaagtgggggtttgatgagagagagagagagagtgtgtgtgtgtgtgtgtgtgtgtgtgtgtgtttacagaaaatatgctaggtttgtacattcaaatttgtgttatcctcttcaagaaagtcaccttggtagacagcatatatatcccaacattttaggaactcataaaatgcatacttttttggtgtgatcagagatgggtaactccttattacttgtgggttagattagtttttggaaatagcctggagtcattgagagccaatccttatcaacaaaatggcataaatggacaggaatgggtttcttcttcactttagagatagctctgaagacatgtctcagttgggattagttcagttgcatatatgaatagcagtcattgaaacaagataaaagtgtatgtctctcacatctaaagaagtctggagtaagcagtccagggttagcctagcggccccactctcataagggactaagttccttttatctcgcttcaccattcttgatgtttcgccttgtggtccaaggttggtacttgagctccaagcattactactgcattccagccagcaaggaggaggatggccatgccctctttgttctcaggagtcttccaggaagttccagtcacaacgtttgtttatatctcactggccagaacttaagtcatatggccacctctagctacaaggaaggctgggagatgtagtctgtaactggatggccatattatcaactaaaaattactgaaaatgacaagaagaataaataatggaaggcaacctgttgtttctgtcaaaggatgacttcaaaagagaaagttgcaaaagtatttcaagcttgacagtatcatgacagttttcttcagaggtgacgctattcatttgcatgtccaagttctgatatctgttttcaagttcacctatttgcagcgaaataggaactcttggaggcaactagtgggtgtgtaaaccggtacaaactttctagaggacagtttaacccaacaagatgaattctggaaattgatcctaatgaaatgttaagggtgctcatgaagattgctttgccgattgcaataataaaaagtaaagaaaatatcttataattggggacaggtgtaacttatgatacattccacaatggagtgtaatactgctgttaaatgtttgtggaattcacaatcttttatgccaaaagaaagctttcagaatggcttgtcttttttgtagatacttgtatttatatgtccatgcacatacataagaaaggaccagggaaggtctgcttgaagatattaataaaggggtcacttgtgggtaggtggacttacttgttctctatattctctttacttgtttgtgatctctggtttttttaatcatgtatttttattacaagaaaaaacaaattctagaatctccactcaatattgcatgtcagagtcaaaaagatacacatttaaataattttgtattgttttccaatttgaggataaagtaggaaatgtataatgcaaaccagatttcatattttgttgatttagacttaatttacaagtaaggctgacagcccacagagtgtgatcacgacagcattgttatggaaataaatgccagctcatgcatttgggatgtacaccatggatctgtggttattagatactgatttcactttagcacacgaagaggcttagcggaggtggcttctaatatcctatggttctgtgggctcggagatgctactcacccacttgtcagaggcattgaaaccagagcaactgcatcttgaataggagctaggtaaaatgaggccgaattcccagacagttaagacattctgagtcacaggatgaggttaaaggtcagcacaaaatacaggtcataaagaccttgctgatctagcagatgcagttaaagaagccggcgcaaacccaccaaaaccaagatggtaacgagagtgacctgtgatcgtcctcactgctgcactcccaccagcgccatgagtgtttacatgtcatagcaacatcaggaagttaccctatatggtctaaaatggagaggtatgaataatccaccccttgtttagcgtgtcataaaaatgggcaaccagcagccttccaggctgctctgtgtatggagtagccattcttctgttcctttactttcctaatcagcttgctttcagtttacagactcaccctgaattattcttgcgtaagatctaagaaccctctcttggggtctggatcaggactcctttcctgtaacacacctatgttcttggacttaagaatgaccctcagacatggtgacttctttgtcatctaacagctttggcttatttgaggtaaaacctttgatatctaaggcagcagaaatttccctgaagtcattttgaatggtatcatctttactatagtgtagtttaatcattttcaaagtaagcatttctgcacactaaggctttaaaagagttttcagtaaggaacatatttgaaatggaaagtgagcagagcacaatgccttttaaattactgataaaccatagagttcctgtagggcttccactggctgacccacgcctgaggcaaccctcaaatgtgggtattatccccctcattttacagatgggaagagagaggatcaagatcacagaagctaatggtttgtcccagaccaaacaaggagttcctaggagagactgaactttaaagatatcgactctctgcaggtctaagtggatgaaaggacagtggtgggggtgaggatttcgtagtgtgtttttgcattgtctcctcaatgagtgatctggtgctggtggtagcagtgaatgacccagaaggatgctggccaggcccagagaaggcggtgcctcccctgcccggtctcatctccgtctctcctctctctccacagtgtgcccaagcacgtgtgggaagcgggcgtgcaccgagaacaatgagtgctgccaccccgagtgcctgggcagctgcagcgcgcctgacaacgacacggcctgtgtagcttgccgccactactactatgccggtgtctgtgtgcctgcctgcccgcccaacacctacaggtttgagggctggcgctgtgtggaccgtgacttctgcgccaacatcctcagcgccgagagcagcgactccgaggggtttgtgatccacgacggcgagtgcatgcaggagtgcccctcgggcttcatccgcaacggcagccagaggtcagtcgcggccacacgtgtggtcactacccgccccacctcacccgccaccctagcacacaaaggtagactctgtcggttgtttcatccgggtgcagccctcaggaagttcactgaggtgggtcattttgagagggctggcttaccttaaatgtttggtgagattctaggaacaattggcatggcttaccgcccccctcaccagtttgttttatattttaagtgcatactgcctggccatttgaaattaagtacttgcttgctggtttcgatacccagagttcatagtctctctgggtacttgccaagctgccatctaagagacagggaactgtagttttggattttcctagtctgggtgctgctagccaggtgaggctttggaagtgcaaaagaaaagacatgctaagcccccaccaccatccttgagaccagcaagcggacctaaacatcttagtgcaagagctagcagcagctcagagtaggcagtagcttaaaataagggacatttttccatcagcacttccttcctctcatccccctctaccttgaccctccctcagtgctcatcatgtccttcattttccttcctgaactttgagacttcacttgggaagcaaagaagttccttatggccaggcatgtggctcacacctgtaatcccaatactttgggaggctgaggtgcttggatcacttgaggtcagagtttgagaccagcctggccaacgtgatgaaaccctgtctctactaaaaatacaaaaattagcacctgtagtcctagctactccgaggcaggagaattgcttgaacctgggaggcagaggttgcagtgagccaagatcacactacttcattccatcctgggagacagagtctcactctgtctccaaaaaaaaaaaaaaaaaagagaagttcgttataacaaatgccatatgcccttttgtacatgtcaactggacttctataaatttgtcattggtttatgcttttgaaaataagatgttagcattgtttaaaaatgtgataactataactttgaaagcaaaagaagattggagatttggggttgctgttccctttcctggagcagagtaaagaacttttaggggctcacgcctgtaatcccaacactttgggaggccaaggtgggcagatcccttgaggccatgggttcaagaccagcctgggcaacatgcaaaccccatctgtacaaaagattaaaaaaaaattagtttggcgtggtggcacacacctgtagtctcagctccttgggagttgcaagtgggaggatcacctgagcccttgaggtcaaggccgaaataagccaaaatcgcctcactgcactccagcacaggcaacagagaccctgtctcaaaaaaaagaacttttaggaaagttctgttttagtggactaaatgcctccttcatgattagcaccagggggcctgtctttctgagtctgtcaaaatctattctacaaatataaaaatatcgttagaaaagtaggtgttaattttaaatataatttttgctgcagcttatgaagtacattgaggaagtgtttataaaggggattctttttctagtgtattatttggagacgcagcttctactgtaggcttaccttcaaatcaaagataatacattcttttatagtattagatgtagagcaactttctccctcttataatctgtataaccattagcatactaacaacaagaagaaaattactctgaatactttaaaatgataaataggccaaggacttcaatgagctgtagaggatacatattacatccaaaatcagtctaccacattgtactcacattttgttggcagccttcgagtgtaaaagggcttttactggtgcacacctcgggcccaggggcagtgcctggaaccaagttgaggctcagacactattcagacgtcaccttcctccttggggtggggttaggggagtggtagcttgtccatgaactcagtgtgctatcgtctttgttttgtgaatacattttcttaatgacatttggaggccttcagtcgttctgcagccaccagagttgtggcaaagtgggaatgctgtccatttgacagtgttgtttcttccgctctagtgcactcttcagagaattgagccattatttcccctattcattcttacagtccgttaaaaactatacatctacctttttgtttaaaaataaaacaccataaagaataataaattcccttctctcagcctttgaggcttatttaacaattactttgaaatatttaattttttcatcttgtttataccttctctataccatagtggatttgaggaagcttaatctataaacatgttatcaaaacacttccttagaaaaacattttttaagtgcttgatgactcctagactttttaccaaagatgattggttccattttttttttcttttcttttctctttgatagactctggctgtgtcacccaggctggagtgcagtggcacaatcatagctcactgcagcctcaaactcctgggctcaagtgatcctcctgcctcagcctcccaaagtgctgggattacagatgtgagccactgtacccagcttcagatttttctatttgagtgaaagatggagagaaactaaacatacacttatggtacaacccagcagttgtaaccctggatatttatcacagagaaatgaaatttatgtcaacacaaaaatatgtacaccatcgtccatagcagctttatttgtaataaccccaaattggaaattactcagatgtcctatgatagatagttagttaaactgtgggacatccacaccatggaatattattactcagcaataaaaaggaacaaaccattgaagtacactacttggatggatctcaaggacattatgctctgtgaaaaagccaacctcaaaagatcacatactgtataattccatttatgcaacatcctcaaaatgacagattatagccaggcacggcggctcacgcctgtgatcccagcaatttgggaggctgaggtgggtggatcacctgaggtcaagagtttgagaccagcctggccaacatggtgaaaccgtgtctctactaaaattacaaagtttggccagtcacagtggctcatacctatctcagcaccttgggaggctgaggcaggcagattgcttgaggtcaggaggccaacatggtgaaaccccatctctactaaaaatacaaaaattagccgggcctggtgatgggtgcctgtatttccagctactcaggaggctgaggcaggagaatcacttgaacccaggaggtggaggttgcagtgagctgagatcatgccgctgcactgtagcctgggcgacagagtgagaccctgtctcaaaaaaaaaaaaaaagacagattgtagacatggaaaacagattagtggttgccaggtgttagggacattggggactaggttgggcagggcagtgagtatgaacaggtggcattagggagagcttggtggtgacggaacagttctgtatcttgattgtagttgtgattacacaaatctacacaagtgatcagtgacacagcaccacacacacacacacacacacacacacacacacacacacacacacagagttaatttcccaggtttgatacttatatcatgtaagatgtagtaaacattggaggaagttggatgaaggctatgtgggatctctctgtaactttctcgtaaatctttgcagctttttgtgactctataattattttaaaataaaatttttttttttaaatggaaagtttatagggtatgtagataaattagaaacaacagaaggccaagtaaaaaagtgctgaaggaagcctctacccaggctggaaatgagaatgttgaatgcaatggtagaggaaggactctccccatctgtgggtgggtccagttcctgtaggacccttggggaagccatgacccccattctcccaaacacacaataggaaaataccagagaagttttgtttacctgttagcttttaaacaaaacagaaccctgcatctttgtcttagatacaaaataaccttcatgggtagggggaagggacattaataaaaagagctataatttacattgtttttcttgaatgtttttacttcacgaaatttgagagatgatttaagaacaataatgtacatataatggctccccagcttaccatcctattacacacacatcgcataagttcgtattatttgtcttgtttggaaatcagtccaactttctgacccttgttctatatataactatagatcccaaaggttcagctgctgggctagcattttgtctgctatttcctaaataatggtaggtaagcaggaaaagtgccagtcttacttgtccctgactcttggtggttcgtggcatgttcaggatagtatttgaaacaagagctcattacaaagtaatggaaaccccttgcttttattgtgtatgcagcaaaagcaacatttggatcaatttacaagtttctgcaaaacaccgtcaagaaataatttcggttgtgctttagcaagaaaataatggatctgtgctataccacatgccttttggtatccctcactgggctttgccaaaacactgactgcaggagctagactactgttaggcagagacactgcactccctttgctgtccctgccttctctcctagcgactcctccaggtacacaggccagggtcacagtatcagaaagcagctctgttttcctccagaaccccccaagcttcctttctgcagcactgtctctcccacatggaaccagctggctcaccagtcaacagcctatgacacacaaatgccttgaggatgcagcatgtattttgtctggaagcaagcaacacgctcttcctttgtaggctgtttctccttttgcttgcaatgtgagtggcttatcttgggtgggcttgggggtgagataccatgtgaccacatgaacacttcaaaacagttgctttttctaatgcatgctgtaataacaatgaaaagcatatccttatggtttttttaatgcaagaagacagactcaattatgtgtgtttttgattttttttttcttcttcaacagcatgtactgcatcccttgtgaaggtccttgcccgaaggtctgtgaggaagaaaagaaaacaaagaccattgattctgttacttctgctcagatgctccaaggatgcaccatcttcaagggcaatttgctcattaacatccgacgggggagtaagtattccatccccctggaaaaacggctagatctcatggttttcttttgttgatgcttttcatgctcccgtccctgagtcaccactaaaatatgggcttagataaacaacatggtgtgtaagcctcacgcatgacgtctcttctttgagtttccctgaaagataaagaacagattgaaaggcaatctgtcttttagccattggcacgtcatttattcctgtaaagagggtcatcgctcatctttttgttagtcacatcttgcataggagaggcaagccctgacacatacaaaccccagaagagaccattggatcagacgtgtgactcagcagactccagctgtagccaaatccacacatctttcaagtctaaagagttttggttacttgaatttactgagaagactgagcaaagggaagtttagtgatatcacgttaaaattttatgaagtccaaaagaatgctagatttccaaatttacttgtgagagacaaaaggatacaagtgtgtgtcattgtgtacataaagtttcggtctcacccctgtacaatgacctttatttgcaatagatggcattcctggtaagttgcttctgagttggatttgtgcaaaggatttcccactgacttagcctatgatctcttcacttctttggttttttgtgtgtttgttttttggttttgttttgagacagggtctcactgtatcacccaggctggagtgcaatggcataatcatagctcactgtaacctggaactcctagtctcaaacaatccttctgctcagcctcccacgttgctgggaccacaggcacacactaccatgtctggataattttaaaaatcttttcacttctgatttttcattgccaagggcttctagtaatggtgccttaaattctctgccactgggaccacttggtcaaggtactgatagttttataagctagaataaatatcgtaaaatggctttgaagttgaaaggaattttggggggggaatccttttatgaagaatttttttttttttttacagtttgagaggaaaaataatgtattttgagaatgtgttttccttaatatttgttaaatgagtagactgtattcttaaggtttagaaaggacagaaacaagtttgtgcttagttcttctgaattcgttgatatcccttgttgctgttcacaatacacccactcccagccctccgtgatggagataactctgttccccacaactagggcttgcccactctcatggtacttctgatgtttaattcttttggctgtgtctgcatttcctcatttacttttaatttgcttatccctagaacataccttttgagtgcctaaacttttttatcttcctgtcctgaagacaaaaatttaatctgtgaattaaacccatggagaagtatcatttatgaagggattggtacatattgatgcatgatgatgaaatgtgtcttctggtttatgtccattgcaggaaatagattggatttaggatgatgggacatctcattagaggggaaatttcctgatcttgactaaggcatgcttcctgccccacgtttaaaattcaggatctcttccttaaaacatcaactgcacgcaacctctcatctttccaacttgaacttccctttaatttttcttggaaagctattaaattaaattagatgtagggctttatcctttagtacccttattattttatttgtatcaactcaaagcaaaatagagcattttattaaatatgtcttcataaattacgcacagtaaaatcccattaattggaccacacccagttcattatagtgtttattataattttagcattagttgaactgaaaattggtttttgtttactatgagaaaaaggtagactaaacaagatgaaacctgttgtttgcatattatgtttgtacatctttattagcaactatttttccaactattttcaactatttttccaactattttctagttataaaagcaatacataaatactatagaaaatttagcaatgcagaaatgaatttttaaaaatccctcatagatagccattgttaacattttggtgtattttcttcaagtcttagtaaaatggaacctttaaatatagatccctgtatcttaggaattagaaaggcagcaaaggcagttcctaatgagatggagaaaatgttgatttagtcatgcccttgtactgtgggggccatactgtctgttgacagagcatattaaaagacgttccctacattcgtcagccttagctaattggcagtctggtatttatgattttatattttgttaatcagcttgggagctgcagtaccccccagcctcctagaaacttggcttcccctgcctgggaggcctcgttccaggagtcgttgttgagagtcaagccagggaagtgtgtttttgtcagggagcagccagtcctgtgctgggagcatctcagggggcacctgccgttgaattgttctcacttgtgtttgtaagaatccaagtatgtcacccttacaccaagtgagcacacagtgacacaatcccctttcaatgtagataacattgcttcagagctggagaacttcatggggctcatcgaggtggtgacgggctacgtgaagatccgccattctcatgccttggtctccttgtccttcctaaaaaaccttcgcctcatcctaggagaggagcagctagaagggtaagtgccccaaatttcatgagctgacgttctattacaaaataagcagcgtgcttatgaaactgtgttgctgaggtaagagccctccctgccttgttaaagagaagaaaggaggaagccgcagtattgcctgtgctgctcgagtaggtcttgggtggagtcatggttctccattcttaggaggttgctgtttggaaaacagagatgttatcacccttactggattttgcctcatcagtcaagggttgcgtgtctgactgtgaccagtgagacggcagacgggggtgcgcttagggcttttctgccaagaatgacagcagttggtctggagtgctcacctccctgtgaaatcattgttcgcgcgaccctcatctgcctcaggatgctgtactctactacgcacaactgctccatcttttaagatattggaagtgagagcacgggaggagcatgggcggttcgttttgttagaaagaaacccggattcacgagatggtttttattgattagtttacaggatttgcactattgatagagtttttgccttggcacaggcctgctttgtgataggggttttaaaataaccgtgggcttttcactggaggataaaagccggtgcttattgcatgcacaattgctttccagccgtcagcctgtgtgtacctttgcatatgtacttttctctttaaactctcccttttaaatacgactcttgccaggctttaagtgaatgcttcaaaataaaaggagttatcaattaaagagtgaattccttccaaagagaatttgggaaaataatttaggaaaagaagaggcgagaaggtcatgggaaaggttgtctttgctgatttatctgccccaactggataaagttactgcataagggtttctttacagcctccctgtttttctcagactaactcttggtcagtcttaaattcttaaaattccatcatctgatagagctaacgagagcgggcagctcttcattccatccttgaaaagcacagtgtcctccccactggggaacaccaatccttaaaaaacttctttctcattgcaaatcgaaggaggctgccgctgcacccagccccagactcctcagtcacttacctggcaagctgaggccctaccagtttaaggtgatgattattgtttcttgtattaaattttaaaatgaatttttctccgctttttttttttctaagtaggtttgtgtttctggaatctcgggtgtctgtgagcatttcttcttcagcagagcagtagctgtcaaattttcttgttgcttaatgatatacttttttgtttctagactaagcaaatgatagacatagaggtgaatgctgagaggagagtttaattaatttccattaggaattattatgtggttaccttttcatggagtgttaactaagtattgtgcacttaaatgtagttagaaattaaagcctgatttttatttgcaagaatatttatgatgtctttctcattatctgaaacttgcataaaacctgaagcatcagcaaaatctttttaaggttgcgtgctcaggtgtttgggaggctttccaggtaagcccgggcccctggcctgctcttaccattttagatgcaggggagggcaagtgggccttgggttttccctgctgctgctgctccccagtagtcctgcagctccaaggatgctggctccagcctttcattcctgcgtgcagcttctaagaggctctttcttgagcttgggctcttaagaatcttttacctcccgatgggaagttttctctcaccctgtcttcctggcccatgaccacaaaggtatagcccatcctcacgatgatgagctccccaagagctctgtttgcttcaggtgttgagaccgctagcaacacctcagctgttcatttctccttagactcagggacagagttaggtctggccccttcactagctgccctcacttctgcaagaagggaagagtcagagcgagaaagagaaggacaggatacgatagtcagataaacatcagcagtgcaaagcagaactcgcacagtgatacaagggaaagaaagaaatgtgccctaggcatggagaagagccagatacctgagaagatcagacaggcttctgacaagaggtggcatttgagatgggccttgaaggctttcgggaaaaacttgaggaaagcagaggattgaagtgaagaaaggcaattcaaggtagggtggcaggagcaaaggcaacgagttggggcatcctggggcctgttgggcaactaacactggagaggtgggtggtactagagttatgtaagatgttttgcacgcaggtataaagggttataatttaggaagaccatggaacgtattcaaggcttttgaatagaggagtgttagcagagctgtctgaaatttttatttcggtgtgcttttggtttaagccaagatagctttcatcccagtgtttctcaaactttgctacacattatggaatcattgggggtgggggcaggggtggagttgagaaatcctgatgtccaagttgcacccccaccccaattcaataggagcgtttggggttaggatccaggaatcagtgcttgtctaaagatccctaggctcttcagcaggcagcaaagattggaaaccactgctttatcccttcatttcttcccatgtgcatatcacaaagcactttgacggttttttttcctaaatattttcccctcacactgctgcctaatgttttagaggttcacccatgttgttaacacgtgtcacactattttcttgaacttttttttttttttttttttgagatggaatcttgctgtgtcgcccaggctggagtgtagtggcgctgtctcggctcactgcaccctctgcctcctgggttcaagcgattctcctgcctcagcctcctgaatagctgggattactggcacgcaccaccacgcccggcttatttttgcttttagtagagacggactttcaccgtgttgttcaggctggtctcaaactcctgaccttgtgatccgcccgcctcagcctcccaatgtgctgggattacaggcttgagccaccacgcccggccttcttgaacttcttttatagccagtgataacataaatgtttccatttggttcaataggatgaaagttctgttctgtagccttttgtttttgatggagaacagaacaattcaaggtacagagatccttcaactctgacaaccttggctttccaaaatgtcactgagatccccctcaaaaagtctcctgagccatccagaacagaaaattcaagcattttacatagagtagagctcttattcctcactcagagcctgttgacttttatatcgcactcggcgtgagctgattttgtaacccagttacaaaagccatagccatggtttcctcaaggacaccatagggtgtatttctagagtaatgaccttagacattaagaaaatcaagaccgctctgctgtttacaaaggaaacaggttttgtaatccacatgtacacaatttttataaaatagctaatttttaagctcttgagtaagagaatattttcactatctggaaaatccccttgtttggacaaccttgtttcctgatggcatcagataaataaggagttaaagtttcacattatttggtgctaccaaggattgttgccttgaaaagaagaaggaaaaagtagatggagggtggtgagttaaaagaattgaaattcgcggataggcatttctatgcttttgttcctaccactcgactgtgcaacacgcagtgctttgtaataccttcttggagctcaaaggtcaggctgaaacatggccgctttttcacatttccctgggacttttggaaaatatacaccaaccctgtgacctagcaattccgggatccacccaagagaaatgaaaacatgcccacacaagacttgtgtatgaatgctggtagcagtattactcataatagcctcccgggattcccccgacccccagcccaaaagaaagacccactggaaaccattcagatgttcatcagcagatgagtggatagaaagataaatggataaatgaaatgtggcacaaaggacaactgactactcaacaataaaaagacgtgaagtatgacacgtgttacaacatgggtgaacctctaaaacattaggctaagtgaaaagaaaaaatccagacacaaaagactacatattatatgactcattcgtatgtaatttgcagaaaaggcaaaactatagagacagaaagcagaccagggatggctgcaaggaagaggtggagattgaccaccaatgggaatgagggaactcttggatgatggaagtgttctggaactgagtagtggtgatggttggacagttgtgtaaatttacggaagctcatggaatgatgggtgaattttttttttttttttttttgagatggagtctcactctgtcacccaggctgcagtgcagtggcgctgtctcggatcactgcaagctccgcctccgggttcacaccattcccctgcctcagcctcccgagtagccgggactacaggcgctcaccaccacgcccgactaatttttttgtatttttagtagagacggggtttcaccatgttagccagtatggtctcgatcatctgacctcgtgatctgcctgcctcggcctctgaaagtgctgggattacaggtgtgagccaccgtgcctggcctgatgggtgaatatttgataggcaggttatacttcagaagtaaagctatttttaagaaacacctaaacaaagaggaaacattgtctgaatatctgtatggtgcctggttccacctagatagacatatccacccttgctgaacccctaaggttgatgtaaatattggatttgggggagagtggacatgatataaaccagcctgtttgcagatggattggtgggagcatctgcagaaaggcaaaaaaggccaaatactcttatcagttgcagatggctctgttgctgatgacagcctgtgtcctgggttctgatgccccctagagacagccgtgaagaggcaattttctcctcgaaggaaggaactggaatgattggttgtataattgcagaattgttttcagtatgtcagcaagcactgaaaatggggaaactgtcccttcctacctctgtaggctggagacctcgggttcagctccatttatcagggcacaggaccttcctgttctgagactttgttccaggggactttcacacttcagagaatagcacatgtcatcctgcacttttgtggggtgattaaaagctcacggtatccttttatgtttagcccatccaattcttccaactggcctcagccagaaaagcagggaaggcacccccagtttgcagctgagagactccagcctgggagagctgaataaatcttttgcccagaggggttcctcagtaaatgctggagatgaggctcagacctgacctttggattcccagatggagtgctctgaaccgtgtacctggggctgtcttcaccactcaaatatcgatagagataacatagagatgtcctcaggaagataaccaactgttcccatcctgtgtggtctacagattgggagatagggcctacccaagtgtagaaataaacattttttacaacatagagaaggctgagaaccaggataccaatatcaataaaatctggatatcatagagcacatggaagctaaagaaaaataagtaactggtcaggtgtggtggctcacacctgtaatcccagcactttggaagaccatggcaaggcattgcttgagcccaggagtttgagaccagccagggcaacatagtgagataccagctgttaaaaaaaaaaaagaaaagaaaaattaaccaagcatggtggggcatacctatggtcccagctacttgggaggctgaggtaggagggtagcttgagcctgggaagttgaggctgcagtgctctgtcattgcaccactgcaccccaacctggattacagagtgagaccctgtctcaaggggaaaaaaaaaaaaaaacctaatttttaaaagcattctttgaatgtaaaggcagtaagctaagaaacaattaggaaatcacatttactgaataatttacttaagtaatctttttcttcaggaaacaatgataactttagcgtatgcatattttaaagatgtgcagacaggtctctgccttttaccttctcttaattctcacctaatcatggaaggaatttagcggggagccttgccccaagctgtggctcgaaaaacaagcatggtattgacaggcagctcatgaatggcttgattattattttgacaagggttttatttttatttttctttagcttccacaggctccataatgcctgggttttattgatattggtatcctggctcccagcctcttcaatgattgtaaaaaatgtttgtgtttactgtaaaaagataatcttgcttttcaaagtgattagtcaaatacacagaatttcagtgtgcctgccattcatttgtcaaattcctggtttataattcatgcttcctcccgtgggggagaagaatgttttgttcagaaggtatttttggtgtggttccgttccctgctagtgaaattagtttatgaaaagaggcctggttctgggtgtagatggaagtttggcctgattaattggtccttaccggcagcccagaggtttcttcatcaacaaggagattttgtcctgtaactaactcaggtacctggaagcagcccgacatttgggggtgcatcgctgcagtctcctttggagctggagaaacctatgagcaagaatgggcttatgacacatccatttccactccatccctccttccgttgtatgactgcatggagcccctctgacctccagcagtgtcacctgcagcctggtagtgagaaacagcaggtatggatggggtctacccccagcaacagtagcgccagctgggccatatcctggcactgctccccaggaaacacaccttgtgttgcattgaccagatctgggatcatttggacaatgtcttatgctgcttttccaggatagctgtgtgttcaggagggagcccttactgaaaggaaagaactgttgacttacaagtttttgctaccggtttggtggtcactaatgtgtccagaggcctgaagatgggcgtgtgaggagcctgacttagcttcagaggctctgtctttcgactcacttgtgtgctcactgcacccctgtgctggcaggactccaacctccacccccagcacttgtgtggacagagagcccagtgctcaggaaagggttgggcttcaggcttgtgatgcagattccgtggtggctctgtgactccttctggtcgttcttaaagtagacagggagcttagatgtcacctgtgcattccccttgttgtcctacgagtgagtaaacagggctacagatagcactaagggatctgcgcatggctgtgcagctcattcatggcatttctggtcctgggtcccagtctctgaactccttcctggtctgacgtccctttgtgaatgttcaggaaaatgtcacagggctgcttggcagcattgtaaccataatttgtgctttactgtaaatgagaatcaggctgaggattgaccagctggttagaggtcctggtttgggtgtaaatgaagaccctcaccagatgcagagagatccccaatggacatagcctccagggcagacgaagccttaggggttctgttttgtcctggctacgctggctctgcagggagggctggggttctttctcctttgtgtgtttatacattagatctgtgagtggatcttagaagtcactcaaagtactgcactgattcccaaacttagtaagaagcagagcaggaagaggagaagaaggattcacggtccatggggatcaggcccatcagcacagaggactcagaagtcaaccctggcattgtctgctgccttcctggggaagccagagagaaaggcccactgcggggatctttctctagacctaagccgtagctgtctgctttcttgcctctccagggatggacttgtcctgccacctgggtagccagatagaacggcttcctgtgctggttggatctgctactcgtgtgcacaccctctggggcagaagccacgtctggtttggtgggctttggtcctccaccacctcactggaactcagcctctcctagattgctggttctccacgtgtggtccagggaccacagcaggggtcagcaccacctgggatttgtgataaatgcagattctttgcccaccccagctgaatcagaagctctgggggtggggcccagccctttgcaaacaagctttgtgcacactgaacttggagaaccactgtgttggactccgagtcctcttgcctggatgagaggcccaagagcactgcatgttagtggctcttcctcctcccccacacctccagggactggagctggggctgctcagaatgaaagatgaatgggggagggagaaggcccagggttgaccccccacaagcttgtctccctgtctcatgctgtctcctatcccatcatgctgctgattgggcaggatttacttccatggataatgggagactttagagcaaagtgtacgctgttccgattgggtagcagagcatgtctgttctctcatggactgctttcaagcacgttgtacatacttggctgagaaaaataaccaaaggcatttcttgggaatgattctagtaacatcctctggtacaagaagcattatttgatggtaatagtggtcatagaattaattagcatcttaccgattttgatatgttatccttgaatcatgttgctgccattgttaacagcaactgtctgttctcctatagtgttaataactaaatctcttattggcaaaggaaatgtattgtggagcaggtggcaaagaggacctgtgttacgtggccagcaggctagaggggactgtggccaagggcaggtgcgctaacatcgatttctgtgcttctaggaattactccttctacgtcctcgacaaccagaacttgcagcaactgtgggactgggaccaccgcaacctgaccatcaaagcagggaaaatgtactttgctttcaatcccaaattatgtgtttccgaaatttaccgcatggaggaagtgacggggactaaagggcgccaaagcaaaggggacataaacaccaggaacaacggggagagagcctcctgtgagtgacagcatccaaaacaccgtgggcccaaccatcatgataacagcagaccctcctcccatgtgtgatggcagctttcctctgcggcccctcctggtttcacatgggggaccactagaccatcttaactagcactttgctcctacttatatgtcatcacaatcagtagtgggcagatacgtgatgtattcgtatttataaattctgtacatctctgtgagtgtgtgaaacacttataagtaggttctcaaactttaaagtgctgcttacagaatgcacagttaaatgtccttttatacacaggtgcacagttagatatttctctttcttttttcttttcttttttttctttttttttcttttttcttttttttttttttttttgagatggagtctcactctgtcacccaggctggggtgcagtggcatgatcttggctcactgtaacctccacctcggttcaagcggttctcatgcctcagcctcccgagcagctgagattacagacacctgccaccatgcccagctaatttttggatttttagtagagacgggatttcatcatgttggccaggctggcctcaaactcctgacctcaaatgatccacgtgcctcagcctcccaaagtgctgggattacaggcttgagccaccatgccctgtccgattatttttcagggaagagccagtgtgctccagccctatgagctctacccttctgctcccacagaagggaagcacaggcctgtggggtggagggggctctgccctaagcgcagcccctgtgggccacgggtttcctgtcccttacactcggctgccttgtttctcccaccccaacatgaaaaagatggagtgagcctgcagccctgagttgatattgctttttaaattgagaacaatataattacagccttgtactggttataaaactttaaggtctcatatcagagatacagcagtgcctttctcatctaaccctgtgtagaatacggctgttgagaatggcgtggctctctggctggatagggttataaaagtaaatcgtcttttcacctttggcttttaataagggaagggtattagaaaaaaagtaatttgtatgatgaagggtgatttgtgcgtgtgtgcagacagacacacatgcagggaggcaaatcagaaccgatgcgtgtttggctttggcttgtttcgctggtgtctggatttacctggcgacacttgttgctctgggggatcttagagggaagcacgctgactgacctagggctgaacagcaggctgacgaccagcgccgcctcccgccccctgctcactctatccctgcaaagcccctgccttgctccctgttcagatcatagtaaaatcggatgtatccgagtatttcagagtgcttgtctccttagagtcagccagtctgacctgtcagatcataatacgtagtagccgtttattttcttttgaaagcaaaatcatggtttcctctctaaataacacttcagcaggaactgtgacatttcccaatctcagttgcgcacattttgtcctaaagacttcttagctcttttactgtcttcagtccctctgcttcacctcttgagtgtgtagtgggattcaggcagataagagggcgaaaggacaattcgtcagagagctctgggtctccatgagggtgggcagtcatcagtctttccctggtccttatcgtagtttgaatttggtccaaggaataagagagacacttggcacagcttccctgccatacccgccagccaggctacttcccatagagcacgttaggcttggccaagtgagatcttcttgtcagtgcttaatccagcctcccgttgtttgtcagccctagctggaggcctcacaggagttcctgtgtccttccagtttgatacgaagtttagaccaagaaaagttcctttctgtggcacacctgtagtctcttacctgtctttggtggttgtacacgaacaggcagatatccacaactgcagaacaagtgtcatcgtctctcttaagaagtttcagggcagcctaaaggctcaccttcaccctaccaggccccctttcatagccaggatcttagggatggagaagaaagataagttcgcctcgttcactgaagtcgccccttgttttcaggttaggaaacccaggttcatgtccaagtccctgggcaagtagccagcgtaactgattgacctaaaacaaaggatggagcccttggggctctgcatagtgaaatgtatgatttcttagtggaaaacgagaaagccactgaggaagcccagaagggaacttagcatatacagccagctttggggaagggggaagcagtgccaagcaagacaggtgcttttcagagacacatgaatctctgtcactcacggatgtactctttgccccaggtgaaagtgacgtcctgcatttcacctccaccaccacgtcgaagaatcgcatcatcataacctggcaccggtaccggccccctgactacagggatctcatcagcttcaccgtttactacaaggaagcgtgagtttctgctttgggtgatgccattctgttgacagggctacgaatgggagaggccagtctttcgatccttgaatgggctggctgaatacagggggtcagcagagtccccagggagagccacgccaaacatccctacttcatcctcatgcaccctctcgggctgtccctgtgatgtcagtcacagccagtgacagccatgattgggaaagtgttagctcgaggcctgtcattctttagtgagtgattagagatgtttgaataaaataaacccaaaatggggaaagcttgctttttccagaattaggtcagtccagactcatgaacgatgatgggggacttcactgaaatatcgtttcagcctccttacctactaggcctactccaggaacaccctgcaggcacgtggctcttttgtatcatcttattcctgtctctctctctgtgtgcctctcccaagctgtggccctctgctctaggtcatgagccttccaaacaagcgaagaaaagtggagagagaacaaccttcatgtcttgagccttttgtgacttctcctagactctgttgggagcttttcctgtgtgatcacatgacattcacccatctaagcagccgaggcttattcctcccgactgcagccctctttgatctccctcttccttcctttgccttctatatccaggtggctaccccggtctacttagccatcccccttacccaggtcccatgttaatcccatagttctctctcccagatgtgtggcttccaaagagcagcaaccagaggcaccttatgacagcatcttgtactctttcctcctgccagagctggggtcctatgaatgagaaattgggtacttaggattactaggctttcagagtttgtacacaggggagcccctcatgatctcccatcccatgacagcagacggtgttttgttcatgtttgtttcagaagccagcggccagcagctgtccagcccttttagctgataaatataaaatacctacccaaccatgcatctgtgcgaagtactatattctctgatagtcacaccagtgctttggcaatgtcagctggtaatttcactgaggacttgatgctggtttctaaggcaatctggaaactaaatatttgaatattataagatgcttaagcatcagaattgtttatgagcaatctgaattttagaagctacttctgtttgtctgtaggaaagtcatttttctccaacagttaccttctttcaatatctgatatttgcattaactgactatgcttgtttttttcttgatgaaaaaatgctgcaatcagaagagagaaaaatagtttttgcatatgttcttaaggaatagtaactattgaatcccagtaactgttgaagtggctcttcctgaggcagaccattcaattctgtaatgcccgactggggaagcccagagtccagtcacttcatttcttcttctataaaagtctaattgattatttgtttatttagacctcccattatagaaagtgtgacatgctgggcctctggggaagatttttgagggttttgatgtcagagccccgaactttctctgaacttaattgtctttcagaccctttaagaatgtcacagagtatgatgggcaggatgcctgcggctccaacagctggaacatggtggacgtggacctcccgcccaacaaggacgtggagcccggcatcttactacatgggctgaagccctggactcagtacgccgtttacgtcaaggctgtgaccctcaccatggtggagaacgaccatatccgtggggccaagagtgagatcttgtacattcgcaccaatgcttcaggtatccatgcctagacaagcccccagcatccacacttcttcacaagctcactggccttgcttgtaccaggtgtcattgtagggttagcagtgagctatgcctgttgtctttcttgtcaataggtaatactgtgtcatattcatttccccactgctaacacattaggctcttctgtgccattttctggcctcggtactatcttccatcatctcctgctttgtgcctgtgagcccaggtcctccagggtgctgggctggtttcattggaaggcccagcctggaaacagccgtcttcagctgcccttgtttcttgtttgttttgatgttcaatcctccaggaactgaaaccatgctgatctgtgttccacttaattcatgtagctcactggttttccatcttcattctggagcttatagagttccaaagaggtcaacaaaagttgaaagcctgcagatgtagtatgttgtggatattcagagtattcactgatgatgaggttcctccttcctttatctttaggttctaaaccatctcatttctcaactccagatctggaaacagtaaaagcaaacgttaatagtttccagtatataaaaactagtttagaagtaggaaaatccacttcagttttaaagacactgattgttttagtgtattggagcttctatcacaaaaaaacagtgtagcctgggtggcttataagcaatagaaatgtatttctcacagttccagaagccacaaagtgcaagatcaaggcgctggcagatttggtgtctggtgagggcccactccctggctcatagatggctgtcttttcattgtgtccttgcatggtggcagggatgcgggagcactctccggggcctctcatagaagggcctggattccattcatgagggcttcactcccatgacccaatcacctcccaaaggccatgcctcctaattccatccccttaggggttaggattttgacatgtgagttttggtaggggacacagacattcactctatagcactgataaacattctttgataatagccattattttagtgggtaaggtgtttttaaatacccataagcgagcacaaaatcagtttaaatggcagagaggagggtgagaagaaaatgctggtggggaaaaccttttgctgtgcacgcctgctccttcctccactcctaccccatctccatgaccctgtaagtggccacagtcatgtcactgggtaaagtgcttattgaaacaaaattggcacaggcttctgatcctgcgtgtgggttggtgtagcagaggttcagtgcaacagaagaagtttttcatcttaaaatttggaagtaacccctggccagcaattcactgtagtgtttgggaaacataggaatatctgcttattgtgacagattctcaagaaacctgtttcctttccgcaaagatggaaaccaggcactgtaccaatgagtcagttcactacgttttgtcctctgtccttacacgcagcggagacagacgagaacttggtcctctgcctctgctgtttggtgacacctatcgtaagaatgtatctaggaatgagctgtttgtttttgaagtacttatttttggaaaccctaaagtggctgagcatcaagtggttgtgttttctctgaaaacgccagtattagtcataacctttttccaaagtatcatcccttaaagatgttcagaaccttgtgtgtatcgtataacctggagcaccctcaagctgtccgcccttttcaagttttaaaaatggcttaggcaaacatattgcttaagtgatatccagtgaaggtgtctcctgtgctttgaaaaaccatcaacattgatgcttttttgtgacccaataaggacaagatttcagtggttctgggatgcatttgatctttatgcacacttcagctctgggtttcagttcaggggtcagcataagtaaagcttgatcagataactatgctttgcctataatcggcattcattctgctggtgacagagtcctttgctcaaaatgaggcttccatgcgtttgcagttctaaactgcttttcagagtcatgcctcagtcattgtactgaaggatgcctgtggaaatggtggacttccgtgttctttgcattgcctctcccccatccctcttacacacagctgtgacatgggcatgcacactccttcacacacacagactctccagccccctttccacttcctctttccatttggcttcatgacatttttatcagagattcaaaatctcagatgaaatccaagtcagcctgttttaccagttgtcgaaattgccggagtgcagcactgtggagaatggcagttgtaataaatgagaaataccaggtgtttgaattagctgtagattttcacattgtctcttctaaccctgcttgtgcccccgcagcctttttccatttacaactcagtaatgtttgttttcacagagattaccggaggaaatagattataaagggaaatgttggcatttatagtagtactatttcaaaataaggttcacttttcactttgtatttcattgttcattgttattttcttatccaggtcaaactggcagtttcctgttggcttgccagagtatctgatagcctgactcttaagttcatttcattttctagaatgttctttgttcccctctccagttccttccattcccttggacgttctttcagcatcgaactcctcttctcagttaatcgtgaagtggaaccctccctctctgcccaacggcaacctgagttactacattgtgcgctggcagcggcagcctcaggacggctacctttaccggcacaattactgctccaaaggtaagggtgcagcagcggcctggacggagggtgtgaccgttcattcctgtggttgtaatgtgcctgagccctaatattacacgtatcagacaacagtgtagttctccattggaaaccagctatcttctggttttttttttttttttttgagacagagtctcactctgttgcccaggctggagtgcagtggcacgatcatggctcactgcaatttctgcctcccaggttcaagcatttctcattccccagcattccgagtagctgggattacaggcatgcaccaccatgcccagctaatttttgtatttttagtagagacggggtttcaccatgttgcccaggctggtctgaaactcctaacctcaggtgatttgcccgcctcggcctcccaaagtgctgggattatagccttgagccaccacatctggccgagaccagctatcttcttgattaaaggtactgagagctattatttttccttacaagcatgtataacggctttcattcccactcttgttttggcttttcttttccgagaagacaaaatccccatcaggaagtatgccgacggcaccatcgacattgaggaggtcacagagaaccccaagactgaggtgtgtggtggggagaaagggccttgctgcgcctgccccaaaactgaagccgagaagcaggccgagaaggaggaggctgaataccgcaaagtctttgagaatttcctgcacaactccatcttcgtgcccaggtacccagctcatgtgaaatttcagttggcaaaacccactgctcaggccggttctgttgcctttctccccaccaggtagtgtgtaagtcagcagctggggggtacaatacagtagccactgagacggagccgaaaaagatgacaggttcggtgaagtgagtccctgcggaagccagtcagccctgaagggaacagggaccagggcttgggttgctggggccaccggtgtgacaggtactgctgtctcagccacaaccccccacagagagcaggtgggcaccctgtggtagaggcagggaggggaaactcaaagagtattgacagctgctgcctggtgagaggaaaggccaggatttgggtccatctctgcccttcctaattatctttactgcctctctcagcctcacagaggaggagtgaagcaagagggaaaaaagtcagagtctgtgctggaaagggcctgacttcaaaacatagccaggtgccacaggcatcctgtacaagtaagtttgggaagcagtgtagggcgacagcctgcattggctgtttattccgtggttactctgtctttcaaagcaacacagcccctgccccagggactctgctcctctgctgtggtcttggtttctggggagtggggacaaaagcagaggaaagtaaacgttcatagcaggactgttcatagtagccaaatctggaaacccagtgtacatcaacaggtgagtggctcaataaaatgggctcgaaccttacagtagaatattattcagccataaaaagggaggaaattttgatccatgtcacaacacagatgaaccttgaagacaccatgccaagtgaaacaaggccagacacaaaaggacagatagtgtatgattttatgttgtgtgaaatatatggaatgggcaaatgtatggtgacagaaagtagatttgaatttaccaggggatggggatagagtgtggaggggaatgggaattattccataatcgataggttttctatttggagtgatgaaaatttttggaaatagataatgatgatagctgtaccattctgtgaatgcaattaatgccactgaattgtacccttaaaatgattaaaatggcaactttttatcttacatatattttgttttgttttaaaattttattttaacacaataaaaaatgttaaacaatttttttttcctttcaaaaaaggattagcccagtagtgtgtgggaaaggagatggaagcacagtggtgctccctggccccctcttcctgtaagattatagtgcagattttggaaacgacctcatgcctgaaaactaggccaaggagttggatttaaatcagcatggcacccatgagctgcccatccgcagtccccacagcacccgctgccagcaccccacccagcacgttcccttcccctcactgcccccgaccctgagaggagcctgtagcggctatttattccacagtgactctgctcttacaggctttcttaggctgtaacaacaaatggtttttaaagtgattttttttttctgccaagtgacctttttgatatttgcaaaatggttgaaatagctatctcacttcgagaaatcagtaaagtgggaaataaagactggttagaactggaggcattatttccttttgagagtgcgcctcttcattgcttggtggcttttttctcctcccctcctctctcgaagttcaaaccaccagagcagccaggcgcggtggctcacgcctgtaatcccagcactttgggaggctgaggtgggtggatcacaagatcaggcgttcgagaccagccgggcatcatggtgaaaccctgtctctactaaagatacaaaaaattagccaagcgtggtggtgcacacctgtaatcccagctacttgggaagctgaggcaggataatcgcttgaacccgggaggtggaggttgcagtgagctgagatcgcaccgttgcactccagcctggacaacagaacgagactccatctcaagaaaaaaaaaacaccagagctgtgagaagggcctgcgaggccctcatggcctctcctagcctgccccgctgggggagtcttctgcctgctggtgtgtggcagggctttgaatgtgaaccttgaggttcagtgcccaaggccattttcttatccaggatatctttgtatcactggtggttcctagaaagcagaaagtttgaggactagaaagattgcaaagaggtttggaaactggaactcaatgaggtttggtgacttctctgacatcctaattaattaagaatccgtttgggacctggtcctcattcccacacaccgactcttttccccctcttctcctccattgcgttgcttctcgtggtcctttccacctagaccagcagaggcttagctcgtggcagctcctgctgcccgccacacggaaggatggatttagagtgtcccaaagcaggctgggcgggaagtttgtttttctctatcatgggcccttggttacgttgctgtcttgttccaccaaccagcaggaggttcgggttgtgagtcaaggttttggaaagattttgctgaaaggccccttgctttcagttgtagttacgaggcaagacctgtttttttctcatcagatgtggagcacaaggtgaagtgacgtgaaggcagagctgtgattgacatgttattaatgcacagcattggtggtgttgggttcaaaacaagtttcctgtgttctactggagaagtgtgtttatctgtcccccgagtccttcctttctctctcctaagacaagtccaacttgtgattctctgttttcatggatgtatatgaagacaatattttgtccgtggtgagaggccataatttttaagaagttaatatttgtttttttgcctcctactgagttctggcagagtccaggtgaaggagtgtccagcagagagaatgactgaatcacagaggctggctttctgttttacacgtggattgtccgaaaatggatttgatttctttcagttcattctgagaacaatgtatttgtgggataaaaccagttaagtaagatttagttccttataaattgtccagaatatcctgtatgttttgaagtacagtggaagctagagtttgtaaaacttactagtttctgaagtcaatattcgcagtaaatgcctttctttgactactgtctttattttgtaaatcacatagtttggtttaactagctaaaatgttgacagatgttggaaagtaaaaggttttccaatagggctaggttgtattatgggatggagtggggaaagttggcagtaatgtttgcttttgggcgtacgatttggaaatgtagttgtttaccaaaaaaaatgatgtatgggccattgtgcttcccctgttcctgccttccagataatgttctgtgtcacctccctccccttgtcactgccttgatgtcatcagcattgagagctgtgcagtccctaaaagtgtgatgttgataaacaagtaaactactgagtatacttcatgaagtaatcccagttaaatgggggtgggctgagccgggagaggggttttgacagaattattttgcggtacatcaaacctaagcaacttctgacagacacaagtgtatgttgtgttggttttgaaggtaggcaggaaatttgttgatgatgtgttgacaaagatttccctgacagtaaatgtggtttcttgtgtttttcccttccgggaagcttggttagctagttggttggtttgcagagtgtgaggattgtggatgatcagcctcatgtccttacccttcctcccccagtattgtgaaagcaaatgtacacgccctgaccttgtggttttctgcttgttggaacgagcatatctgtgttgggcagttcatgccttcggtaggacccccgtgtgccactacacaaagaaggaccgtgttttcctcaggggaatccatgggctgagaagactggggagcctcagaggccctttcccaaagccctctgctctccccttccaggttctgacctaaggaccagccagaagcctgccgagcgtcagccgaacctgcaagtggcttctgggctgttccgttccctgcgtgagctttccctctctgctgctgctgccgcgctctcccctccatggcactgatgagcttcccacattctggactttctcatttccctgggcagatagaattcatcccatttgccccctgccttttgcctattcctaagaccggtgaccccagccgaaggcctcagccctgttttctcaccattcgtccatggctgacctgagggttgccctttctccatctgggtgctcctctcgtattctgtttgtttttgttggttcctgtaaacattagaattctgttttaaggtttctagggggagccacaaagcccatttcttcatatttgaccaaagcagcaattagagggtcgcaccctcatgcctcatctgccctttttggtgagaatgtcctttttgtgatgactttatgcactcccttttgcttttcggttgttccaagccccattcaaatccatgacaaggactctgctctctgatgggcaggaccttgatgaggccacaggtgctcactgctgagtgggaggaagcctgggtgggctccagggacctgcagagtgtagcaagcacagacgcttggggttgggggtgggctcgcagcaggagcccccaagaagagagagccctggggtccgtggaactgcttgctgctagactccaggcatctttatttccacagtcagagcaaatccaaggagccaccaccacaggctttcatatccctctgccccaggtctctggggcctctgccacacacctcacctctcccctcctgccctaataaatcttaaccacagctgataggtttgccacctttaaggcttaaccataaggtctgtgaccagatggcctgagtgttctgatgacacagccaggactgcctggccaagagtggcagagacactatttgcctctaggtaaaatcgaagaaccactctgagagccggggggtgggggtgagagtttgtgtgcccattctgacacttgcagagtagagaaagcaagataatgaggaaggacatccctgtgttattcatgagttcttacctaagggggctcaatagctccttctattccatggttaagattcttctgttactcttactcaagtcatagaaaagacaaaagaggtaaaagtacttaaaagccacatttctctcctccttgcagacctgaaaggaagcggagagatgtcatgcaagtggccaacaccaccatgtccagccgaagcaggaacaccacggccgcagacacctacaacatcaccgacccggaagagctggagacagagtaccctttctttgagagcagagtggataacaaggagagaactgtcatttctaaccttcggcctttcacattgtaccgcatcgatatccacagctgcaaccacgaggctgagaagctgggctgcagcgcctccaacttcgtctttgcaaggactatgcccgcaggtatggtatgatccagctggccccattgccaccttcctcacaacctagtggagaagatgtgttttatggacacagggtctgacacccagggccatgacccttagacccaggcctgcctgctaaataacgtgcagtcattggcaggtggcgtgtagaccagctgcccagggaacagagcccacgctctcctagtgacaccactcccagcttggtctctccatagaacgtgctgggagcagggagctgtctgcagggtccaccctccacctgctacttggtgcacatcgtgcattcctgctgtcctttgccccctcttgcgcacaaatcgggttgccccctcctgagctctcacatgtccagagatgtctccagttagttgccttgatccagagtaaacattgcccctcaagatcaactcctggagtagcctctggtcttgcttatttagtctttggctttcccttgttgttagacactgcctgtcactcgggcattcatccatctttgaaggtgggtgccttcaaagacagaacaagagctgccctgtcctttagtaggcctcaggtggtagaaagagcacggaggtgaccagagtctggggtgtggggtcctcctgggtgcagttctggcactgaagtccattgtagcgtgccttgaggcagtcgtcaggctccctgcctcagtttccttagccctcctgggagagacatagccagctaacccctcaagtgccttttccggctgtaactttccatgacctttgcttatcacaactttgtttactgcttcaagaagcaaaagcaagaaaggaaccactgcaaggtcagccagccgctggaggagttggtgccggcagggagggcttgccctgctcttagcaccagcctcctagcagcttcctcacaggccgggctcggggccatccttcgtgcctgcataaaaattgcagttgccgcgtgtagacgcgggccacggagggtccctgtcacagccggcaggccccgtgtcctgcttctgcttactcagcatctttccagggctgcttgtgtttgatggcttcacaaagctttcttttttcaagtggtaggcacagggtagaagaaagttacttaggttgccaagattttcctgctgtgcttggcagcaggctttttttgttgagggactggggagaaaggaggatcttgtggcatcttgagacgtgcaagttttgtggttggtgtattctgaaccctccgctgtgtgagcagcccgctcaggggcagtgtacgtggctgatctccactgtcctgcccgcgtggatgggggggttattctcagtgtacgtggctgatctccactgtcctgcccgtgtggatgggggggttattctcaggtcagcccagtgttggcctccctccctgggaacccaaatccaactttgtcacctgtttaaattgtacagaaggagcagatgacattcctgggccagtgacctgggagccaaggcctgaaaactccatctttttaaagtggccggaacctgagaatcccaatggattgattctaatgtatgaaataaaatacggatcacaagttgaggtaggactggggcagtggcccgtgcctgcatgtacttccatccattgacagcatatgctacctgactgcacaggttacctcctggttagcataggacttaaaacaataaaatccatgccaagttggtgaggatttgggtctttctacccactctgtactctccaaggagtactgcatagtgtgcaaagagctaggctgctttttgccctcaagaaacgatttcattgtgtaagataaccttgtggcataggccaggtcagttctaataacttttaatccttctggagttcttggttacaaaaatgtttggttaaagcttttgggtgtgcttaaagctacttgaagacgaccttttaagatttgatttctttgtctttactgacactcaggatcattgttaggtgggaggtcagatcaggcagctggagtccccagtgtggtgagtttagttggcaggccccagatttctcctgcattcatgggaaattgacatgtatgttttatttccccaggatcagcgagaatgtgtgtccagacaggaatacaggaagtatggaggggccaagctaaaccggctaaacccggggaactacacagcccggattcaggccacatctctctctgggaatgggtcgtggacagatcctgtgttcttctatgtccaggccaaaagtaaggcttgtggagggagaagaaacgtggtaaaactgaaagcagggtggtccaggatcaggacagcccgagtgttcatggctgtcttattttctgttaaaatggagttggccagcttccagaagggtcatgctaaggtgccggcacataccggcactgtgtgtgaaaggttgggcagggcagatgccgagctttgggctcctacctcatgtggcaggaagggagaggatccgagcctctcctttgaggttgtgtaaccactggagagccagaggagacagttgctttcaacctggcttacattcaaagacttttttttttttttaaacaaaagacattttataaagcattgaattgaccattccacctcctacttggtcagtaaagctagatagggctcggattcagggcttgaaatcctaaggggtgtaaggaactccagaggtcatctggttcagcctgctacagggcaggaatctccacggtagcatcgcagaccctccactgtccttttaaagtccccacatgcattggaaatgtacggtgctcaccctttggtacagagactgaggaatgtgagtttatgctcaagtcattaacaagacagaattcttaggctgttctgtgtgatgacttcagattttaaaacaaattataagatgtataagcgcaacaagggccacatacttgttgtttgaccaacaaaacttagtattttggtgaaattagttctgtgttgagtttctgttatttcttatttcaaacccagtttttaagattatttcatgttcatggaatgggatcaaatttggcataacacataaaatagcaatgcagcctcacttagtggtaacacttttgggtctagtgggctgatctttcctggtgtccacatttctgctactcacatctggagttacgttaaaacatgcactccgccgggtgcagtggctcacgcctgtgatcccaacactttgggaggccaaggtgggtggatctcttgaggtcaggagtttgagactagcctggccaacatgggtgaaaccccgtctctactaaaaatacaaaaattagttgggggtggtggtacacgcctgtaatcccagctacttgggaggttgaggcaagagaatctcttgaacctgggaggcagaggttgcagtgagccaagatatgtcactgcactccagcctgggtgacagagcagaactccatctcaagaaaaaaggaaaaaaaacaaaaaacagcgcactcaataggtccagcaatctcacttctagtatatttccaaaggcaatgaaataggtatgtcaaacagctctctgcactcccatgttcactgcagcactattcacagtggccaagacatggaatccacctgatgtccatcactatgtatatgaatggataaagaaaacctggtacatatacattatagaatactattctaccataaattagaaaagaaaaatgtcgtttgtggcaacctggatgaacctggaggacatgatgttaagttaaataagccagacacagaaagagaaataccacatgatctttctgataatgcggaatctaagaagttaagctcatggagagtagaatggaggttaccaggggctgagggtgagggagcagatttggggagatgttagtcaaaggatacaaaatttcagttagataggaggaataagttcaatagatatattgtacatgatgacagtaataatgatgtattcttaaaaattgctgagacaatagattttaagtgttctcaccacacacaaaaaaatgtgatgtaatacatatgttaattaggctcattcagctgttctacaatgtatgcatatttcaaaacaatatgttgtacatgataaatatacaatttttatttgtatattaaaattaattaattttaaaaaagatctccagtagtcacctggtcagcaccagatattctaatctgtttgtgatatctgaaaatcctaatacagacagcaaaagcaggatggggtgaatagaactgcaaatcttgagccaacattttatgtgcctggcactgttcctgggttcaggtttttaggggtaaatggatgtttaggcagataattttgtcaattaaaatagtctgaattgttccatctagtccagttaacctagtctcaccagttagtctatgccacctttgcagcacccagaagcttcataatattcctgcagccttgtccagggtagtggcttgcttgctttctatctttccccagcctccttccctcctctttttcctcccctccatctcctagaaacagatcctagtttgggggtctgtgatctgtgaaacagcaaccttggcttctggggttgagtgaactcagcttgttttggtgacatgacatgttcctgtctgcctttgctgctccatttttaaccttgtaagtgccaggatgccagtgggaaatcgggagtccttctgatagaatttttccagcagatgttatcacgtactgcagggaaattggatctgcgtgctggccttactgttgagaaatttttccttatgtcagacaagactctgtcctgctacagtttagtctcatttcctcttatttaatcctcagaggagatggaaggtttggaagctttcaggcaactgccttccttttaggaactccttgtgtgcctgaatactattaaattactcctcagacttctcttttccagatgaaataatctcaggtcttttggccttttcttgtagcccaatatcatacaccagtttcctagccatttaatcatttttgttattctctggatgtgttccattttctccatgtccctgttgaaatgtgaaactcaaaaagaacacagtacagcctgaccagtagtataagtgatataaacagtgatataagggccttgggggaagaaagaaaaatctgccagctttccgttggtaatgatcacctctgagtgtttttaggaattgcaaaatgctggagcctgcatccattttgagagctacaatatcaataaaaatacttctttcttcgattaaaatacttctaattttaaaaattaaaatagctgtagtagtctttaaagagtaaccatgatcacagttttccatggcaaaataatcattgataggggacttacgattaatgtttacttgatccccagtgattccaggcccatttccacatagacatctgtatttggacgtcccagagaggtctcagattccttgtgccaaaaccaaaatcacagttgttgccctcgaaaggcctcttctctcctttgctccttagctcagtcagtggtcttgtaatccatttgttacccaagccaggaacctcacagcatccttcactcttctttctgttcagccacccctttttcattccaacccaagcctcatggattctgcctcttaaatgtctctggaatccagccctctgtcaccaccagcaccgccacagctcagactccaggtcactcgccttggggggatggtatgagctgtcatactgtatgagcctcatcctggggccatgacttaccaagccagatcatctctgtgagtctgcctggtgtaaagacaaggatcagtgacttctttgtaggtctgaactgggtaatgcagagcatgccctggagacatggcatgtccccccaattctccaagacatgacagtgccttctcttactgccaggtccctccgtctgtcctcagcacagccatttccctggaacgcgaatctgatcagttcactgctgggcctgaaagctttcgctgactccttttaatctgcagaatgagggtgaaactgcttagcttgggctgggtcccttgtgagctggccctgacttctctccagtatcatcattttctaggaaagccatttccccacaacccccaaggaaagcatatcataaacaagttttcccttggggaggttccctcgactcccttctctcctctcccttcctctctgaattgttgccatatgtgaagtccacttttctagttgtcatgctacctgttgacactaatttcccatgtcccacagaatgttccagggtatgggtccatgtgcctggtgcccagcctagcatctgccatacaagtgctggttctgatgatcagtggcttctgtggtcttagacttgtagcaggactcaaatgtctgcagcggcattggaaaggggtgccgtccagtgtgtgcatgtgtgtgtgtgtttattttaaattgtctatggaactatctcaaagattgaggccagcaggacttgacctatacatagatgtagactgtacatagatgtaagaatttctattcattttatgaaaatgaatagaaattttcattctatttattagaaatagaatgcttgctgctgcaagcatttgagtccttttacaggtgtgagatcacaaagaccgcttaccaacagaaccaacacttgtatggcagatgctaggctgggtaccggggacatggaccaaaccctggaacattctgtggaatgtgggaaattagtgtcaaatgtatgcattttcactaacagtcattaaactgcgtacaaagattatttttcttcagtctatcattgaaactattgcaccagaatatactgtactttaaaaaatgagtatatgcctcagtctgcacatatttactcttttttcaaataattgtttgtttgccgtgttctatttctgacaccatttaccttcaggaattcttactgtatgatggggagtaaacgaatatacaggtatttttttcatacttccaactgaatgtgaagaaatgaaatgagcaaattgttcacctggtgatattttatcatttcctcctctttgctgcagcaggatatgaaaacttcatccatctgatcatcgctctgcccgtcgctgtcctgttgatcgtgggagggttggtgattatgctgtacgtcttccatagaaagaggtcagtgatgtgcaaagttatgacactttctgtggctgagtggtttgatgatttgaatgtgagtgaaggtgatatttttgaagatttcaaggaaatattttatggactggaaaacctgattttcccatcaaatgttcttccaggaaaagagaaccttttctaatgattttaacaacagccaaaataatttttcgatggtacagaccttcccctggctggcttttctggtatacagatactgctgctggtgcatacttttccaaacgcgatgcgctagccttcccaatcaaataagcctttttatttccaatgaagtaaagaaacagatgtttcttaaaaagcgctaatctcaggctactgaggaagccagaagatgtgttagcaaatgtctgctggctcacccaggcctgaattgggagtgtagacaagagctgctgtagacagtaagctctccccattctgttctgataccgtgtgagagaggataaatgaaactgttgtagcgaagatgaaagtatatacaggaatgtatggaggtggggttttgttaacgtgaatttaatctttttgacagaaataacagcaggctggggaatggagtgctgtatgcctctgtgaacccggagtacttcagcgctgctgatggtaagagtccgggccaccagcactgccagcgtgcagggcaggtagatcgggagctttcaggagggttgctaatttgggaaaggaaggaggtttgcattattttgagctacctttggccttggatctgtcttcattaatatttctttctttctttttttttttaatcaaagtttttagcagttcagtgaatatgtcaaaacttgtgggactgtatggggtgccccaaggaaacacaggctttagagatgaatgtggccagcgcagtaatcaatttatttaattgcttgagatgttatgctagaatgaaaacagctttttaattgttaacatctagtcagaggatatgctgcagctgacaaaacagtccttttaaactagtttcagcttgagtatcatctcattataattgtctttgatgaattacagctctgcttttttttttatcatggaatttttctgtcattcccttccgactagggtcatacgctcgtggctcattcacattccccttggtaataactaatgagggccattcagttaagtggctgggaaggtctgacatggaagttgggtgatcctcaatggttatttccttttttgctctttctagcatttttatatccagaccttttgagtgagtcggattagggtgaggggttggtcactgagtccagtgatactaggacccttaactggcactttgctaggggcttttacaaacaccatcccatttgtttcttaaacccctgcaatgtgcgttttcttaatgcccatctgcaggtgaggaaatgaactctgggaaaaaacttgtgcaggctcacatggttagacagttgagaagtcaggaggagaatggaatcactgtggaaagggctgtgaggtcccccgggcaggcaaggaaacagccctcaggaggggctggaccggattcatcaaatgaataataaataagtgcatgatgttgagtgagtacatttagaaaaagtgtttgctgtcttcttgcctcgggagaagtgaaagtagatgcaggagatgtgaaataaagagacatgattattctaattattgtgatcaaataagaaaacataagaaaatactttaataatgtgaaaacaccgttatactatgtagggttttactatggtttctttaataatttctaattcagtttatagtaaagtcaatcaaaagcagcctcctctgaatgggaatcaggtgcagaataatgactttatttctatctacataaaggtctcacaaagttggttttttaatagtaatatatatatacatacttctgtagtgtgtgtatataaggcagagagaacattctggacggatgcacaccacacttacaagagttgttacttgtggagaggatctttccctttaaaaaaaaaaaaagccagatgtggtcgaaggcacctgtagtcccagctactcgggagactgaggtgaaaggattacctgagcccaagagctgcagtgagctagaatcccaccactgcactacagcctatagagcgagactggctcttaaaatccagcaagaagatagatatgcattgtttgtatgaataatagcttctaaaaagaaaatcagtaaggaagggagtcatcccagatgatggaattgatagaacaaggcaagaccactttccccctctgtgagggtggactgtgactctacgagagaagctattctgctttgaaatgcggcactagaggttggtgtgtgtagcttttgactgtgaagtgtccaggaagagaaagcatcaatacaacaaattcagattctcagggctctcatggtgacttgaattcacattttgtgtccttctagaatgctttcatgatacgtcttggtacttcattacaacaaaaacaaacttattgccacccaggtcgacaggtgggaacagtgtcaccttatttgaacttaatttattcggcctttgagaagcacttatagccagtttcctcgaggggcaacaaaatgacattgcagttcaaaagtgctttaaaaacttctttttcccaaagctataatctgcatgtcaccattctccagagtacattgaaaatcccctacaggaaagtgctgataacattgtgcacagaaaccgctcctggctggtggcactggggacgcctgcttaaagtcggagccgttgggttgaatcgagagaaaaggattgagcgtattgacttcagggacctcccagggaatgaatgtgattggtttcaactccatgttttatggcaggctaaacagttaattctgattaaaagcaagcctggattctcagagataaatggctggagacagtgaactctttacactttctgaggcgcattgtgaagagccttatctcctgggttgtcttgcatacttactctcctctgacaagcacccgcctcttcttcaggggtgcaagccacctatgccagctggagggcagagttccattcgtgaaacccttgaaacatacgtactatgaaatacaaaaatgtgtaggaaagaaaacaagattattaatgaagttcatattggacacccctcagaggtctaaaatgatggtgcccctcctgggcctaatttataataaacatctctcctttgagacatcacttaaaggttgatagttgggatatggagatgttaggatacagttgtcagcctctcacatccagccacaggcccagggtcagcatctgaaagcatgaaagcaaaaacaggcaccttctccacctcctttctgagccaggaccacctccttcccacagtcagtgtgtggtagagcctggtggcaggtcccgtcaggcaaggacattagcacacagcgtcagaggaattactgacatttcatatggatcttatggaacaggttgattttattttcgtttttaccctacccatttggaggtgtagaattgagcctgtgtttggttttgttttctttctttccaacctttttcctttctttctctttgttttgccttccttcctgcatagaaatatttatttattcattcattcatttttttgagacaggttctcactctgttgcccaggctggagtgcagtggtgcagtctcagctccctgtagcctcaacctcctgggctcaggcgattctcctgcctcagccccctgagtagctgggattccaggtgtgtgccatcacacctggctaattttttaatagagacagtgttttgccatgttgcccaggctggtctcaaattcctgggctcaagcgatcctcccaacttggcctacgattacaggcatgagccaccgcacacggcccatttattttcttaaaccagatcgaatctaaacagaaacagaaactggagaagaaatcctattcaggcttggtatctactgtgcattcctcccaaatctctacccattggtcaaggtccctgagttcacagagcccaggccagagccctggaaacgcctctgcccgtccgctgcctaattgcctgtccacgctgggcaccaccgggtctctccctcagtctcagagctcagttgcttctgcacctcatcagggatccagccatcaaagccaaggctgggggacacttggactagagtaatcctaccaataatgcagttcagctttgtaaccgcaaattttctagtagccgtattttttaaaagtaaaaagaaacagatcaaatgcattttaatagttttttagttccaataatacgtttcgtgtaacccagtatatccaaaatatccattttaacatggagtcagtattaaagttacctaaatatttcacttttttttttttttttgtctaatctttgaaatcccatgtgcatgtctcaaattggactggccacatggaatgctcaggagtcccatgtagggaccagctgccatgttagatagcccaggcatagcatctgtgttgagggccctgacacctcttttggattcatccaagaagtaggaccttacgtgcaccatcatcacctctcatatgtgactctggcctttttcccgacccagcataagaactcttccctctccctactactctcctcctttttacatttgcgttttaatctgttggtgaagatgggtaaaatcctgcttgaccatttcattcagtttctcaatcccctgtggttaatttgtttttttcaaaaatgtgtttttatgtgatgaaaagaaatttttaaaaaccaactgctttctttcctatactagacttccttgctttgttctggtccttctatctgttagtatcctcaaattatcttgaaatcctcagagatctgaaatactagtactgactgtacagttttcttactcaaatctatagcatgtggaaagttgacagcaagccatgccatcgcctcctggtattctctgtgggtttaaggaagcagcatcttatattctttggcttagagttcccccaaagcacgttctgtctaagggcttgtttctgtacctgctttaattacggtttcttctccagtgtacgttcctgatgagtgggaggtggctcgggagaagatcaccatgagccgggaacttgggcaggggtcgtttgggatggtctatgaaggagttgccaagggtgtggtgaaagatgaacctgaaaccagagtggccattaaaacagtgaacgaggccgcaagcatgcgtgagaggattgagtttctcaacgaagcttctgtgatgaaggagttcaattgtcaccatgtggtaagagaaagttcctgaaaagccaaaatgcagcacagggagagggtatcacacaagcctcccagtatgttcttggctgcatgtacccgtgggtttggtgtcttgcctttgccttctggatagttaccccattacctcactgctaccttcagacccctgtgctcagaccaggccgcagcaccacagagacagttccagacaacacaggcaccagcaagggccaccctgaccctctgagtctttctctttttgattcctcccaggtgcgattgctgggtgtggtgtcccaaggccagccaacactggtcatcatggaactgatgacacggggcgatctcaaaagttatctccggtctctgaggccagaaatggaggtcagttttcatttccaccggtattgcatgttgcctggcctgctctcttttcctttataatctccctgcaaggaaatgctgtgtctttaaatcagtttactttccagcatccagtgtttcttactgcatgctcagttgtaggtcatttatgcaaaggatttccccaactagagtcagactctgatcttcgtgaggggaacttcctgttccttggatcccctctgctaagcccctctgtgcctttgttcctgcattccctccacccccagtcccctccccacatcagtgtccacctgccaagccaggccagcgccactccctccccgaagctttcctgccccactccagtagctatctcctctgctaacttctcgatgcgcttgactcacatcctcgtatgtgttctctctcgttatgttgtgttgtgctgttgttggagtgtgtcccccctccaccccgttgtgtttagcttttcatctcagtccaagtgtgtggctcagggccgcatttgtggcaggcactctgtcaataaatgtatgttacagttcaaggttaagctgcctggattcttgcccttgcatctgggaagttgctgggtgatttcccacccagctccgtgcgcaagatgtgcactcattcataaaccccctccccacacacagtccccttccccggcattgttggcggtccttgtctttgccactgggaatctggtttcctcagactctacgtccacgtttcaggattgatccagagtcagtgtcctgcttacgcttttgaatgaatgatcccacctcagctgcaggatttctgcttagtttcctaaaaatttcactttgggttatgagcttccaattctaaacctgctaaagtcctatgcaatttttcattaaaagtcaccgtggtgtctcccccctctgtagtattaacccacaggccagctttttaacatatgcgggcatgacttttgagtaattaattctacaaataaactgggagataaatgctgagacataaagccagcaagaactgagttttcatttggttgcctccgtgggtctgaagtctttgacccttactttgctgcttactgggtaagcagtgtgtctgcttttattccttagaagcagtgacttccccttctcggcccctttggaaattcttttgctgttcttcatttgggcttaatttttttttttttttaatgttctttgaatcggcaacttaatcatctcccaagtgacagtttcttaattttagttccaaacacctgttcacatatgacttcatgtatttgcagcacatggtgtttggggccaagtgtggactggggcttcaagcaggatggtttacaaaactcccaccctctgttctgccaagcattggtccccagcacccctgggtgttagtgcctcttcctggttcactcactcactttctctggccctctctgtgtctctctcactctctttctttcgagatggagttttgctctgttgcccaggctggggtgcagtggcatgatctcagctcactgcaacctccaccacctgggttcaagcgattctcctgcctcagtctcccaagtagctgggattacaggtgtgtaccaccacgcccacctaatttttgtatttttagtagagacggggtttcaccatgttggccaggctggtcttgaactcctgacctcaggtgatccacccacctcagcctcccaaagtgctgggattacaggtgtgagccgctgcacctggcccttggttcactttaatacacaaaacagcatgaaggagaaaagcttgatgaaataggtgactggagatctggcagagtatttcttgccagcatcgattgaggcacctctgaaaagtccaaaactcactcccttcctctccagtttcaggcacagaataaaaattcagaacacatggccttggtcctggctctgtggctggctgcctgtggtcctcagacagctgctgcaggttcctgggcctcagtgtcctcaatatgaaataagagggtgggacaagattactgaagtccctttcagaactaaaattcacctttagattggtcagatttaaactttttctttctagctcatgtcaggtattaaaatgtgtgcacttaccctgcagtttcattatattcaacctgctcccccgaccaagtttcacttacgtatctcactacgagtaggtgtatatgtatacttgtcttaaatagctctaaccaaattaaaggaaagaatggcagtgtaacaccatgaactgacaaaatttcagccctctgtctttctccatgcttaaagttgagtgcttttgttgattctgttgctcacggcaattataaatgaccacttcataacacatataggtcatactgtaatatttaagaattgtgagcataaactttacatttcatgtgcatatttcctcatgcatcacacgtatctaaagccctgaaaagtagtgatttggacttacccccagtgacttaatgttgcttccccagataaccacgtgataagtgttttaagtcaccaagagacagctttgacagcctgttcagaattcaaaggtttgtgtcaccaagtgtagagaaccaacccagaagtaccgaggagttgttataatgattccaaatactagctttcagtagaaactagcacctcacagggcagcagccagcatccactgggcattgactatgtgccacgcaccactgggcactttctgtgcgtggccccaggtcatcttctcgtcagtgaaaccactgtgataccccatgtggaaaagcctgggcatgctcagctggtggccggcctgcaagtgtgggacctgtcagagccctatggctttgcagtgctgtgtgagatgctttgtggtcaagaaaaccaaggtgtagagtctgttgcacttgtatatgcaaaagtaaaaggtaacattaaaattagggactagtgattgttttaggatggagagacttgggcatgtgttttatataaaacttttttctaaatggatgtattatttaagggtaattctttttaattccaaagccagcacgttgctgtcctctgcaaagaggaatgcttatccctgttacttattcctggtttcctccaagactagtttcagctggacttcagttgccaaggacttgtcttctgtaatgcccacagaaaataataatgccacattgtaaggtgaaaacagtaatcctggtatttttgtattttagaagaaggttgaagggaaagaaaaggattaaataatttataacgatgcttttatgggaaataaaatataccatgtccatttggaaacacatttgcttacttccacacagcctttgtaacgtgctctccttcctcttacctgtacttcggtgatggaaataaaaggaacatataaacaaataggaatttgagtaactgagaatccttactaccaaaaatggcttgtttcactttaaaaaaatgttgccctacccaaaatagaaaatgttggtcctaaagagtgcaaattggtgtttccctcaccagctctgatgtggtcagggagcaagtgcaaataagcttgcggggagcaagcaggtgccatgctctccatgatggtttgttccttccgagcaagtcctggtttcttagcataaacaacccacggtgcccagattgaacaaagatgatatgcaaacctcgaaagaaattggcatggaaaaaaaaaatccaaaattctcatgtgaatttttttaaatctccaacagaataatccagtcctagcacctccaagcctgagcaagatgattcagatggccggagagattgcagacggcatggcatacctcaacgccaataagttcgtccacagagaccttgctgcccggaattgcatggtagccgaagatttcacagtcaaaatcggaggtgtgtccttagctttccaggtctgggcaagaactaaactcaggtgttttgaggactttgttggcattagtctgcccctggagaggttttctagtgtgtcccttgagtgcacggactccttcttgggaatgatgtgattgtctccagttgatggtcacaaacctggcacggtcggtcccaatgctgatagctcatggacatggtggttcagatactgggcacggtccctgaggctggctctccagacgtttgaggcatttcttggtagaacacctcttagcattggttacagaaataattaagacaatgtcttcaggagattttgacttgggaataaaactcactgtccaaccttgcattcatccctccaattttcctagcttttaaggagcattgctccccttccagggacccacattggtttctaagaggcaagctgccctaatgacgaagcctctgcacggagcaggagcagtggcaggagctggcatggcagtcccttaggtgagggacgatcactgctcactgggtttcacggctggggctggccagcctccaagctctcgaccactctctcacaacacttactgtcctgctcttagctcaccagcctactggttagactcccttgttgccaccacccactgtcacaccagaaaaaagggttggattgaatttctgagcaatggttaaaacccacttcagcctttaggtttgtgtttttacttcggtcttttaatctgcctaataaaaacacacataacatcagggctgctcaggaaaccacctgcttttaccaggactctcatcttcccactatgatacaatgatagtttagaaaaataccaaatatttatcctgagaaactgcaggggagatttaacacccaaaagaagctatttcaaatggacctctgtgtctagttcttgaactgccttttctggaagtgttcaccttcctttagtaacatatttttttcctttagtagtgatgttttaatgaaatgttttagcccctttggtgaacaatgagaatcttttagagaacggtttctttttttgagacagagttttgctcttgttttccaagctggagtgcagtggcacaatcttggctcaccacaacctccacctcccaggttcaagtgattctcctgcctcagcctcctgactagttgggattacaggcgcgtgccaccacacccagctgattttttatatttttagtagaaacaggttttcatcatgttagccaggatggtcttgaactcctgacctcaggtgatccacgcacctcggcctcccaaagtgctgagattacaggcgtgagccaccacacccagctgagaatggtttctaaagtaggggtgagtgtctttctttttactctgtaggagctagaggtattgaaatggaaccatatcccagagcccacatccctccgtcatcagagttcctcattcaggatccaccagtgtgtccctaggtttggcacgttgagacgtcctcacgtttggtgctctgtgaagctgggcagccctcagagaggcaaagaagtcccaagaggccgtcctgcctcagggctctcaggaaagagccgcccgcgtccctggctgggcttccttggtgcacccagctcatttctccttccctctctgtagaactcacattgtccccgtggaaatgccagccagctcccctttcccagtgcaggggggagccaggtgggcctgaggtgggccagttctgccgctaatgggtgagagacttgggccaggtgccttacatccgggagcctcagtttcctcacctcggaaatagggtgataatgtaacagaccccatggggttatgagaaggacttggtgcaggaaagcagcagcacgtgcctggcacagggcagggcctctccagatggcagttcctgtctgtgtcttattcccaccctccgggcacatggggggaactcagtttctccccactgcgcgtcaccctgggagaggtgttttttgtgccaattgccattttaaatccaaatcagcagggatcatgtttgctgttcaaccatgtggcatatttatagtgattttttttgtaatcatggtttttctttctggaatttcaagtttttcatttgtgctgaggaaggtcgtttgtgttttttaataggattccttcttttccaccttgtgcaagtaaaggcaaatcccctatttgcatgtcactgtattaattcacagataacactttcacacttcatttttattcttctcaagggctcaagatgttttcccaatgcccagcgtctcatggatgacaaatatgacaagtaattttaccagaggcagtttgagggctcttagcatagcacaagtaaattatgttggttcaagtccaaggaactttgttctctttgtgtttgcttttgtagccttacctctttggggcatgagttagagacatacatgagcattttaaagtggagcagccctttctcctgggaaggagaacggaagagtccacttaagaaaaggttgtatgattgagtgcaaaatcaaaatctgacaaagcagcaataatttaggattataaagcgagcctgccatcaaacataattatgtggcatcttctggagacatggaaaatggaagaaattttcaaaaatgagtgggaggattatgttgaaaaacagtattgagtaatagcttcaggggcctcgtaaatagcatcttttcggcatcttactgggtacttttgtcatcatgaattgttaccctgaatattttcccccttattaagcagtgaaattatttacttttctccagtggtggggcagtgctaccaagttaagtaagcatctgtactctcctgtttatttggtcaggttttaaaaccatgtgtaaatgaccagtggtctctgcagtactatatattttcttaaattgtgggactctaatttttacaccgcttccttttttcttatttttattttcaagacaggttctcactctgtcacccaagctggagtgcagtgttgtgatcatggctcactgcagcctcaacctccagggctcaagtgattcttccaccttagcctcccaagtacctaggaacacaggcgcacaccaccactcacaactgactaatttttaaaattttttatacagacagggtcttgctgtgttgcccaggctgatcttgaattcctgggcacaggcgatcttcctgtcgtggcctcccaaagtgctgggattacaggcgttgagtcactgcgctcagcctgcctctcatttaaatgcaataagggcattaacttcctaagggaatcaaattgtaaatatattaaaagtggagattgcttggtatttgctcatcatgtgattaatcatcccttactgtctccaccttataaaattgcaaaccctaatatttggccaccttaaagtgggacgtgtctgtgtcttgccttgcgtctctccacacataatgagtgtagggtcctctgctgtgacagcagtggtgcctgctccagcgtgtgactctgcgccctctcttcccttacagattttggtatgacgcgagatatctatgagacagactattaccggaaaggagggaaagggctgctgcccgtgcgctggatgtctcctgagtccctcaaggatggagtcttcaccacttactcggacgtctggtatgagaacctttactgcattgccagcctggagcccccagcctctgcactttccaccagctcagtctctagggctttatctttctctgttcattgttacccgttgccagctttagctcagtgttgtgtgagccacacttcttcatcattgaggtgttcctgttgtcagtgggctagctaagggcagaagggcattcgtgggattttaaagaatttatgggaccaacattctttccgccttcagcagataccgattatgtttccaggaggtgggatgtgccagaagccgtcacctctttttgtttctcccctgcctgccttctttctcttttcctctttctcaataaacagatactgtctgtgtgtctgcctcacctaatctaaccctcagattgcagacagtgctttatttagacccaaagcttatgagtcctgattgtgttttcctgctggtcccatctgctgtctgtctttcagtgggcatccaccgttgtggacccagggatggttatgggaagcaaaacgtctcccttaatcataaacagtgtctaccagtggaagcccatcgaccgagggatcagaggcctctcagtagtattgtttattgcagttccttggcaacattgcagagaggcagtcaggttctgaaatacaactgaggttattggcaggctgaggccctggcacaggcaccttctagaatatcagctagtgtcttggctttcctctggggggatcccgttgctgttgtgttacagaaatggtagttgtttactccaacagtctggatgaccgcatagaggaactatttcaatagtgactgacatcattttttttttaacctcgtaaacctttcacagttcaggggccttggatcttattttgaagacaggtgcaaattggaaatagcatttgaatatgacccggcaaagcatgattgcttcttaagctcaagtatgagatctgttttgcaatcagcttgtccaagatggttatctcttcactgtcaaatcaaagtgctctgcatggtgtttagagattgggatggtgaggagagagcaagcctgggtatgtgcatgcatctgtttattctaggcttcgtgcctccaggagcttggaggtcagcttgtagtataataaaatagaaaactatacagccggggagaacagaagcagaatagaaggataaagtgttgttcatatctctcaggcaaattttacccaaattctgacgagcagttactgcacaagcaacaacaaagggacctagagtgtgttcattgccaattctgtccatttggctacataactactgtgaaccaatacaaaaagatatgtataaacatgaataggcgtttggtattcattccatgaaatgctcaggcattgacagcgcttcaggttttgtttgctttttaacacaggctttgaggatagcacaggtcaggaaggctagggcgttggagcaggtttctcagcggtccaggctctaaactaaagctgtccctctcaaaagaatggaaatgatttcagattgtattcagcagcacgaagcaatgattcctaaatagttaaaaatctagaaagaaacactaagaattgtattgggctttgtagaagagaccccagaattttaggatttgggatgtatccctgcagtcaggcccagtccccagtgcacctgcagatctttgacagctgctggttgagcttctgctaagaggtttccttccagggactccatgttcactgcctcacaaaggcaggccagcctcatgctttagacatccttgctcttaacaaatctttcgtgttctgctacgtcagcctctgtgtgacacccattggaccttctctctgtagcacaattgcataccttgctctgttcttgataagataggtctaggagtcatcgaagaggtgtgtctgttctagccagaacacctccaagtttcctgctgtcttccaggacttcattcccaggcccttgggcactgtggctgctctccctgcagctccctgtagcaccatgtccctctgaaatgacaagggtgccctctaggcatggaggaaaccagacgaaggactggggagctgcaccccacagcctagagctgtgcttcttcccgagcatctggatcacccaacacataatctttattttttattaagaagctttccaaatagtcacaaatagccaaggttatttgcttctttcatgactaattaccatctgtggggaatgtggatttctctgtaggttttaatttgctggtgagtgggccattgctaccatcccctcctggtgtggggaagtatagttactgaatgctgcctccagccagcacgggcattgcagggggactcacagccgccggtcttccccctggggaaacaacgtcaaggttcctaattagaaagggctttacacagagacatgtatctactgtttgaagattaaatctgtccatgaaatggaagacttgattttatatgaagtcatgaagagccaacaccacatagtaaaataccggctttgaaaaacacagaggtgttgcatatttctcggtgcttctgactggctgtgtggccttggttaaacctcagagcttctctggccttcggttgctccatctgtaaggcaaggtctgtctcgagaagtctgcggtacctgaatagatgttgaaatggctcctgtggcaactggtattgtgtagagatggttcagtgtccacaccttgcagttgtcacattaagctgtgaaggacgactgactctagcactcagtggtcctcagtggcaggtgatgttgacctcagacaagagttgctcaggagataggctttgcagttcacctcgacaagcgtttgtggagagctaggtctgctacctcctgtatcgttgcctgtgggtgatggtaaggctcttgggggtgtggaagatgcggggatgatgatgatgacgatgatgacgatgacgacgatgacagcgtcgtcgtcgtcctggtcctggaaggataaagtcttgtggagaagaggaggcaattctgacagtttggggttgcatcatcttcttcacagaagagatgaagttgtgtaggcaccctaagtatggattgtcacaaaaagagcactaggaagcggggcggggcggggcaggggtggggggttcctggcagtgggaatgctgggcaggcatggcagtagggagcacctgctgcaggtggggttggtgaggtttcctcgtgggacttaggctgcagagagatcaagacaggcctcagctgttgtattaggcatcctggactaattctttaagccctgttaaggtttctgaaccagagggtgattagagctgtgcttgaagttcttgttagccggagtatacagctgcattgagcaagatgttgtaaccaaaggagaggtggtggtgggccaggcaagcaggatcctgcacactcagggagctctgagggacggaaggagggtgccagaccttggacagatgtgagcctgggtggacagttcgcagtgggactccgaggaggccaagggcatgggtgacagcaggcagactgctcgggtggaatgggcatcagctgcagggaagccgggggaagaacagggcacaaatcagagttcagtgtgagacgcagtgagtttgtgggtagcccagtaactgggaacttggaatggagcagttgggccgggagggccagggtgggagccgtgccgtgagaactggctgcctgcaagccgctgacacagccaggaagggcacgtggggcaagaggagaagtgggtctgggagggagccacatcctcaggccatttcccagaccagcctgcagtcagcaaaagcagagagctagtcatttcttcttattttatttttaattttttgttgttggagagctagtcatttcttgtaccaagctgcatttcagatgtgtgggtactactgccactggcatctgaggcatgctgcctgtatggctgggctggttgtggaaggcagagcttcccgcacaaagctgatggagagccccttctcccctgggcccaggcctctctaaactgcacttttggcctctgggtgtcttgtacaacatgaagacgacagcatttcttggtcacttgtaattaaaaaggaccttgggttggtctgtcctctgattgctaagattctatttctgtctaacatctacttttagtatcaatttgtacaaaaatctttgattcaccgaaagtagctgaagcagcgaataaaacgttctcatacagtcaggagcactgtgggcttgggcacaaggtcaaggtcccaagagctcttggttggaaatctcctgccccaggtttttccatgtggcttgaccagcacctgcagcccaggacaggtccagctagaatccctgctccccaccctgctcccgcccctacttggtgatgagtagcctattttactccaccaaagtgaaccacatggaaaggcacacaggtcagggagaatttgtgaattacggaatttgccctgggagggcacatttgttttgcagattccagcattgtcttttttaacattctgtctgaaagttgtgtgtgtactctctgttttgttttccagtggtttgatcttctaaactggcaaagctgcatgcatatggcagaattgctcactacaaagttattcctcagccaacttctctgcttaaggattctttgtccatgataccccctcccagccagtgcagcccaccctggtccccccacctgtgacacagaggccctgcaggccagcagctccccagctctgttgtgggtgggggagcagcaggagttctcttctcccttggcccaactggacctcaagatccctatagatcttctaaacattccaggtcccaggccctcaccccagaccaatcaaatcagagtttctattgggtgcccagccctctgtttaaaaacctccccaggagattctcctgtgcagccggcagtgagaaccacctgggtagaggtttccaaaattgtctgattgtaaaaatcacctgaggagcttggtaaagcttgactgtcccaggcctcatttgaggctactaagtcaatgtccaggctggggcttggacaagaatgtcattctttttgggtcaaagccaggttaggtgataccgccttgccagataaatggccgggactaggtagatgctgaacccagtatgctctgcgttcaaagcacagatcaggggcttcctgaccgtgcaagggatgccggaagcgccctcaccaccttccttagctccaccaccggggctgaatttagtttacggggaacattagcagcaacagagggaggatgatatcccgcacttagcccagggcctggctcgctgtctgacaagcactgtcaccatagtaaggacagtttatctgctcgggatgtaagaagtgctggaaaggagggggcagcattgttcagtccatccctttccaagctcctcacagtttttttctccctgtaggtccttcggggtcgtcctctgggagatcgccacactggccgagcagccctaccagggcttgtccaacgagcaagtccttcgcttcgtcatggagggcggccttctggacaagccagacaactgtcctgacatgctgtacgtacttcctgggccctccgtgctcttctgagttctcttctcaaatacctgttttcttgggtcacaggagattaggagattaaagccattctctctggtcctgcacctcccttgccaggcgtggctaagaggtttgtccttgtggaaggagctgagtgggttggtcgacctgtgcttttccgtgggtaccttaattctaccccatattccgtaatgctttcgttccgatttgcagttcacactgtagtttctcaggccaaatgtctctgtgaaatgtttggccagagtaatccatccttactcatcctctccatgtgaggtttttgtttctttttaaagaaggctacaacacaacacatactactctgaagtcgaattcaagagccccgcgccccacctgtggcaggcctgagggagccgccgcagtgagtgtgcacacagctgcatggccaggactccggcatgcaccacgtagggtcagcttggtgtcttctgaaccctgccccacatgtcttctctgttaagtgtttacaaaagtcataaaccatctaagtaacatgctctccggagcttcatccgctgaccaatgtggacctggagcgtgtgtgagctgacatccctgcggacagaaggatgccagtgctggtgaatttgtcttctcactgcacttttttttttttttttttgagatggagtctcgctctgtcgcccaggctggagtgcattggcgtgatcttggctcactgcaacctctgcctcccgggttcaagcaattctcctgcctcaccctccaaaatagctaggattacaggcacccaccaccactcccagctaatttttagtagagatggggttttaccatattggccaggctggtcttgaactcctgacctcagatgatctccccgcctcagcctcccaaagtgctgggattacaggcatgagccatcgcacctggcaaccccacttattttgaaaaaacactttgcagcttttagtcctaagttttgtcagatgacgagagagagtttgtgatgcctcacagtgttggtgaggcctctctgctcagcgccccctggagaagccccccttttggtggaggacttgctctgtgtccgtggacggtgctgttttgtggctcagtggaggtcagagctgctggagcagggaggccttgttgtccttcctggaatgagtttgaggagggggtgaaggtgttccagttcagtcatcaggcgcacaacaggtacaggttgggagcagtggccttgcttttgacatgcactttaaggcaggcttcagagattgatctggatctccatagctgaacaggaaggtgggctcccactagtatctcaagaccaattcaggagatttccagaaatgcttttcaggacaggtttggcttcattttggaaaggatcctgaggaattgctgggctgttatgtctgcatgaaggcacccagctcctatctctcacccatccacccccctggagccagcacagactcaggctgggcccacagtggcgggataatagatagatatgaaccagacatgtgtcaggtggacaggagggaatgagggctccagcagccacaaaagttttgctcatttggtctcctacagtgtctgtgggccaggaatccagatgcaggtgttcttgctctcagctcagagtcacaggaggcagaaatcaagatgtcagtggggctgcagtctcacctgaggctcagggacatcttcaggctccttcagggttctgcacttgcaggactgaggtccccatattcttggcacctgtcagctggggactgctttcaactcttggaggccaaggccactcacagtccttgccatatacagcctccataggccctctcataacagcagcctatttcttcaagactgataagaggacagctctctactgcttctactggttttttacctgataaagtcagatctacccaggatactctctcccttttaagtgattcacagtcaattgatgagaagcctgattagaggagtgaagtatcctctcatgttcacaagtcccacccgtactcaagtgaggggattatatgggatatttacaccaggggcaacgatcttggggggcatcttagaattccatagtctcagaaatcattgtccctaatcaaacaatcaaggtgctatttttgtttcaaagcactttgagtgttgctacaaatactgaatccctaagctccttgtaaatggccggccagcggagggcatggggtggggaagactggatacacacccctgtgctctgggagtacgttggctgggcggcatgctcattagctgctgcttccgaacataggttcagctgaagtgtatcccaggcagtggacacttcgtgtggaattcagaaaggtggcgcaggaaggataccagggaaagccagagtgaaggcatcacccttgcacagctagcacatgtgggggctcccattgtcccatcaaggcagggccagaaccagaaagtcggctggtgccctgggcctgggccagtgatgggaggctcctcttctctgagggtggcacctacagatgcagtggcactgggtttcctggagccctcatcaaggaaacttcccagcatggcctcttcagaactccacaatccaaacttggaagagactcgaaagaccacttagtaccttttcttgcccagtatagaaattcttcttctccccttctgtgttagttttttatcgcagtataacaaactacccaaaacctactagttaagagcaacagtaaacatgtattatctctcagaggtttctgaaggcgaggaacgcaggagcggcatagctggctggctctggcttggagcccttctcgcggttgcagcccagctgtccgccggggctgcagtcatctgaaggcttgcctgggggaggcagacccacttccaaggtgttgctgcataggtagtatgccctgcatgaatcgccctgttctacgtgggcctctccgtagcactgcccaagtgtctcaggatgtgtagctggcttctctgagtgcagagttcggcacactctttctctaaaaggccggctaaaaaaatgtttttggctctgtgggcccatacgaccttgactgtgactactggactctgccactgtggagcaaacacagctgtgggcgtcacataagctagcgtggctgtgttccaatacagctttatttttaatactggaatttgaattccacatcatccctgtgttgtcacaaaatattcttattttgaatttcttttagccatttacatgaaaaccattcttagctcatagaccttggaaaactaggcagcaggccagattttacccacaggtacatagtttgcctgctgtgccctagagtaaaagatccaggacctgagcagaaggcacgacgtcctttctgaccaaacctcagaagtcacactgaggctctcaccttctccttcaggttacaccatgtgagagtcaatcacgtggggatgtgagctccaggacacaggggagaggaccactggggatccgggagcctggctaccccccagtaccccaccaacacacacacacacacacacacacacacacacacacactgcccctcacaggtgaccatctgctccacactttgagcagcgcagccactgttttcttgccagccattatgagaaaaatcatgctttcaagtctgaatataagccatggagtaagaggtctgatgaccactgaatctgcataaaggtacagtgctagaatctaggctaatactagaactggtggtattttagcaagcttagaaacagcccatgaaagcaggtgtgagttctgcttctgtggtttagggtgggtgagggagagcggtattgttctgtgctttctctttgactcgggtaaacgtttatctacaagagacttgtgggattcttacttggtccacctccaggtgactgggcttttactattaatgtaaactgcctgggacgcagcccctgccatgggaaacgcagggcacttcctgttctcagcatagagtgacaaggaaatttactcagagcggttactctgacattcaatgtttagttcaggaggcatttctgctttgccatcgagaatttttctcccttctaagaaaatgttttctcctgagaaaatttttctcccttccaagaaaagagtagaatgaaaggaggcaacttggtttcatagggagtgtcatgttgtccttctgagtttactgatgagcttacctgagaaaggagggttctagcatgggagttctgttgctacaagacatgaaagaatggcctccgtttatcccggagaggagagtccctgagcccttgggagttgccttgaaacctctgccgggtcccaggtgagaaagtgtgtgagttgtgtggttctgagatctgaacaggcaccatctggtgacactaggggctgaaggagctcggtggctgcaggtggactggagctcaccatcaggaagtagccagattctcacccctcagtgtcaccgagtgttctggctttagaggaaggactccgtggtccccaagccacaaggtgtcgaggtctgagtctcaacgccatgactcagtgtgaattaacttagcaggtatcacaacatcagatttgggttgtggttccctgctgggtctgtactttagattgatgacaaagcccgtcctcagccttatttcagcccagatctcggtatttatgccacagatactgttgagctcctctgggtgcgtgctgaccctgaggtcacacagatgagccaggagtggccctggctttcaggaaacgtagtgacgtaaaaggtcccggctgctgcgggataagggccagggcagaggtgtgaacgcagccgtggaagacttgggccaggaagccatttgttctgctgctaacacttccacagctccacgtgtccagactgttgccagagacgtctttggtctacaggattcaggagggaatctgaactttagcctggagcattatcaactcatagatgagtctgaaacaaacttagtgaaatctgatgttttttgtagttttccagtacagtttttcccatcgctggaatcctggtttggttctgcgggaatcgagtgcttgagtgggacccagacagacaggaagggcgctcctgctcagttagccccagtaagctcactgaggcacacaggccccatgtccacagccgctcctggctgaggcgtggttcctaagacgacccttactgttgagggctgccaggagggagagacacattcagccccgcaggtcctctgggaatccggtgagcgtcggcaccgggctggggccgtgctgattcccggcagcgtgtgggaatgtgcgggtgcctcgtggcctgctgacatcgcacacaggtcacagcctgtccagttcaggacatcagggccaagagtgaagtgagaatacggaggcacctctgtgtgctcaccctgctgaccgtcacccagcctccggggggggtcacagctggcccccaggaagctgcttcccagcagggcaggaattccatttgagtcttgtccctgttccaggagaagggctgggtatgtgtcccccaaaggggagagcattcgagaaggatggcgccagcctccccagaactgacctgtggttaaaaaaaaaaaaaaaaattgtgctttttaaaagatgagttttatcagctcacacatccttctagagtctaatggagattttttgtgtgtgtggaaatagtaaacaaggtcttgaatcccacagagcaaaaaagacttcctttcatgggcagcactggaagggttgttactctggaatggtttaaaagaggcgtcacatggcttgtttgtgctgatgtcactgcctcgctgctctcctgtggcacctcctcggtccctggccacagggcacagagccaagcacatctcatgctcttggcccagttacgcttctgcccaggggtaagtcagctggagaggaattcacagcccaggcatttcatgtcgttatggcctattttaatttttttaaccccaatcatttttcttaggaagtgatggggagtttggaaaggcaggcttatttgtcatcaagctgccagcttttatcaatgcaaaccacatccctgtgacatctgtgactgttccttggacagttaggtgagggagggtctcctggtggccccagggttactcttatttaggttgagaaaaattcctttttccaggatcgttggtgatcaaagtgtagtcattctgttgcgcagagaactccatcccagctccaccctcatgaattttgtaatcttggacaaattatttagtatcttagtgcttctgttccctcatctgtaacatgggggtatattatagtcagtagcacctgcttcacaaactcgtgaggacttcagcagttcacacacataactgcctcgctgcctggcacctagcgtgcacatggcattctaccgtggggtagacttttaaaattctggctacagagatacttttccataaaagtggccacatggaactctccaaatctaagaagcatactgtgggggccttcatattttgtctaattcttttctccccagaacaggaacctgcacccttccttcttttaaagggcgacgtggtaaataaacatttttagacttgcaggccacagtctctgtcctaatgtcctcagctggtagttgtagctggaaagcagctgcagcccacatggaaatgagggagcgtggccccatgccagtgcagctgatgtagaggcgggcagccccgggttaggccctgtggagacgcaggcccccgggctctagaacgctgaattctagtgaattctggatggctctccctcacacccaggcccaccctccctcaaggttgcaccttctccacctgaaggaagctgccaggtggccataggagcccttctcttggcaggccagcttccaggcccagtggcttctcttacatcaggggcctccccttggaatgttccctgaaggccagacacgggcaggtagtctgtggtcaagcagccaccctgacaggaggctagatgccactgggtgtgctttgagtttcctagatgtggagagttctgtgtggccacttttatggaaaagcatctctttagccagaattttaaaataaagaggataacttcctggtgagaacagacgtggaaaggaaggcactttggtttcacgctcatgtaagagagggctgttggcggtcactcctcagaactatggccagccctggatggtagccagctgctttttgccccaaaagtctgtttagctgggtctctgcattctggaagcttgtcaaagcccgggcctttcctgggtcagggcagccggctttccttgtccacgtgtggccggctgttttcttggggagccccggccacagccggcaggactccctttgctccatgtgactctgagggcctcacaggtatttgcagcccaggtgctgtcggagcccagccgatgctaccgacacacagcacaagcgtcatcctgttctgcctgtcccttgcgtgtggaggggactcgtgcccagggctctccttgctggcttgttggaatctggcttcaggtctacacggggcctctcgtttggtccagaacagcctggctcatcggctggggcttgcttgtgcagggctggagcgagcacgtgctagatggagacagcagactcggagtgtgcatttcttcgtgttgcaagcctggcctcacagtgccttcttcctttggttgtctgccaggggtagccctgcaccaggaggaagcttagaaatagcacaggtgggaaccggagagagagcactgttggggaagctgcggtcactcatcagccttcctggtgagaaaccaggggtttcctgctaattctggaaaggatgtttcagcagtgcctgcatgagacgcctcagatagaaaactggttatttttgtttcttagcactgccaccatagataacagctgtcacgatggacagtgtggacctggattagtccttcttgggaaaggagagtttgggttttgtaccgtggtggttctgggttctgggggaagagaatggaaccgtacgaggtaaaacaggagactctgaaggccacttggccatccaggcagaaagccagggatggagaggggcagcagggctgtgttcagtgctcccgccgtacgcttgtatgcgggaaaccactgcaggcggcccatgaagcctcctggccatgtgcgccctcccggtttggaccccctcccgtgtgtcttggctgcaggtttgaactgatgcgcatgtgctggcagtataaccccaagatgaggccttccttcctggagatcatcagcagcatcaaagaggagatggagcctggcttccgggaggtctccttctactacagcgaggagaacaagctgcccgagccggaggagctggacctggagccagagaacatggagagcgtccccctggacccctcggcctcctcgtcctccctgccactgcccgacagacactcaggacacaaggccgagaacggccccggccctggggtgctggtcctccgcgccagcttcgacgagagacagccttacgcccacatgaacgggggccgcaagaacgagcgggccttgccgctgccccagtcttcgacctgctgatccttggatcctgaatctgtgcaaacagtaacgtgtgcgcacgcgcagcggggtggggggggagagagagttttaacaatccattcacaagcctcctgtacctcagtggatcttcagaactgcccttgctgcccgcgggagacagcttctctgcagtaaaacacatttgggatgttccttttttcaatatgcaagcagctttttattccctgcccaaacccttaactgacatgggcctttaagaaccttaatgacaacacttaatagcaacagagcacttgagaaccagtctcctcactctgtccctgtccttccctgttctccctttctctctcctctctgcttcataacggaaaaataattgccacaagtccagctgggaagccctttttatcagtttgaggaagtggctgtccctgtggccccatccaaccactgtacacacccgcctgacaccgtgggtcattacaaaaaaacacgtggagatggaaatttttacctttatctttcacctttctagggacatgaaatttacaaagggccatcgttcatccaaggctgttaccattttaacgctgcctaattttgccaaaatcctgaactttctccctcatcggcccggcgctgattcctcgtgtccggaggcatgggtgagcatggcagctggttgctccatttgagagacacgctggcgacacactccgtccatccgactgcccctgctgtgctgctcaaggccacaggcacacaggtctcattgcttctgactagattattatttgggggaactggacacaataggtctttctctcagtgaaggtggggagaagctgaaccggcttccctgccctgcctccccagccccctgcccaacccccaagaatctggtggccatgggccccgaagcagtctggcggacaggcttggagtcaaggggccccatgcctgcttctctcccagccccagctcccccgcccgcccccaaggacacagatgggaaggggtttccagggactcagccccactgttgatgcaggtttgcaaggaaagaaattcaaacaccacaacagcagtaagaagaaaagcagtcaatggattcaagcattctaagctttgttgacattttctctgttcctaggacttcttcatgggtcttacagttctatgttagaccatgaaacatttgcatacacatcgtctttaatgtcacttttataacttttttacggttcagatattcatctatacgtctgtacagaaaaaaaaaagctgctattttttttgttcttgatctttgtggatttaatctatgaaaaccttcaggtccaccctctcccctttctgctcactccaagaaacttcttatgctttgtactagagtgcgtgactttcttcctcttttcccggtaatggatacttctatcacataatttgccatgaactgttggatgcctttttataaatacatcccccatccctgctcccacctgcccctttagttgttttctaacccgtaggctctctgggcacgaggcagaaagcaggccgggcacccatcctgagagggccgcgctcctctccccagcctgccctcacagcattggagcctgttacagtgcaagacatgatacaaactcaggtcagaaaaacaaaggttaaatatttcacacgtctttgttcagtgtttccactcaccgtggttgagaagcctcaccctctctttcccttgcctttgcttaggttgtgacacacatatatatatatttttttaattcttgggtacaacagcagtgttaaccgcagacactaggcatttggattactatttttcttaatggctatttaatccttccatcccacgaaaaacagctgctgagtccaagggagcagcagagcgtggtccggcagggcctgttgtggccctcgccacccccctcaccggaccgactgacctgtctttggaaccagaacatcccaagggaactccttcgcactggcgttgagtgggaccccgggatccaggctggcccagggcggcaccctcagggctgtgcccgctggagtgctaggtggaggcagcacagacgccacggtggcccaagagcccctttgcttcttgctgggggaccagggctgtggtgctggcccactttccctcggccaggaatccaggtccttggggcccaggggtcttgtcttgtttcatttttagcacttctcaccagagagatgacagcacaagagttgcttctgggatagaaatgtttaggagtaagaacaaagctgggatacggtgattgctagttgtgactgaagattcaacacagaaaagaaagtttatacggcttttttgctggtcagcagtttgtcccactgctttctctagtctctatcccatagcgtgttccctttaaaaaaaaaaaaaggtattatatgtaggagttttcttttaatttattttgtgataaattaccagtttcaatcactgtagaaaagccccattatgaatttaaatttcaaggaaagggtgtgtgtgtgtatgtgtggggtgtgtgtgtgtgagagtgatgggacagttcttgattttttgggttttttttcccccaaacatttatctacctcactcttattttttatatgtgtatatagacaaaagaatacatctcacctttctcagcacctgacaataggccgttgatactggtaacctcatccacgccacaggcgccacacccaggtgatgcagggggaagccaggctgtattccggggtcaaagcaacactaactcacctctctgctcatttcagacagcttgcctttttctgagatgtcctgttttg

SEQ ID NO: 158 - DNA, 11613 bp, Human
  misc_feature (1)...(11613): n = A,T,C or G
tcggtcactgtgagtgccgcctcgcttccatttccaaatatctgctattaatagccttgctgtagtgggcacgtgtgcccacatcaccaagctgtcagaggaaaagaagggagggctttcaattcaacatgtgtactcaaattatagattaaccaggtttagatgaggctgcatgacgaccgggaacaggaaggggagaggagaaacgagaggctcccaggcttgggtggggaggagcccctctgcagatgcccaatccccctaatttacgtatcgcacacccctgaatggcgcctatggttctttttctccttcatcatcatcatcttctttttctttttttactacgctttgcaacctaccttggtaccctcaacccttctacccccaccttccctctgcagtgcaaggcttgaaaaacaggccatcccaccaatcagcaggcctccccgggaaactcgctccgcccctcagccgcattgggccgaggcgcgctcccccgcggcccgccgggtcccagccactgagcatgcccagcgcctcgactgctgagtgcccagccagcatcctgcagtgcctgggagcctgaggccgaggagggtcccggcgtagtaaaggggcggcaaccccaaacgggccaggcatcaaaatgagacagcattaaaccgagtgacatctctgtgggtccttagtgccaggcgagcaagcagggacaaactgcttgtttataggtcggcttaaaaaataaaaaaactctggggagcgtttgtttgtggggagactgataccgcaaggtgaccctgaaaggggcgcttcaagtagacccaggctgctgatctggtccactcatgaagtaaccattttcctgtacagttgagctggcaccatccttgttttctccctgttatccttgtggtcaaggttaaaaacttatagggtggttcaatgggtgtgggagctgtgtgtgaaacaaacatttcagccaatatttgcacagtagggttttggccttatgaaccctctgaaggtccctaacagctttttaaagtcacggatagacttcggaatatgataagggacctctcatttcccctcccccatgccctcagccttaggtgtgagtccccccgtcacacggatgggcaaggggagcaggagaaaaggtgatatttacattttctccctacttgatcagcaactaattccacagcgccggacgtgagacacttcctggggatccctgttctccttttgtagtgaccataactgcccccagtcactgcccttgggcgtccctctgttccttccaggtacctcacggcagcaaatctggggatcccaaggtggaaggctggcccagaagtcctttagaaaaaccttaaaaaatacagatcccctcaccatggcctatcgccctgaagccgaaatctagcttttaaatttcctgggggaaacagccttgactagaaacctccctcccgtgggtcagtcttacctgataggtaagaggcagcccagctccggcgcccccgcctccccccggcctcccactcggggctctgtagccgcagtgcccccccgtggccccccaccctcactcctgcgtcttcccgagctcgccccctcccgttttcccagnnnnnnnnnnnnnnnnnnnnnnnnnnnnnnnnnnnnnnnnnnnnnnnnnnnnnnnnnnnnnnnnnnnnnnnnnnnnnnnnnnnnnnnnnnnnnnnnnnnnnnnnnnnnnnnnnnnnnnnnnnnnnnnnnnnnnnnnnnnnnnnnnnnnnnnnnnnnnnnncggagttgtcggtgtccaggcgcgttgtccttatcgctcgccgtggtgctccgcctcttctccagtacgcttggtggccgagagggccgggcgcgcgtcgctcggcccggaatgtagagacccgggcgggacgtcccggcgccgctgcccggctgccgagcgcggaggctccgtcacgtgtttttctcctccgagtgagacagggcggcgcggtcggagggggccggcgcgcagagccagacgccgccgcttgttttggttggggctctcggcaactctccgaggaggaggaggaggagggaggaggggagaagtaactgcagcgcagcgcctcccgaggaacaggcgtcttccccgaacccttcccaaacctcccccatcccctctcgcccttgtcccctcccctcctccccagccgcctggagcgaggggcagggatgagtctgtccctccggccggtccccagctgcagtggctgcccggtatcgtttcgcatggaaaagccactttctccacccgccgagatgggcccggatgggggctgcagaggacgcgcccgcgggcggcggcagcagcagcagcagcagcagcagcaacagcaacagccgcagcgccgcggtctctgcgactgagctggtatttgggcggctggtggcggctgggacggttggggggtgggagcggataacggaggagggagaaccccgtgcaacgttgggacttggcaacccgcctccccctgcccaaggatatttaatttgcctcgggaatcgctgcttccagaggggaactcaggagggaaggcgcgcgcgcgcgcgcgctcctggaggggcaccgcagggacccccgactgtcgcctccctgtgccggactccagccggggcgacgagagatgcatcttcgctccttcctggtggcggcggcggctgagaggagacttggctctcggaggatcggggctgccctcaccccggacgcactgcctccccgccgggcgtgaagcgcccgaaaactccggtcgggctctctcctgggctcagcagctgcgtcctccttcagctgcccctccccggcgcggggggcggcgtggatttcagagtcggggtttctgctgcctccagccctgtttgcatgtgccgggccgcggcgaggagcctccgccccccacccggttgtttttcggagcctccctctgctcagcgttggtggtggcggtggcagcatggcgagccctccggagagcgatggcttctcggacgtgcgcaaggtgggctacctgcgcaaacccaagagcatgcacaaacgcttcttcgtactgcgcgcggccagcgaggctgggggcccggcgcgcctcgagtactacgagaacgagaagaagtggcggcacaagtcgagcgcccccaaacgctcgatcccccttgagagctgcttcaacatcaacaagcgggctgactccaagaacaagcacctggtggctctctacacccgggacgagcactttgccatcgcggcggacagcgaggccgagcaagacagctggtaccaggctctcctacagctgcacaaccgtgctaagggccaccacgacggagctgcggccctcggggcgggaggtggtgggggcagctgcagcggcagctccggccttggtgaggctggggaggacttgagctacggtgacgtgcccccaggacccgcattcaaagaggtctggcaagtgatcctgaagcccaagggcctgggtcagacaaagaacctgattggtatctaccgcctttgcctgaccagcaagaccatcagcttcgtgaagctgaactcggaggcagcggccgtggtgctgcagctgatgaacatcaggcgctgtggccactcggaaaacttcttcttcatcgaggtgggccgttctgccgtgacggggcccggggagttctggatgcaggtggatgactctgtggtggcccagaacatgcacgagaccatcctggaggccatgcgggccatgagtgatgagttccgccctcgcagcaagagccagtcctcgtccaactgctctaaccccatcagcgtccccctgcgccggcaccatctcaacaatcccccgcccagccaggtggggctgacccgccgatcacgcactgagagcatcaccgccacctccccggccagcatggtgggcgggaagccaggctccttccgtgtccgcgcctccagtgacggcgaaggcaccatgtcccgcccagcctcggtggacggcagccctgtgagtcccagcaccaacagaacccacgcccaccggcatcggggcagcgcccggctgcaccccccgctcaaccacagccgctccatccccatgccggcttcccgctgctcgccttcggccaccagcccggtcagtctgtcgtccagtagcaccagtggccatggctccacctcggattgtctcttcccacggcgatctagtgcttcggtgtctggttcccccagcgatggcggtttcatctcctcggatgagtatggctccagtccctgcgatttccggagttccttccgcagtgtcactccggattccctgggccacaccccaccagcccgcggtgaggaggagctaagcaactatatctgcatgggtggcaaggggccctccaccctgaccgcccccaacggtcactacattttgtctcggggtggcaatggccaccgctgcaccccaggaacaggcttgggcacgagtccagccttggctggggatgaagcagccagtgctgcagatctggataatcggttccgaaagagaactcactcggcaggcacatcccctaccattacccaccagaagaccccgtcccagtcctcagtggcttccattgaggagtacacagagatgatgcctgcctacccaccaggaggtggcagtggaggccgactgccgggacacaggcactccgccttcgtgcccacccgctcctacccagaggagggtctggaaatgcaccccttggagcgtcggggggggcaccaccgcccagacagctccaccctccacacggatgatggctacatgcccatgtccccaggggtggccccagtgcccagtggccgaaagggcagtggagactatatgcccatgagccccaagagcgtatctgccccacagcagatcatcaatcccatcagacgccatccccagagagtggaccccaatggctacatgatgatgtcccccagcggtggctgctctcctgacattggaggtggccccagcagcagcagcagcagcagcaacgccgtcccttccgggaccagctatggaaagctgtggacaaacggggtagggggccaccactctcatgtcttgcctcaccccaaacccccagtggagagcagcggtggtaagctcttaccttgcacaggtgactacatgaacatgtcaccagtgggggactccaacaccagcagcccctccgactgctactacggccctgaggacccccagcacaagccagtcctctcctactactcattgccaagatcctttaagcacacccagcgccccggggagccggaggagggtgcccggcatcagcacctccgcctttccactagctctggtcgccttctctatgctgcaacagcagatgattcttcctcttccaccagcagcgacagcctgggtgggggatactgcggggctaggctggagcccagccttccacatccccaccatcaggttctgcagccccatctgcctcgaaaggtggacacagctgctcagaccaatagccgcctggcccggcccacgaggctgtccctgggggatcccaaggccagcaccttacctcgggcccgagagcagcagcagcagcagcagcccttgctgcaccctccagagcccaagagcccgggggaatatgtcaatattgaatttgggagtgatcagtctggctacttgtctggcccggtggctttccacagctcaccttctgtcaggtgtccatcccagctccagccagctcccagagaggaagagactggcactgaggagtacatgaagatggacctggggccgggccggagggcagcctggcaggagagcactggggtcgagatgggcagactgggccctgcacctcccggggctgctagcatttgcaggcctacccgggcagtgcccagcagccggggtgactacatgaccatgcagatgagttgtccccgtcagagctacgtggacacctcgccagctgcccctgtaagctatgctgacatgcgaacaggcattgctgcagaggaggtgagcctgcccagggccaccatggctgctgcctcctcatcctcagcagcctctgcttccccgactgggcctcaaggggcagcagagctggctgcccactcgtccctgctggggggcccacaaggacctgggggcatgagcgccttcacccgggtgaacctcagtcctaaccgcaaccagagtgccaaagtgatccgtgcagacccacaagggtgccggcggaggcatagctccgagactttctcctcaacacccagtgccacccgggtgggcaacacagtgccctttggagcgggggcagcagtagggggcggtggcggtagcagcagcagcagcgaggatgtgaaacgccacagctctgcttcctttgagaatgtgtggctgaggcctggggagcttgggggagcccccaaggagccagccaaactgtgtggggctgctgggggtttggagaatggtcttaactacatagacctggatttggtcaaggacttcaaacagtgccctcaggagtgcacccctgaaccgcagcctcccccacccccaccccctcatcaacccctgggcagcggtgagagcagctccacccgccgctcaagtgaggatttaagcgcctatgccagcatcagtttccagaagcagccagaggaccgtcagtagctcaactggacatcacagcaggtgcgtttcatggtgacaaagtcagaagacaaaactgcttttaaccttgtccttgaattctgttcttcgcctctgccccttcctgttctttcccactgcttcctcagggagaatgcacttacattctcagggcacacaagatgctcaccccacactgacatctggcagagagtcaaacaaacatgtaggagcagccacaggagggctttttcgtttgagaattcccaagtgaagtagttactgcagtatttttaaaacatatatcctatgccagttctgcgttttgtagagttcctccgtaagaagcttgatttgtttgttgaagttttcttttcactatatatttaggtcagcccctggaagggacagttctacaaaaaatatttgttaacacaggggctaaacccttccttatcttaaactatcttaatagtttctgggagcccttaagggtgatcttatcaagttgttctctgtacttttgttctgtgatttcataatactagggcaacataaacagcagcgggaagcattgatttctattcatcctgccctaaaaagatcaggagtaagagctttttagaaatatgtatttagagagaagtacctatctattttgtgatctctcaagaaagtaattatgggtgacgttctccttttgttcatgtaccaggatttgtgaaatattattcacacaccgacccaccatcccacgggcctggcctctcttgtacaggatatgcaggaaactctgtatgtgtctgggacccattattaagagttatgggagttcatcctaggatgtctgccttatagttatctcttcttgcactgagacattacagatatcatttgggggctactatatatcttctgtaaaattacttttatttgttgagaagaatgcatactaagtcaggaacatgccttaatttgttttgttttgcattgagtagaagggctaaactgtataccctccacttttagggttatttgctgtgtgcctttaagttcaaaagtagacaccacagtaaatgctgaaagttggctttaggtcttctgtggctaatgccgtattaaaaatgaaaaacatttgtaataggaaattagcctgcccttcgttctgttgatcctgttttctggtggtcataattgtgggtagaagagagtacagtttgcaaataatgtgatgagttggcaatgcagaagtttccagcatttggaaacactttactctgacaaactgattatcttgtgaattttatctatgctccacagaatgagcttttaaaagcactgatttttcttaatttgtgtccattcataagaaattaatctgtgccctggtttcctattgacaggtatttatttatcatgtgttcatagtcttcttaattctgtttccaatatttgatccatataattctctattttatagaacaagaaaaaggtatatgaacactcaaatgaagattttgggtgatatgttacaaaaagcatttatttgatcagtatttacttcaacatttattttcatcattcactagaagaaagatttaattgtgtatatcaacatcagtagtacaaatcttgttatatcaaatgatgtttttgggagtcagaatccctcaacactttaagcatttgtattataaagtgcctcattggtaaaataatgagaatttgaagaaaaccagcccagcagaactaaaattttggttttaaaggagataaagagaataagtttttcttacttgtcatcttaatttgtttaggtttctttttatagagtagaataaatgatgtttgctctgaagagaattgatgaccaactagaattttcatttttaaaaagggctttaaaataaaattctcctatgtgttggatgcattaaaaaaacaaaaactctacaaaattctatccttaaccttctttgggaaaataaaatattctggaataatcatataatcctatttctaataattctggagtaacaatcgaccatgctttgcacagtgccaggaaaattctacaatgcgtatttgagatgtttgtgttggtgtttaaagtgaggcaccaaatgctacctggcacatttacatcctcaattctgcttgcttgcctgtgccctgttgagtccaaagatgttattctatagctatctgaaacagacagaagtcagacctgtgagtggcaaacagcttctgctccgaatgtgtgtgcaaacattattttcctcacttcctcagcaattgctgtctttgcttcttttcctcatttctcaggtaaaacctgagactcggtgaaaggaatagaggtatgatgaggcgtgggctctgttgaaacatctcggcttgtttaaaatttttcattgtctgttaagaggagaacacttgtgaagcactgagctcaggagctctacttgttggaagcctgtctgctttacctgtagtccagtgaccttttctgcctgccctttctcttgcatagcctcttagttctggcttgctcgttttctagtactatcccctgccatccctttgtttccacctcttatttcatgttcctgacattatcctttttttcttttgctccttttcagaatttcgcagtacttgtggcccactctctgcagagagtaaattgagagcccaagaagcagggcaaaaagagcctctcagactcggtcatagcagccctgccacctttacctggcatcaaatttatcttttagttttgaaactgcagctgacaaagacacagaccccagccatgccttttgggttcagtttttttgtttttgtcattctttgttatgccctccccctttaaaagaaaaaagaaaaagaaaaaaaacagaaaaagactctttccatttctttttcattcagtttccttttttgtgatgtcaaggattccgtacctccaaggttgcctcccctccctcccctttccccagccctgtggcctttttggctggcgcaaaccctctcggccctggcactttcccttttccgggtcacctccgcttcctgcattccttctcctccctcttccgagccccctttcgcccggggtgggggaatctgcagccagaccgccctcgggtctcccgcccccgcccgtctcgggtcatccagggcggtggggccccttcccgggccgcgtggtcggcgctggcgggcgaggccccgccctcgggcacagcgcgcggctctgggtcccgggcgggcggggcggttgggcgctgattggcccccaccacagccaatcagcatgtgaaacggctgagcgcggcgggcgcggggcggggctctccgcgggtccactggcggtggtggcgggcgggcgtccctgggccgctttctgccaccctgcctggcacctctttcccgcgggtgaccgcagccgaagcgcagcccccctctgcaccgcgcccgccgactgaggacgttgtgccctcagctgtattcttgcatttggatcagaatcctaagaatgaaaaagtccaaccagcccacggacgggggccggaaacacacacttgctcttatttttaattgagaaaaatccaggccgtaaccatgtgacgagccccattttgtttcccttctctctttactacggtttactacgaggccacgttccttcgtcttccggtctcgagatccgcgagcaggagggagtcccgcacgtggctgcgggcctgcgggccaggtggggttggcccgcgattcctgcccgcccccctcaaccaagggagggagagagacctgcgagtgctgcggatgccatcgttttgggtcatggggggagggggaattcctttggcttgaaagtgccctaggctccatacactttactgcaaagcaccagagctaggtaagagctgggaaaacgcatcctcctgggctgtgagggagctcacagcgaaatgaaagacgggactgcagcttgcagatcctgagaacccggtgtgacaagggtttgggtagtgtgttccttaaaggcttggaggaaatgctgtggcgttctcagacacagattcatttttccatcattgacagtcccagtgacagcccgtcaatttaggctgggcacatcgattttgaaagcttgctagatttgtgttgtgtaccctccagtaaccaaaattatgtgagatatattactacatgggatggaaaatgtgttcagatttggcctttctaaaataaggaaaataagaaagaaaagtgctatgggagtattttctcctcctcctccttccctctcaaataagcatttctcaccagccaacatccctcttgcatcactgaatcataagatcccagggcagcgctttttctgaggggccaagtgaaacatcacaggtggaaacgtaccaagcaggtgcaaatgttatgacccaaaactgctactgagcagtgggagagagtttctctgttgttccagaaaagtttgagcagctaataatttgcttaatgtttgcaattgtttaggtatctttttatagtaaaaataaatccataaaatgttgcatatattgtagtcatttctctgagttccccctcaataaatactatctccagcattgccctacaggaagagacttgggatccaaagggcatgccaccttttttttttttttaaatcacaattccaggaaaatagctttgtgctatcttaaatgatgcaatggaaaaagcagttcttgggagccagagatcttgggctccaacacagcctgtgcccttcactagcagagtgaccttgggcaagtcacttaatttctctggacctatttcttcatcagtaacttgaggattttgttctaaatta

SEQ ID NO: 159 - DNA, 119226 bp, Human
  misc_feature (1)...(119226): n = A,T,C or G
tggtttcttggcaggggggtttgatgggttcccagacctaggagttcttggcgcctcgtcttccagtgaccccaccagggctgctctttctcctccattgctgaaactagttcagggttggggaggagggcacgtgggggggcctggtggttggttttgtgctgagtcattgccttggtgcactgtggaaggaagctctgggaggtggacggctccttctgtgagggagtgcttctgtcgtcaagggagtactgcatagggtgaataacacagttatgtagatatatatggtggtcttacccccagggcctccacaactcctggatgggcctagcctaagcaattctgatttaacttattgcccctccttttagcaatactgttgagttaaataacagtttttgcattgaaaataaaaaaattttatttttgtagagatggggatcttggtatgttgcccaggctggcctgaaactgctggcttcaagtgatcctctggccttcgcctcccaaagtgctgggatacaggcacgagccactggccaggtctttattttttgcattttgcaaggacattttaagtcactttcttccttttctgtttttactcctgctgaggagatgatccccattttacaaaatggacaaaacattctccccagggaagggaagagtagacatttgagaataattgttttcacagaaccgggaaaccacctattttgtcccaagtatactgattgatgcattagcaataactcactatctgctttgccagaggtttgaacaatgagtgttaatgcttggtgtagtgaattttgtgtgatttcgaatctgatagctgactcattgcacagctctgtcttgcgagttcagatctgaactgtagctctaagaggtaaaagcagaagtggagctgcctttcatgccatagctagttttttaataaaatagagttaaaaaatcctttggcttttcagcattttggtgtgattggaaaggctattactatcttatattcagcatgagtcttgagcaattactgattaatatggtttggctgtgtctccacccaaatctcagcttgtagttcccataatccccatgtgttgtgggagggacctggtgggaggcaattgaatcatgggggcggttacccttatgctgttctcgtggtcatgagtgagttctcacgagatctgatggttttataaggggctttttccccttttgctccgcacttctccttgctgaaaaagaatgtgtttgcttccccttctgtcacgattgtaagtttcttgaggcctccctagccatgcttaactatgagtcaattaaacctctttcctttataaattacccagtcttgagtatgtctttattagcagtgtgagaacagactaatacactgatctgagttgatattcttaaattaatggtaagatatttcttttttttttttctttggagacagagtctcgcactgttgaccgagctggagtgcagtggcacgatctcggctcactgcaacctccgtctcccaggttgaagcagttctcctgcctcaccctcctaggtagctgtaattataggcgtgtgccaccacgcccagctaatttttgtatttttagtagagatggggtttcattatgttggccaggctggtcttgaacgcctgacctcgtgatccacccacctcggcctcccaaagtgctgggattacagacgtgagccaccatgcccagccagatacttctattttgataatctttgagtcctgaggtagcttcagaatggattgaaccacagacagatggtgttagtagtttctgccctggcttctttgcaacttaacatacttgactttttagtgtttttggctaaggaaagtgtattttctagtttgtggcagttttaagcaaatgtggcttgaataaaactagagagaagtttaatttttgataaatcagtgacattgacaagttgtttttcttcctttccagttatacatgggaagctgttgataccaaaaataatgtactttataaaatcaacatctgtggaagtgtggatattgtccagtgcgggccatcaagtgctgtttgtatgcacgacttgaagacacgcacttatcattcagtgggtaagtagaactacctgaaattactggattggcaatatgattccccaattttgcaaaaatgactgtgtatagctatacgtatatagcgatacaaaaattttgaatgtttagaaatcataagtgtttataatacataatacacatttgttagtagttaaaaatgctaacggtttgaatgtctagtatgagctaaaactaggttggttctgtctagtggatactatacagacagctgttatgaagaattatgtagatgtgtatttgatattgaaagctgtctcctagatggctctcccttctcacccacacttttcttaaaccctgtttttacattctcccccagcccacatttccttttagtgctcccccgactcccattcctttgtaccttccagctttggctgtagttcccagacagtgtttctgctgtcaaagatggtcactggagttaggcttacattaaaggttaaataaatagtcctgaggattggcagtctcagagaaagaggtgcagccccttctttcctagggttcgtttcattccccaaatgtatgccttttgggtcaggatcgctatccttctgtgaagaatatgaatccaagtggattaatatatcagcaccaggttacatagagtggagtcagggcagatgcctgaaggaagggaggcagggcagacagaaaagcagaatgcattgcccttggatttggcaacatggatgtccgtggtgacctttcactaaggcagttagaataatgaggtttgaccacaatggatgctcgtgacatagagatggtatatgactagggactgtctgataactagaagaagatgctaggtgggcttttggatttgggagagaagcttactgtggtagctctgtcattttcttttgtgttttaaacattttaatatttttatagatttggcagttcaagtgcagtttgttacatggatatattgcatagttgtaaatctgggtttttaatacccgtcacccgaatagtgtacattatacccagtagataatttctaattcctcaccccccaacctttctgagtctccagtgtctgttattccactgtccgtgtccatgtgtacctattatttagtttctacttataagtgagaacatgtggtatttggtgttctctttctgagttattttacttaggataatgtgctattgttcaattcatgttgctgcaaaacatgtgatttcattcttttttatggccaacatgtggaatttgtccatagaaaagaatgaaatcacacacacacacacacacacacacacacacacaaacacacaccacattttttgttatccagtcatccattgatggacacttaggtttattccatatctttgcaattatggatagtgctgtgataaacatatgagtgcaggtgtctttctgatgatttttttccttcaagtatatattcagtagtgggattgctggatggaatggtagttctatttttagttccttgatagatctctatactgttttccatagaggacatcctaatttacattcccaccagtgtatgtaagcattcccgtttttctacgttcttgccaacatcttttgctttttgactttttaataattgccattccagtgggtataagatggtgtctcatggttttaatttgcctttctctgatgattagggatgtggaacatttttacatatgcttgttggccatttgtatgtctttagagaaatgtctgttcatgtcctttgccctctttttaaaggggttctttttttctttttgaattgtttgagttccttgtagattctggatgttagtcctttgtcagatgcacagtttgcaaatattttcacccattctgtaggttttctgtttactctgctgtgcagaagctttttagtttaattaaatcttacttggctatttttgttttgttgcatttgcttttgaggttttagttatgaaatctttgtctaggccaatgtccaggagagtgtttcctgggttttgttctagaatattcatagtttcagatcttacatttaagtctccaacttttgtatatggtgagagatagggttctagtttcattcttctgcatgtggctgtccagttttcccagcaccgtttattgaatagggtgtcccttcgccagtgttatgtttttgtcaactttgtcaaagatcagttggttttaagtatgtggccctgactctgggttctctattctgttccattgatctgtgtgcctatttttatatcagtaccatgctgtttgattactatagccttcaggtataatttgaagtcaggtaacatgatgcctccagctttgttctttttgtttaggattgcttttgctattcaggctttggctactcatatggttccatatgaattttaggattgtttttctaattctgtgaaaaatgacattggtactttgataagaattgcactgaatctgcagattgctttgggcattatggtcatgttaacaatactaattcttctaggccatgatttttgcatctgtgttcattagggatattggcctatagttttccttttttgttgtgtccttgccttgctttggtgttagggtgttactggcttcatagaacaagttagggaggattccctccaacttgatttttttttttttttttttttttttcagggagtagtctcagtgggattggtaccagttctttgtacctttggtagaatttggctctcaatctgtctggtcctgtgctttttcttgggagatttttaaagtactgattcaatctcactcctttttactggtcttttcaggatttctgtttcttccgattcaatcttgggaggttgtatgtttccaggaatgtatccatttcctctaggttttctagtttttgagtgtagagatgtttatagtagcctctgatgatcttttgtctttccatagtatcaatgtctactttttcatttctgattgtgcttatttgaattgtgtctcttctttttttggttaatttgagtagtagtccattgattatgttcatcttttcaaagaaccaactttgttttgttgatcctttgcattttttggggggggtctcaatttcgtttagttctgctctgatttttgttatttcttctgttaggtttcaatttggtttgttcttttttttttctagtgccatgagggttacattaggtcattaatttgtgatctttatttttgatgtaggcatttagtgctataaacttccctcttaccgctgctttgctgtatcccagaggttttggtccattgtgtctctatttatattcatttcaaaaaatttttacatttcatcctaactttgtcattgacccaaaggttattcaggagcaggttgtttaatgttcatgtatttgtgtagttttgagagttctcctcttggaattgatttctagttttattccgctgtgatctggaaagatagttgatatgatttcagtttttaaaaatgtactgagactgttctgtggcctaacatatggtctaccctggagactgttccatgtgctaagaggaatgtatgtcctgtggttgttgggtagaatgatctttaaatgtcttttaggtccatttaatcctgagtccaatttaagttcagtgttttattgttgattttctgtgtcgatgatctttctagtgcttgtagtgaggtgttgaagtctctcattattattacattgctgtctgtctcctcttaggtctagtggtaatgattttatgaatctgagtgctttggtgtggggtgcatttgtatttaggatggttatatcttgttgaattgatcccgttatcattatttaatggtcttttttttttcttttttaactattattgacttaaaagtctcttttatctaaatgttgcttctcccgctcacttttggtttctatttgcatggaatatcttttcctacctatttaccttgagtctttgtttttaccagttaggtggttttctgtaagcaacatatggttggatcatttttttttttaaatctagttcaccaatctatatcttttatgtaaaggatttaattcatttatgttcagagttaatattgatatgtgaggttttgttcctgtcatagtgttaattgttaactagttgctttttagtgtcaattgtataattattttataagatgtgagttttataccttttgtctgactgggttaattcaaacctgtctttaagctattagattctcttttctgctggtctagtctgctgttcaagctttcaactgtattttgtaattcctacaatgaatttttcatttctggaatttctgtctggttttctaaaaaatagctttctctagtaaaattttaatttagatcctatatttttccgatttctttgtgttggttttttgactttctcttggatcttattgcgcttctttaaaatcaatattttgaattccttagctggtatttcaaggatttcattttctttagggtccactgctggagagttagtgtgagtctttggggatgttgcagcgctcttttttttttttttttttttaatacttctagagttgttactctgtttcattctcatctggataaactatctcttctttatttttgaatttactttggcaggatttttttttttcccttgagaatgtgaatataacgtatgttgtatatagttgtttgacttcagttctgggtactttcagtgacagagactctgagtttcttggttatagttggcctttttgtggtagctttctcaaatgctagtgatagtaatgatgtgcttgggtgtgtgagcagcatcctcaccgtctcccgcggggcctggaaggcagagttctcaggaagttattttgttctcccttgctttgcactttggcagcagaatttatattgggttgtgcaggccagcaggtggtatttatgggtaaaaaccagctgcagtggaatccgatgggtgggtctatgagtctctgtgcttgacctttgtttaatgggggaagctctgttgcttcaggcagtggagtggtctgtggaatgcacagtggcctgagctacctgctcagcccctgagtgggggacaaagctggacagaactgaactgccagttcttctcttggatactccagtggctcaagcaccagccctaacaggggtagcaggggtagctgtgtagaaggtgccaaggtgtctgcggggaggtgtgggggttgctccagctccatggcctgggcaggtgggagcacaatctgcctccctgtcacaccccgtcctggcgctgggaatattcagaacatgagaatatcgctgtctgtctcaggctgcagtgtagtgagtgctacgagagacacctgtccatggcttaccaccaatgtgtcttctgtagtgagcctcctccctcaacccaaagcacacacatttgtagctctcctgctctttgccgcaggaatgctgtgggtccgtgtagagagggtgaggccccacctttcgtgcaagtcctggctcagtggaagtcgtgcaagtccactgccagtggaaatgcagcttcccctaacagccacagaatggccactgtcctgtgtgcctgtgccaacctgtgggagcagccatgactgtgcccacagcagtgggtagagggtgggggaggagaagtcctactacccacatccgtgcccaagcactgagaccacctggctcctgggctggaagcatactcctcccttgcagggctgagtacagcacccctgtctccactgcatgtggcacaggccacaagccatgctcctgggcacaggaaagtgcatgctcctttgtcccaaggagtgcccccttggcatgctgtactctttcttcccttaggagcagcactccctgagggtagatctctgggaaccctgcagctcccctgggtccagccagccctgtgtggctgctgcagtctcagcaggtgccaagaaaggtctgcagggcctctggtgatacggagacatcagtgctgagcttccccaggcagtcctcccactgctgccgccactgccacccaggtccagtggagggtgagcaacctggcataagtggtagtctgatgtaatgccctcaggaagtccccaaattgctgcccgcaccagtgtttgggtttgtgagggcagaaaagctctcccacagttcgggtaccagcagtcgaccacagaggtgaggggcagcaacagcattcccgccacccctttcaaaggaataccaagtccctcagggctcctagccgctctctgcccctctcgtttcctgctttttattttttgccctcgtttcatcccaggggttctccaccaggctccagtgctctccacttgatactccattctggcgacggttgctcacctgtaacttgggttcttctgagaaccggcctctggcaactctgttcagctgtcttgaaacaaaagaaacccccacttgtcattttgcatggaaattgctaaacacagttaaaagagctttgtagaaagcagtgtttagagtacgaagataagggagtgcgaggtctgctgattgaggcccagctcctgtttgatttccctctctctctacaaagagaccatccagactgaaaaacctggtgagagggatttgaggcctgggattgagatctgagaaagcactagattgttgtgaattcttgggtctgacattatccttggtgatatacttaggaaacttacaggtgagatggccagtttactcattgtgctcttttgagaactcacagagaaaggccacaagtaattctgttggccagtgttatgtaggtgttcagaaagaaggaaaagtagctttcttcttgattttattataatacttcaatatttttggctaatgaaagtatgtcttgagtttatggtagtatagtatggtatggtatagtgtaataccacatagactgatgccagatggaggcaacttacttgaaggataatttgtgagcttggcctcactggacaaagtttgagtttgaccaagttctgtggaccttgaaagccagggaggagaagagttgttatttttttgtagggagtggatccattacagatcttttgtgatggtaacggggaggtgatgtgatggaaggtgtttttaggaagctggccccgtggaataggaaacgatgcctacaggggagataccaaagataactagatgactaaaaagtaacttacaggttaagatgatgatgatactattataaaccagcagtttccaatctcattttttcccccagatatgtgtgacagatccctttcccagagcttgaaacttcccagagggagtcatcatatatactttcaggactctcagtaacggctccctttcttcaactggagagagcagtttgtatgagtcaatgagagtgacattcacagtagcatagggataatcccgaatcaaatctaatttgcatatacaataaaaatacctaannnnnnnnnnnnnnnnnnnnnnnnnnnnnnnnnnnnnnnnnnnnnnnnnnnnnnnnnnnnnnnnnnnnnnnnnnnnnaagcgcaaaatggatctgtgttctacagtgggcaggtctgtgcaaatctgcccccgaagtccaaggaagttgagaggctgaagaaggaggctgacacccagtttctcagaaagaaacatttaatacggacttatgaatagaagccacatctcaagaagtcacgagatgggatggatccctctgccatcacccactccagacccagggatcatacaccatagggaaggggtggttcagaaggaatgtgtaggacaattgaagtaggttttttgacctaaggggaggattcgtgataattacctgctcttacacaaggaacagtagataaactggaaatcttggaggccttcctggaactggggttaatcggaagtcagcagggctgtttggcctccagaatggcgttactttagcctccacaatgagcaccttgctggaggtggtgtggttatggatttgaatgtggacagccggctccagagcctgtgtactcactcagggctgtgcttttgtgtgagtcatggggtcacatcagacagattggagctgaaatggagaccaggatgggagatctgaatgtgtggctctgagaggacatctgagaacgaacttcttttgatcttgttagaaaggaaaaaatgtgaaccttcaaaacaaccacaagaactggagctccccgcagatcagaggaacagaagagctagcatagaaatagatccaaatatgtatgggaacttaagataacttacaaccaaaaaattgggtgtaagtagctattgtctcttacgaaacaaagttcaatccctcctttagatcacatactgaaattacagctcagttaagatttgaaagtaaaaagacaatagaacattggaaaaaaaattagtaacatatagatataatctagaagagccttccttaaggaatcctggaagccatacaggagaagaggaacatttcttattacataccttttaatgactaaaaggtgttctaaagacaaaagacatacactagactgggaaaaacatttccagcatgtttgccaatgtactattaggatgagagcttttcttaaaaattggtaagaaagacagacacccaggagaaaaatggcaaagtcaaagaacaggtaattcacaaaagaagaaatccagatgctcaatacaacttcactaataagccaggtggattagtcctttctcacattgctgtaaagaactacctgatacttggtaatttatgaaggagagaggttggattcacagttctgaaggctgtgtaggaagcatggctggggaggcctcaggaaacttaaaatcatggcagcaggtgaaggggaagcaggcagcttcttcacatggtgacaggagaggagtggggcggtgctacacactttcaaacaagcacatctagtgagaactcttatcacgagacagcacttggggatggtgctacaccattggaaaccagccccgtgatccagttacctcccaccaggccccacctccaacactcgggatcacaattcatcatgagatttgggtggcgagacagagctaagccgcatcaccaggtataaatgcaaatcagagcaattatgagatctcatttttctttgagaagttggcagaaatttaaatggttgaatcatagagtgctggcaaggagcctggaaatgggcacatttatttatacgttgctgtaggaagacggttgtctctaaatccttttgggaagataatagttggtgtgaggttgtttttttttttttttttttttttttgagacagaatcttgctctgttgcccaggccggagtgcagtggcgccatcttggctcactgcatcctccgccccctgggtttaagcgattctcctgcttcagcctcctgagtagcttggattacgggcaccaccatgtccggctaattttttttttgtatttttagtagagatggggtttcaccatgttggccaggctggtcttgaactcctgacctcaagtgatccacccgccttggccccccaaagtgctgggattacaggtgtgagccaccacgcctggcctggtatgagttttaaagtgccctgaagcaggggtcctcaacccccgggccacagactggtagcggtttgtagcctgttaggagctgggctgcacagcaggaggtgagtggtgggtgacagagtgaagcttcgtctgtatttacagccgctccccattgcttgcactactgcctgagctctgcatcctgttagataagtggcagcagtagatgcttataggagcgcgaaccctattgtgaactgcacatgcaagggatctaggttgtgaccccttatgagaatctagtgcctgatgatttgtcagtgtctcccatcacccccagatgggaccatctagttgcatgaaaacaagctcggggcttccactgattctgcactgtggtgtgttgtataattatttcaattacatattacaatgtaataataatagaaataaagggtacaataaatgtaatatgcttgaatcatcccgaaaccatcccacccccagtccaagtccatggaaaaactgtctttcatgaaaccagtctctggtgccaacaaggttgggggctgctgccctaaaattttttatagtgagaaacaaatattaagacctcaatgctggtttaaacaatattacattattttaaattgaggaatcatacattatccacacatccaaggagctcagaagaaattaaaaaaatcatacattagtttttccttaggcaaacaatattacatatgtgaatcttagcaaatgttagccatcattttcatagggcctgtgaacaatatttggtcccatttgcaacctaattattttcacattttaaagtggtttatacattttatatgcatttgacccttgaacaacgctagagttaggggcaccaaccccctgcacagttgaaaatccacatttaacatttcactccctctaaccttagctgctaatagcctgctgttgatgggaagctttaccagaaacataaatagtcgatcaacacatattttgcatgttatatgtattaagtactatattcttacaataaagtaagctaaaggaaagaaaatattaagaaaatcaggccgggtgtggtggctcacacctgtaatcacagcactttgggaggctgaggtgggaggatcacttgagcccagaagtttgagaccagcttggacaacatagtggaaccccatctctgcaaaaaataaaaaaattagccaggcatggtggtgcatgcctgtagtcccaactacttgggaggctgaggcaggaggattgcttgagcccaggaggtggaggcctcaatgagctgtaatcaggccactgtactcctgcctaggtaagagagtagtgagagcttgtctcaggaaaaaacaaatgataaggaagagaaaattatgtttattattcattgagcggcagtggatcatcatataaagatcttcgtccttattgtcttcatgttgcgtaggctgagtaggaggaggaagaggagggactggtcttgttgttctggggttaccgaggtgaaagaaaatctgtgtataagtggacctgggaagttcagacctttgcagttcaactgcatttgatttccttttcaagtacctcagatgtctggcttaacagttaaaatttcagtgtaacaataattataaatttatgagtattattatttaataattcttatatatttactagttatgctaaaattctaaaatttctaattctaaaattctcttaaatgttctaatactgtgtcgtaagtctgaattaattgctgagttataaactttggattggagttatattaaacattgcagtaaaaataccaaatacattcacatttttttctaacacatcaaatattaatattatgattttaattaatcttctgaggattacagctctatatccatttcaggaagcctgttaccagcccatttaacttgaggtaatgtactcactaaggaacagtgttaattgaggttacctctggagcctggaattctgtttggcttcttgttggtgacctggtaggacacagtgagtccgactgtagttgccgtcccaggtgattcatttactttaaagagcctggcccctgacttccagtgatttgatagtgtctgattcttgtatgcactcacagaaatctacagcaggcactggattgatcattggattgtatctttcatctctttgactcataagatgtgaaaatgccttttcctcttaagtcttttattttcttaaaacctagaattctgttggatatttaagatgatacctggttgagttttggatacaactcatgtttttatctgatttatggtctctcctgatagtctggcaatacctgttaacattttaaaacgtatattcacataatcttttgtgactcaaacggatagaagaagtagtactatatgtagatatttgtacaaaaggtttttggtagcattgtttattgtggcaaatatgctggaacaatctactgtgtgggtatggttcaataatttatagtgtattttcttcttatttacttggttaaatcatctaaaattatatgtgtacattatattaaaacatagccaacagttaatgtttatttataataactatttgactatcagtcatatgtaggcaccggtttaggtactggaattgaatcagtcactacaacaggcaagaatctctttttttcatggagcttacattttagtagggtgggagacagatgaaaaaagcaatggctaagtagtatgttaaactgtgatgactgctacagaaaaggaaaggaagggtaatcaggagtactgggggctcgggtgtgtgtgtgaggatattaaatagggtaagtgtcactgagaatgtgacacgtaagtaaagaccttgagttgagggagtgagctgtgtgtctctctgggggaacagccagttcaggggacaagaagggtagccaaggagtgtgttggtggtagcaagaaaataaaaatcttttaaaaagagtatccatataaatagagaagctggaggttaaaaaattggatgagtatttttttttttaatttggcaaaatagcgtgaatagtatatgttgaaggaaacgctaagtgggtggtgcaggggagagaggaagacttgcttgagcacatcgggaagtaggacaggaagggttctctgtttgccttgtaggttctaattgccatggcaataatataattgctgtggccgctgcggtaggcaggagggctgcctgtgaagtcaggatcaccaggctttgtggcttcaaggaggccaaatcaccatgggcttgcttgggcttggaggtgcgacctggtgggcctgcagaatgcgacttggtggcctgactgagcagcacgtgagggcctggtgcagcctggcatggtggtacccttgagagcgtggcctagagggctccgaggtgcagcctggccagtgtggtctggaggggtctggcaagcgctatctggagcactcagaggtgtggcctgtttttccgggtgggtctagtgagtgtagcttggagtgctgggtggtgtggcctggctggcaccgaggtccctgcggattctggagaacctcaaggtgcggccccgggggtgtggccaagtgtggtgtgtggagggcccttgtgtgcagcctggtggttcctgtgagcatggtttggagggcctggtgaatgtgtcctggtaggcctggtgagtgtgtgagcatggcctagagtgtcaccaaaccaaagtggacccgcctgcctgtgcaccagggaaagccaaacaccaaagcgcagggtttttgctggagagagtggactgcactgcgacgagacaggaggaaaggtcaaacctgtctccccaagctggcggctgggtcgggttttataagcataagcttattaccataaggtaatgaggtgtgttctgattggatcttgcaattagatgacaccagggctctatctgattggatcctggatcttgccatgtggtgtgcgcttcttatttcagtcccgctcctcagtccagcgcttaggttcctcccgtgttgcaagcttggttcatctgtgcaggctccggtgacatgatgtcgaactgggagccatggcagctgaaaaacaacgaacagctttgtacataaaagatgatacagcttggtctaatgtggttctaaggaggctctgccggcgagtcttaggggttccggcgggcagccgcgtgaacctggagcttggggtctgcagtgctgggaggccgaggcctggcatgttggggacaggtcttgggagctgactgggggcctggcgtggtggcggcagcccgcagtccctgcctggcccttgtctgggaggccgcggttctctgcggcctctcgccggtgtcgcccttggccactgggctgcgaggaagccggcgaggagtgggtgtgcgccccgcccggctctaccggcgagggatgcagtggccgccagcgtggccgtgcggctgggtcactcccttcccgcttccagggcctttttctgcctccttttcaggacgtgacccgcacattatgagggacccgtaggggctcttgacacagaggggtcaccctatgtgtgaacaggttacgaggttgggggcttggcttctgaacttgccaggaaacaccgcatcccttttcctgcagcggccgccccccatcccccacccgccccattctctcccctccccaactgcagccttccgcgcctccttggcccctcgagcctccctgggtcccctgcacctccccatgtcccccacgactcctaggcctctcgcgcttccccaggaccccgcgcatcctgggcctcttgcgcctccccggtcctcagcgcctcctcggccgccgtgcctccccgcaccttttgcgcctcatggggctcccggtgccttctgcccgccgcctcgccgcgcccctcgcctcctcatgcccctccgcgccccatacctccccacccctgtgcctctctgcctatcccctgtaccacccggcatcctccgtgccccatgcgcctcacccctcacgcctccctgtaccctgcatgccccgtgtgcctgctgtgccccacgcgcctcccccctcgcgcctccctgtaccctgcatgccctgtgcgcctgctgcgccccacgcgcctcccccctcgcgcctccccccttcgcgcctccctgtaccctgcataccccgtgagcctgctgcgccccatgcgccttccgcgtctccagccctcatgcgcctccagctgcgcatctccctaggcgggtacctcagcaccgctgagcccacccccgcccctgctcagtgcctcccagacacgcccactgcgggcgggacagtgggagctgtccaggcgcggagctgtccaggcgcgggagctgtccaggcgcgggagctgtccacgaggcactgaccttggtttcagagcctctgcagggcttctgtgtccttttggctgagccgactgggcaaaagttttagaaaagaccctgggtgttgcagatggagaaggatgatcgtggctgacttttgcttgcaggcagaagaaccacggggccatcagcctggtgctgtgggggcgcgctgactcgtggtccgcccctgccccaagacttcaggtgtatatgggattggatcagctatcatcccgagctcatggcacgtacagtgagccatgtgttaatccatagactaacctttttccttttaaaaaattagttgttttgtataatgtagcgagcactgtttccaacaaaaatctaggatcttggcagtaaccactacctgttttactctttcctctttcacttttcgctaggagtaatcattagctcccatcttgtattaatttttttttttttttactgtatctaatttccaaaaaaaaaaaatctgtgtgtttgcaactaagttatcttcctatgtgtaactttttgggacttaagtgataacagtaatattactaaaaatcaaccgtattgttgtttttcactgtggtttattccttctgactgctgtgatattttgtgtggatctgctgaagttaatttatccactcttctgttgatgggcctttggtcatttccaggtttttgctcttctgaagagcatgagatattctttcacattttctgctgtgcatgttccatatgtgcatggttttctcttttatatagacctgagtggagtaactaggtcatagggcacacgaatgttcaattttaggacataatgtcctgctgacttacatagttgttgaaccagttaacatttcactagcaatacaggagagctctgagccacctcatggctgacacttggtatttaatttttgccagagggatggttgtaaatggtataccattttggtcttgatttgaaattccttgatcaccagtaacattgaacatgtcttaacatatttattgatgtacatttttctttgatttgcttgatcatgtcttgttcattttatattgggttattgtgtgtgacctagattagaattttttcttttcattggatattaagatccaccattgtgtggctaggagtgggtttttccttctctctcctttccagcatggtgtgtgctttctcagtcagaggtaattcatcgtcctttatttcctggaattatacagacattcttttcttgtttgtttgcatgtgaatgtgtatgtagagattcttgatgctggttctttgccagttctgtgtttttcctagtttataacttacttccgttttctttaagctgttttttgatgagtataaactcttaaattgaataggtcaacctcattaatctttttgagtcttaagaaatctttctctatcttaagatttctgccaagttttgaagtttggattttgatgtttacatctttaatccatttagacaggggtgtccaatcttttggcttccctaggccacattggaagaataattatctttggccacctaaaatacactaatactcatgatacttaatgatctaaaaaaaatcacaaaaaagatctcataatgttttaagaaagtttacaagtttgtgttgggctgcattcaaagccattctgggctgtatgtggcccatgggccacgggttggacaagcttgtgtttagagttgatttttgtacccagtactgggtagggatccaattttgtctttttccatatggaaaactattttgtttccagttccgtttttatttccagttctgtttattgaacagcctcctcttttccctgacctattacttctgtcataatcaaagtttaattcacatttgtgtctctgtgctctctcttctagtcgattggtctctattctagtcttttgatcagtttattcctatgccaacccccatcatgttgatttttacatagactttttattctggactgttacagtaatgtcctggacaagcagagatgtggtcattctacttgtgggcctttctagagaatgttgattttgtagcatatgtgatgggaagtattgaaacatttcagtggctgagttatatatcctgatttgtatttttgaagatcacactggtgcaagatggatgaggaagtggggctggcgagggatgagactagtgtggaggcagggggagcagttaggtggccattgctggagcgcaggtagtggttttagcgggagtagaggtggagaaatgtggacagatttgagatgggcgtatagctgtggacctttctgatgtatagaatgcagcagacaaggtaaagatggcacttaatgtaatgtaatggggatgccactctgagatggaaaattctgggaaaggacagttttataaatttataagctatcagatacattataatgctacttttaatttgcttttccttggaaatagctgtttggttatgtatgttttatagcctgttcactctcttttctctccaaataggtgactctgttttgagaagtgcaaccagatctctcctggaattcaacacaacagtgagctgtgaccagcaaggcacaaatcacagagtccagagcagcattgccttcctgtgtgggaaaaccctggtgagtccacacaggcacttgatgtatttctttaaaaaaaaaaaggtctgccccttggtgttctggctgtagaggtattccaggaagaatcagtgagcaaacttagaaacacaaataagaaaaaccctaccaaatgaccatcatcatcaagaaccaataagtaaacaaattctaaacttgttacaacttttaagtaaaacatagaccatgtcttttgtaaaactacaattcaaagtgattactgtgttaaaaatcagtgcactgtttaatgtttaagttataggcatactttttttttctctaaaacctcttcttctagcatttcattttgataggttttagggcagcatatttagttttttaaaaaatatttttctttcctcatttatattaaattagagatacccacatctatttaggagaagccttggcccgtgggtatggggttctcaagttttttggatattacctggtgtttaaaggggacataattgtgtaaattattatgattgttcttattatgggcatattgtatgtaatttgttgattttaatctttagtttttggaaaggaacttgcagtaaataattgttttagctcttgggagaaggaattggtatacaaattctatgaatgttcttgaatcccagtaagaacccaatctttaggaaagtcaggttgagtgaaactctgtggctactaaattgctttaaaatatcattttagaatttgggactgtgactattgcatcttcaggtccacagtgtcttatctgaagaactttgaaaataaaactaatattgttaattttggatccgcatataaattgcatcgttgtgcatattgagacccaaaaaagaatctgttcgcagcagcattaaatgagatttatattacagaataaaatatatagctcctgttttaacttcagctaatttcctttatgaattctgtgttcaccataccagaaatagaactgtgaaggataactccctagacttgcacgtgggagtgaagaggccagttcctgctgtgcttgtgtcatcctgcgatgctggggttgacctgtttgtagtccactctggttgcggttaacaggaggggctgccttggagggttggcgtctggtgggtgtactaacttggtcagatgcagatgggctcctcatgggagccttttcacgggaagcatgaggtcacgttttctggctttcgtttgctggcatttgcttaagagaacatttggagtttgagaggagaatgactgaggatttcttcccatgaactcactcaatgtacttgcacagctggggcggtagaattcctttggattagttacacaaaatcccaacatgattttatgaagctttggtctcagaatttgcagatttgggaacctcttgatgaccccgtttaactaaagcggttgcatcccctgcccttcttgctgctgctttctttattttagtagcctttactgcattctcattttaaagaagaatctttacaatgtgtggtatggtaacattataattactatttttttttaatagggaactcctgaatttgtaactgcaacagaatgtgtgcactactttgagtggaggaccactgcagcctgcaagaaagacatatttaaagcaaataaggaggtaacatgggaacttcaaattacatgcttatgaagtatactctggggaactttatctttcaaatactgattctaacctttccgggtgaaaatcttttttagcttccaaattgcatttgagcagagataccatgtgatttaatttttaaaacttttctgagtggttcttatttttaggacagggcatttaaaatatcacaggatgtgatttttggtccagattggaaatagaatggctcatccatatagggcaagttagttcttggtttctggtgctgtgcaactcagtaaactaagtgacgtgtttgggcttgggcttagagtattcactctacctgcaggagccatctgtttctgacgctgcctgcttcatcttcctttgcacctggctttccacctgtgttgtaccccgcttttgataagtctcctttacctgtttgcattgttaaatctctctgtccctctcctcagccttgggatgacttctggctgcaatgtgagtccaggtcaggtatcccttaaattcttttccagctcacctcagagactagattactaggttactgttactattacgtccaccccttattatttgaacccagcattccttggtcaagacattcttcttgggtgcatgtatgtatatatatctatatacatacacactgacctatatgtattatgtgcaacatgatattttgaaatatgtatacattgaggaatggctacattgagctaattacatatgtgttacctcacatatttcgtttttttttttttttttgtgaggactcttaaaatctactctcttagtgatacgcaagaataaattacattgttattaactgtggttgtggtggtgtttaatggatctcttgggcaggtcattcttgttgactaatggaatgtccccttccccagcctggattccctcatgttgcactgctacttgattctccctggtcctggggaagagcagactgtgttccttctgccgcttctccatgcccaccaccccagatcctaaagggaatttcctgttctcaccttgataacaatcttaattaattgattatctcacttttctctcctactttctgtttttaagaactttcaaaggttgtaaggattcaggaactaatgaatggtcataatcagtaatttttactagtggcctaataccatgcagtttaataagacaaaaagaaatgtttatttaaaaacattaattcagattaaattatgaacaataaatcactgatattttcagatatggtcatctatgaagggaaagacagtgtcatatggaagtggaagtggtaaaatactgcccaggaaagccataaggagcattcaatgaaaaaaaaaaagtttaaagtggaaagaattaaggctgatatttaggagacagtgtcaaatgtaagcttcatttaaaaacttaggtgaagctgttagatgacatactgttagcggtgggaaaagcatctcaaagcagacatctgtttggggtttgggggtgagggtgggagcacagtgtgttcattctcgcagtgctataaagaaacacctgagactgggtaatttataaagaaaagaggtataattagctcacagttccgcaggttgtaaaggaagaatggcagcatctgcatctggagaagcctcaggaaacttacagtcatggcagaaggcaacagagtatcgagcacctcacgtggccagagcctgaggaagagagtgggagggggaggtgccgcccactttgaaatgaccagatctcacaagaactcactcactatcatgataatagcaagaagggggtgatggaatctgccctcatgatccagtcacctccccaggccccgcctccaatgttgaggattacaatttgacacaagatttgagtggggacacacagtcatcctgggattacaggcatgagccaccatgcccggctaatttatatatatatatatatatatttttttttgtttgtttgtttgtttgtttatttgtttgttttgtagagacggggtttctctatgttggccaggctggccttgaactcctgacctcaggtgatccgcctgcctcggcctcccaaagtgctgggattacaggagtgagcccctgcgcctggccccacacacagtcatcctcaagtgtccagttggccggatctgagttgcttcctgtgggaggtggaggctgcggtgacagtggtgccctctgctctcctgttagaccccagacctctcagtcccacagatactctcctgggctctgattttccaacctgatcatgataccctttttgttttgttttgtttttgttttatctgagtgtacctcttatgtcacgttgctgaattgacagttgtgtcttctaccacctaggaaaaaattgctttccaaaataaaatgaatagcaacttgttttcaatgggtcagaaatcaccaactacagcccatggttcaaagcctgccctggcctgtttttgtacaaccccaggactaagaatggttttcacatttttacaggattgttacaaaacaaagaggaatatgccacagagacctatgtgacctgcaaaacccaaaatgtagataccacatggttctttgtaaaaaaaaaaaaaaaaaaaaaaggtgctgatctgtgttctaaatagtttttggggtgggaatggggaggtatagtctgtgtttttctcaaaacaatgacatttaatttctcttagaagcagattgaagatgcatgagaaacatttgtactttgtactctcttacctcttcaggtgtaattggcagctggggctttattcattgagttttcatttattgagagcctattgtgagctaagcagtaggaattttgttaaattttggaatgctttcagggagcctatagactaatggtgtgaaggacatatccatattcattaactcatttttttttgtcttatggatagattaaatggaaagaactgaaaagcataatgactgctaaaaatgtagtgctgtcactgttagcaaatcttaataaagcgtatgcccttttttctgctttcagtttgatttgattacaccttacaggcttggtatgataagtttaaaacatattgaaggtttatgtacttataaaaacctcatcattccctaaagaaaaaaaatctcaatttggtttagtgtcattgtagtcttgctttctacatcttactaatgtctcatttatttattcattttgctctgtcacatttagaatgattttgatgggcaaaaatcatggtagttacaaacagccctttaaaactattgttatactttgttcagtggattctggtagaggctttaaggtaattatttctttaaagcattgtgtaaatatacctcctactgtagtgcccttgggaacaggcaaaattcagaactggcctgctagcagtcttaccagggttataaaagtaagattattatatataaaacagcattaactcaatgcgtggtgtgttgcagctggcaaacaacctcgctccccaggctgctaaattcgtggtcttatgaatgtctccattgctgtgtttgctgtagcaggaagtgggagggtgttccccagtagccttgactgtttaccaatgcacactccagttctgtggagtgctgtgtgaggcatgtcttctcttccctcctggagtagggagacagccagtagttgctacctgccccgagcagggtgcttgcagatcttgcctatgtggaatcctctaagtgtcttggtgaaatgcagctgttttcagaatgaagagttctttcattttcccttcttgccatatgccatcttgctcccttttccatcataggcttttattttgctggttagagaattgcatcttgtcttgcatcctacccagtccactgactcactcccctcttgggttaatgttttcatatgatcttgctgtgggatgacaagctttagatttgcaggataatgggcacttgtggctttttactgtaacccaattatagtctgtggcaataattttcttttagttgcctttctgcatgaatctggtggtaggcttaagctccatgtgctggtaccctctgagcactagaggttctaacttcctccattattagtagaaacacttaggtgtctgagaagtattttaggcgacaggcaactttgctttgaggatatggtcaaaatgagttcaagtgcctttgaggctgtgagtaggtgtaggtcgtttgattcactctattagctctccatgaatctctgacagcaggactggggaaaaaggttagtgggttagagcattcctgcagatttgatagcctatttctaagagaaatttgaaagctaaatattaagcagtcaacttttgtaaatagacctgtctgtgaattgcttcagtctaaaagataaaattttgggaaacttatccacagaaaataataaaactatctactttgaaatgatttcagagaacatgaagttttagaatattctttggaagaggtaattaaaatgatgccagtgtattattttggaaataaaacttacaggaatgtttcacatagtcatggttcacttggtgaccagggccttttttactctgggggggattcctttctgggcttgagttcttgctgtgatgcggaagttgggtgcccctacttcatgaaactgtaccgcaaagatgtgggtgcccctacttcatgaaactgtaccgcaaagatgtgggtgctcctacttcatgaaactgtaccgcaaagatgcgggtgcccctacttcatgaaactgtactgcaaagatgtggcctcagagccatggtttctgtcctgggcagggagtcttgcagcctggggcagtttcaccatctgagcacagaccctgatatagtttggattttgtccctccccaaatctcacattgaatttgaatccctaatgctggaggtggggcctggtggaaggtgattaaatcatgggggtccctcatgaatggtctagcaccatccccttggtgctgtcctcatgacagtgagtgaattctcatgagatctggttgtttcaaagtttctggttgtttcactctcaccgtcttgctcctgcttttgctgtgcgatatgcttgctcccacttcaccttctgccgtgagtgaaagctttttgaggcctccccagaagccgagctatgcttcctgtacaacctgcagaactgtgagccagttaaacttcttttctttataaattacccagtctcaggtatttatagcagtgcaaaaacaacctaatacagactgcttgggactgggctggcttttttggcctgctgccagcgatgggccacaggtgggagactcactgagttaagggcattagaacttggtgggtcctgctattgcctgctatgctgtggagctcaggctgcacctctttttaccatgtgggctctttgatgtggtagaggcgcctctgtccctccccagaatgttgccctggaggcccgctgatcaccgttggggccagtgcttgtctcagctgttggagagcctgaatatgtgcttgcctgacccagctccacccagctttccttcctcaatctgccttgctggcagaacacaagacagtgatgcttaggtgtcccatggccccacccattgtctgggacatgggagtagcctcctcgttaacaaaagccaagcataaatcctgttgccaccactgcagctgcctctttcctgcaagtaccacttcctggccaggagatgaacttgcgtagcccatctgctgagacaagtgcacaattgcacagtgctacggcaggagacaagctttccatgacctcagttaccatcatccctcaccacaccctggctactcagaaggccctgagcctgctcaccagcctggtatattactactacaactgatgtttgagaaagtcaccacacaaagcctatctataaccaaggaattcatacagtctttgacgctgaaagcgtccagaagcaaagccaaataaaactatgcaacatacattatagtcacattctcagggcggggggaaccctctagtcaaagcaaaagtaaattcaaaccaaaaagtgacagtttctctagatgagaaggaagcagggtaacaattctggaaatatgaaaaagcagggtgttatagcaccctgaaggatcatattaatcttccagaaacagatcctaaccaaagtgaaatgcttgaaatactagttaaagaattcaaaatattaattttaaagaagcttaatgagatacatgagaaagttgaaaaccaatacaaagagatcagaatatcaatccaggatataaatgagaaatttaccaaagagatgttttaaaaaaatcaagtagaatttctagaaatgaaaaatttattataggaattataaaattgagttgaaagtttcaaccatagactagacgaagcagaaggaagaatctcagaacttgaagacaggtcttttggattaatccaatcaggcaaaaacaaagattcaaaggaaatgaacgaagtgtttgagaaacgtgggactacatgaaacatccaaacctataaagcatagatattactaagggagaagaacaaacaaaatctggaaaatgtatttgaggacataattgatgtaaacttctttagtttagcaggagatctagacctccaaatataggaagctcaaaaaattctaaggaaatatgttgcaaggaggacttcaccacaacatatagccatgagactgtatgaggtcaacatgaaggaaaaaatcctatccacgagaaaagtatctaatcacctataaagaaaatcccatcaaactaataggggacttctcaggagaaacttaagagccagagagattgggtttctgttttcaaggtgcttaaggaaaaaaaatctgtcaaccctgaattttgtatcctgccagaataagtttcatgtatgaaggaaaaataaagtctttctcagacatgcaaatgctgagggaatttgtcagtactagatggaccatacaattaatgcccaaaggaggtctatacagggaaacaaaagtttgatacttgctatcataaaaacacacaaaagtataaacactcttataaaacaattattcaaacaagaccacaaagcaactaggaaacagttagcattatgacaggaataaaacctcacatattaatattaactttgaatgtgcatggattaaatgctccacataaaagatacagattgggagaatggatttaaaaaataaaagacagaatccacccatatgctgcttacaagaaagccagaactaattggtaaagacatacactgaagctaaagggatggaaaaagatattccaggcaaatggaaatcaaaagcaagcaggaagacccacctatacttagataaaactgactttaaatcaacaacagtaaaaaaaaaggaaaaagatggtcattatatgataaaaagattattcaacaagatgtaacaatcttaaatatgtatgcatgcaactctagagcacaagattcataaaacaactgctggtagacttcagaaaagaaatggacagcaatgcaataatagaattcaatcactgagaaagaaaatcaacaaacacggcacataaattggattcaggaccacgtagacctaacagatatttatagaacattctccccacagccgcagaacatatattcttctcatcagtgcatggaacgtttttcgagatggactatatgtcataccaaaaaacaagtctcaataaattgaaaaaaaccaaaatgataccaagtatcttctcagaccacagtggaatgaaactagaaatcaattcacagagaaactctcataactatacaaataattggaaattaaatagcctgcttctgaatgaattttgagtcaacaatgtagttaagatggaaattaaaaaaaaattgaaacaaatgaaagtggatacacagcataaaacctgcgggatacagcaaaagcagggctaagtgggaagtttatagtgttaaatgcctacatcaaaaatagagatcacaaattaacaacctaatatcacacttcaaggaactagaaaaaaaagaaaaaaccaaattgaaacctagcagaacagaagtaacaaataccagagcagaactaaatgaaatggagaccaaaaaatgcagtacaaaggataaaaaaaatgagaagttggttctttggaaagataatattcatagactgttggtcagattaaccagaagagagaggattcaatcagaaataagaaagtagacattacagctgataccacaaaaaagatcataagagacttctgtgaacatctgtgtactcacaactgagaaaatttagaggaaatgtgtacatttctggaaacattcaagttcctgagattcaaccaggaagaaatagaaattccaaaaagaccaataacaagtattgggattgaatcagtaatttaagaaaaacaaaacaaacaaaacaaaacaaaacaaaaacctcccaacaaaaaaagctcaggaccagacagattgacagctgaattctcccagaggcacagggaagaactagcacaaatcctactgaaactgttaccaaaaatcagaggagggaatcctccctaactcattatttgaagccaatattatcctgataaccaaagccaaacaagcacacaacaaagaaagaaaactagaggccaatatctatgataaacagattcaaaaatctcaacaaaatactagcaaactgaatgtaacagcacttcagaaaaataatacatcacgatcaagtgggttttattccagggttgcaaggatggttcagtgtatgcaaatcaataaatgtgattcaccatttaaacaatttaaaaaaaagtctgaccatctcaggagatacagaaaaagcatttgatgaaattcaacatcccttaatgaaaagacaacactcaaaaaatattagaagggacatacctcagaataataaaaggcatatacgacagaaccacagccagcatcgtactgaacagggaaaagttgaaagcatttcccctaagaagtggaacaagacaatgatgcccactttttcatctctcctattcaacatagtactggaagtcctacctggggcagtcaggcaagagaaagaaaacgcatccagatcagaaaagagacagtcaacgtgtctctgtgtgctgatgatatgatcttatacctagaaaactctaaagtttcctccaaaagtctcttagatttgatacgtgaattcagtagtttcaggatacagagtcattgtacaagaatcaataacatttctacacaccagtaatgatcaagctgagaatcaaatcaagaagtcaatcccatttataatcactaaaaaaaaaaaacccactagaaatacatttagccaaggaggtgaaaaatctctacaaggaaaactgtaaaacactgatgaaagaaattgtagatagcagaagtgggaaaacatcccatgttcatgaattggaagaatcaatatcattaaaatgattatattgcccgaaacaatccacagattcaatgcaattcctatcaaaatgccaacgtcattttttatggaattagaaaaagtcctaaaattcatgtggtcccccaaaaaatcttaatagccaaaccaatcttaaggaaaatgaacaaagctagaggcatcacaatacccacctacagattttactggagggctatagtaatcaaaacagctagtactgatagaaaaatagacacacagattaatggaacagaatagaaaacccagagtcaaagctgcatacttacaaccaactgatctttgacacagttgacaaaaacatacactggggaaaggacaccctatttagtaaatggttctgggaaaactggacagccatatgcggaagaatgaaactggacccctatctcttaccacatataaaaattaactcaggtcggattagcgacttgaatgtaaggcctgcctgaaactataaaattcccagaagaaaacccaggaaaagctctctcggatcttcgcctaggcaaagaattcatgactaagacttcaaaagcaaatgcaacaaaaataaaaatagagaaatgggactttattaaacttaaaaacttctgcacagcaaaatacatagtcagcagagtgaacagacaacatacaaaatggccaaaagtgtttttaaactctacattcaacaaaggattgatattcagaatctacaaagaatgcagacaactcaacaagaaaaaccacaatccctttaagaagtgagcaaaggacgtgaacaaacatttctctaaagaagacatacaaatggccaagaatctcctaaacatactccacatcactaatcatcagagaaatatacaaattattataaaaccacatggaatactatgcagccataaaaatgatgagttcatgtcctttgtagggacatgaatgaaactggaaaccatcattctcagcaaactgtcgcaaggataaaaaaccaaacatcgtatgttctcactcataggtgggaattgaacaatgagaacacatggacacaggaaggggaacatcacacacctgggactgttgtggggtggggggcggggggagggatagcattaggagatatacctaatgctaaatgacgagttaatgggttcagcacaccaacatggcacatgtatacatatgtaacaaacctgcacgttgtgcacatgtaccctaaaacttaaagtgtaataataataaaattaaaaaaaaaagtttaggaaaaaaaaaataaactgcatatatggaacgtaataaaaaaaaaccccacaatgagataccatcttataccagtcaaaaatggcaattattaaaaagtcaaaaaacaacagatgttggcagagttgcagaaaaaaaagagaacacttatacaccattggtgggaatgtaaattagaatgacctttatggaaaatagtatggaaattaatcaaagaactaaaaatagaactaccatttgacccagcaatctcactactgggtatctacacaaagtaaaagaaatctgtctgtcaaagagatacgtgcactcgtctgtttattgtggcactattcacagtagcaaagatacggaataaacgttaagtgcccaccaacggatgactaggtaaagaacacacacacacacacacacacacacacgtctatcatggaataccactcagccgtaaggcagaatgaaatcctatgttttggagtaatattggtggaacttgaggccattatcttgagtgaaataacttagtcagacaccacatattctcacttataagtgggaactaaataatacatacacatggacatagagactggaataataaatattggagcttcagaaaggtgagagggtgggagggcagtgagggttgagaaatgagaaatttcctaatgggtacaatgtacagtattccagtgctggttacactaaaagcacagacctcaccactgtgcaatatccatgtaatacaactgcactcggtcctcctaaatctaaataaaacaaacaaagaggcacccccttaaagctcagggtcttgccaactctaacagtggggtttcttgatgttttttaaaataaaaagaccattagttcataggtatgagagactgtcataaattaaaaccaagtaaggatggattgaaatacccacaggaggaactcatcttcacagtttatggaacaaatatagaacaaatatttactgagctcccactatgttgtaggcatcatctttagcctgcagtgacaaacccttgacctcaaggagcccctattatagtggggggaaaatgacaaaagtcaacagatggcagtacctagtatcatacatcacagtgctgtgaacaaaagtgaggctgagtatgggagacagagagaggtagagagtgctgttttaggtaaaggtgtcagaagaggccttactaagggcgatgtttcatcagagacctgaatgaagtgagggaaagagccatgtgtatatttgggtaagcacatctcaggtagagaggacttttgagtttcaggagggtagaattgcatcaagaggtgagtgtggctgcgttgagtgaggagagtggtgggttagggcggtgtcatgaaggagttggaatttccttctcagtgtaatgggaagctgctttgaacagggagaggtgtggcctgatttaattctgaagtgctaatcctgtgcttgtggagacatgggctgaggtagtagggcactgaagctggaattggggggccagttaagatactattgcaggcaagagattatggtggcttggacagggtggcgatggtggaggtgataagtagggagtggatccagggtttagtctgaagggagagctggcaggacttgccgatggttggatgtagacgtgagagaacttggcggtggggcagggggaccttaaggttttggctcaagcaactggttgaatgatggtgccatttgttgagatgaggaacactggggtaacagtaggttttgggggagaaatcaaaggctcattttaaatttaaatacatgaaatttgagatggttttgtgtatccaagtgatgatgataaacaacagcaataaataacacttatgccaacctgccaggagctgtaccccaagcttcacatacattagttcactcaggccttacagcagccccatgaaggaataactgtcattattccagtatggcacgtggggaagctgaggcatggaggttaacttcattcatggtcatgcaaagtgttcatgccagaggttgaaccccaagtgttctgcttcgagtctgtgcttataaacgtagcttctgctattgttggctgtgtaagcctgcagttctgtggaaaggtcaaggctagagacatgaatttgggagtctttggcagacatttataaccatgcacgaggtcaccaagggattgggtgtagacaggaaagagggctgctcagtaagctgtggcacacctctggattgagagtcagttagagggaaggtgagaagtgtttccaggaggctgaaaaagagctggaagtggggcagaagaaaaccaggagactgtggatgcaagccacaggagaaggggtttcatgaggtggagaatgatcagtagcatccagtgccacaagagaccatgtaacgggaaggctaggacacgagcactggatgtgtcagcagagatgttgtgggtgagctggtaagcggggttttgctggagtgggaggcagcaagctgatgggactgtgttcaagagagaatggaaggcaggaagaggagaagacgtgtagggacaattgaagaaattttgctctaagttgcagagacatgagatgataggggaatgtagggaccaggaaggacgtttgtgaggtggtagatctcatggcatgctgacggaaacgatccagtggagagggaaaacctggtgatgtaaagtgagaggagatgattgcacaacagtcctcatgtaagagagaagagataccgaaaagaacgcagaggagccaagacgtttattgacctttgcctgagttcgttattaggggacaccatagcatgatagtccctaaggaatggagagcagtgttgtgtgacattggtcataagcttttctgattgaccaagatgtatactgaagactcacttttttcttcctcccttccaggtgccatgctatgtgtttgatgaagagttgaggaagcatgatctcaatcctctgatcaagcttagtggtgcctacttggtggatgactccgatccggacacttctctattcatcaatgtttgtagagacataggtatgaatctttgtggggctgagggggtggtggtgagggatttcttctatggcttcaatatctttgcctttctacctttatttctgttttcacatccatgtttctgattaggccctctaataaagcttttgtccccaaaaatgttctatttgcacaacccacctcttctcccccagtagattccatgcctcctccccaacccctgtagattccatcctaactgttgatccattccatgtgggtgttctctcggccagacaccttgggtttcgggattctacagaagtgagggtcggtcttgttctctgtgtgtgcctgaatcccttggctctgagttacgggctgggtgaaaaagaaaaagggatgatcaaggacttgggtacttggtcgggatgcatatttggcccaagctgacttgttcctttctctgtacttgccaaaactggtgtgagaagctttagcttaagctttagaatctttgataaattaactaaagaccgtaaataaatggtctttatctaaaaagggccatgaaaagttttactaagcctttgactagccttcagctggttttactaagccaagtttctaaaacccagcttgatgttcccctcagggctatgaattgttagtcctgtaggccaggactgtctttctgcagtgctagccatgagtaaattctgctggtgattaactaatctaaaggtcatttttagtgttcttctttgttttttatttctcaaatagtacataatgctttgcccttagaaaagtttggagaaaattttaaaaaataaactcaatacatggaagtattgctggatagtagatgagtattaatttatgattattctttaaattgtatatatacattatgtactatcttgtttatgtattatttctaaacagttaaaaacagtaaatataccccattcagggctcaccaaaagtaaccaatgataactaggtttttttgtgtgtgttagagtattacatctttcttttgttctccaaggataacctttattgattttttggaaaaagactaatacagtctttgtcttaaatgggtctgtaactcaagtttggttatagagttgatgagttgtagattattgaattctggaataatacgctattttgatttggaaaacatttaggtttctggtctcttaacattttacagatcatctgaatttgctgagtattttcttacaagttttttctttccaatttattggcaatttgagtagagcttgaatgactttgattcacagtaggggtgccctagtttttactcagacattctccattcccaggaaattgccctaagtctcaaaccaagattgaatgtgaccctcaaaacctcttggatagtttcggacttgccatcatgtgcttacctccttgcatcctcagggcgcttgctgtgtattctgcctttggtataccaagtggattgtcttacactgagtccccatgagggcaaggagcctatggcacagcagatactataggtggaacaaagcagtccatttgtgaaatttcataattccacataatttcataattgtttggaaggcttgagagttaaaggtttgcttacctcttcactagctggtgcaaaggtagataaccctctccatctttgattaataaggcaggtaaaacttaagggaggtaagattattcactcactcattcgtgggagaagggttgtttgaatcccttctgtgtgctaggcactaatctaggcactggattatagcactgaactcaccacagttcctgttttcctggaactttagttagataggagaaaagatagatagtaaacaaataaatcccaaagtatactgtgtaaggtattgagtcatggtcatagaaatgaatggtaaagagcaacctagctgtaatcatagctgttgctatactggcaatctgtaaagcctgcgggatgttctggacatattctgggtatgttttcatctttaatcctccaccaaacctgtgcagtagcacactggcaattggatagttttgtagttagaccaacgttatcgacatagtaagtggtcgatttaggatttgaacccagagctgtgggttctttccctaatctcctaattgttccagtcatctgtggagtgcctgcattttctagtctctgtagcttgaaaggggatagtgctaatgttgttgtacctcaagcagaggatgggtacatttcttgattacaaataacatcatagcctgtttcctgtgcacctcttatataccagtgcagagccagtactttacagtccttcatcctgagctttgtttgcagagggttaatggcttgcccaaggtttcagaatagttacttagggagacttttaggaattcaataatgtatttaaagggaccctgggtctaagggtacgtgtgattatcactcctaacacctaatctgatttaatgtaatacatgattttcagacacactacgagacccaggttcacagctgcgggcctgtccccccggcactgccgcctgcctggtaagaggacaccaggcgtttgatgttggccagccccgggacggagtgaagctggtgcgcaaggacaggtcagtcaaggcctccgatgctgttggcgtttttaatctccagcaaggacctgactttcagggagctgcaggaacatcctttttcagcaaggcttgggatagtccctgcagcattactgcttcacatgtacttgtaagattgttggtcattgctgtgagtcacatagtctagtgtgcttgtctactttttaatcatttgtctcttacagcagtaaaaatacatctcatgatccagtccatagtacatacctgtatttgcctcatgaaataatgcctatcttaaggtgccatctgatatttttcattctgtggcacccgtgaaattgattttgtgtccattgtgttctcatcttgggagggcaagagacaggagggacagtttgctggtgaccttcactgggatgtgacagggaccttggttcccagtggggaatggtgttccttataatgtgttgtgccgtgtacatatgctcttgtactgcctttgtatcttgccttggcagacatacgcatttctctagtgtgttgcacatgaccatatcctgaacttcgatcaaggattcacattttctccccattcagaggcctttggtagacaccttgttgtgcttgctctagtctggagctcgtggcatgtctgggtggttgtagggagcatgtgcaattataatggcactctgtccaaagaaaaaacttgagcgtaacctgaggggaaaagtgtttggaattttctatgtgtgtgtctgtattagtttgctcaggctgccataagaaaatacgataggctgggtagcttaaaccacagaaatgtatttcctacacagtctaaaggctgcatgtctgaagaaggcgtcaccggggctggtttgttctgaggcctctctccttggctcgttagatggccgttttctttctgtgtcttcacgtggccttccctctgcgggggtctgtgtccgaatctcctcttctgataaggacaccagtgattttttggattaaggcccactcacatgatctcctttttccttgttcacctctttaaaggccctgtctccaaatatagtcacatgctgagctatggcttaggccttcaacatacaaattttgaggggaaacagttcagtccataacagagtctttaagtgacacattggtaattcttaatatgaatgagtttgtgtgacgatttagtaacatgtgggacactgagcaagtgtgagcttctcttgtgggaaaaggcaggtcatctgtgatcagctattctctagcaggcagccaggggcactgggccctttccacactgagtgcagtaaaccctggtggtgggggccatgttggatggtggtttgggtggtggaagagaaccccagttcagtaactgctgtaactgctgggcaggtgctgtggggttaagacaaaacaaaacttttggctggcacttagaatttgttgtataaagaggaaatgattgactagccttgtgggcaaaaatgcacctggcctgcttgtctgcctttttttttttttaattttgttatctcatttacaaccgttttttgcttgttttagtcaaatggtgtttcttcctttttttaaaaaaaataatttttttgttccttttctctttccttattctaggacatgaagcagatcaaacaggttttgtttttgtttttgcttttgtttttgagatgggtcttgctgtgtcacgtaggctggagtgcagtggtgtgattttggttcactgcaacctccgcctccctgttcaagtgattctcctgcctcagcctcctcagtagctgggactagaggcgcactaccatgcccagctaatttttgtagttttagtagagatggaggttcgctgtgttggccagggtagtctggaactcctgacctcaggtgatccaccaccttggtctcccagaatgctgggattacaggcgtgagccttcgcacccagccaggttttcttaatatatcaaatttatgtgctggtcactttagatatttgattttttaacaaaataacactcactggagtttacttaaaacctttttttttttcaaatggaaataaagtcattttataccatatctacttttatattttaatatttcttctgttaccctctcctcccccccaagtgaatgtgctgaatgctcagggcaacatatgaatttggatgtactttatacttttgtaatactcttttctcaatgtggctctcccaggcttgtcctgagttacgtgagggaagaggcaggaaagctagacttttgtgatggtcacagccctgcggtgactattacatttgtttgcccgtcggagcggagagaggtaagtgactcgtctcctgatcactaatgtggcgcacagtagcctgggttgcccatgcgaacgcgtttctgggcttggggcagggtgggcctggatgcaggaagctgggagccatgacagaggcactggtgggttctcaggagaagacaagcttcctgggatagcttctgtcacatgcagctcactcagggagagctgtttgcattttgccttttgcttttttacagcaatccggaggggcctccacatataatgggatggtgttttgttctagtctctgtgagattattttaagtagttcacggacagatttttttttggtagttgggttgttttagtgaatagtggaaaaacgaagtagaatttcaagcctgtgatttcttatgagaagcctttccctccctctctcttcccagtctgcccctaaacccccatccatgccttctcccctctttctcatcacaggccagtttattgctgtgccctctgctgttgatgaaatctccagcgcagctgtaaactcttcgagtgtggctgctgagacttacttgtccttgagtgcccagcgcctgcaagtgttttaaccaggggcaggtgctgatggaaaggaggcgtcccccagggagggaggggtagggcagggctttcctttagtttctttctgccttcttagtaatagggtgaagtagggaggggctgaattcttttgccagagaaccacactccccttcccccaagcaaatgtggaatttgctctgacgtcaggctggcagctggcctggtgtgtgtgggatatggagacagtgcagggctcagctttccactttctgtccccagacttccacatcaagtgctgtcagctgaatgaaggccggagtgtctgatgtttgttctgaatgtgaatggggaggaatatttattcacacttttcatttgtacctacagatgtgagttgaaatcttttaagcccagtgagatgttctcaggcggtagtggttttagtgttttccctttttatttgttctacatttggtaagaatcattttacactgtgagaaccaagagaattgggagttttcctcctttttcttcgaaggggtatgaggcatttcttggtgttagaagaagaggctgatttgttattagtggagcaagaagttccctctgttttttttttttttttttaaagacagtgtcttgctctgtcgccccggccggagtgcagtgccacgatctcacttcactacaatctccgcctccctagttcaagcaatcctcccacttcaagcaatcctcccacttcagccttctgagtagctgggactacaggcatgtgccaccacgcctggctaatttttgtatttttagtagagacagggctttgctatgttgcccaggctggtcttgaactcccaggctcaagtgatctgtccacctcggcctcccacagtgctgggattacaggtgtgagccaccgcaccggccaggtttcttttcaagcttaactgttcactgggcagaccttgtgtgacatgtgcttggacactgtaatacttgggaggtttgtttaagcatttacatttgctcattgaatgattttaggagctggtatttagtaaacactcaccttgtcatatagatcattttaaaaatgctttatttaatttatttattgggtttacatactgtaaagttcagttttttttaagtacaattcagtggttattagtatttttttttagaactgtgcaaccatcatcacaatctaattttgcatttccatcaccccaaaaagaaacctcctgcccattagcagtctcttcccattcataccccaagccctggcaactgtccaccttcttcctgtctctgtggattggccttttttggatgttttatgtcaggagaatcctacactgtgtggctttctgtgcctggtttctcttacggagccctggggtctgcatcaccatgtgtcagactgcactgagccacgtgggcagaagcatcgattatgagtcaaacagaagagggttgggcctgcagctctgcaacttactaattgtgtgcgacctgtttgtaaacctggcacctagtgcctggcgtgtagcaggtgctcagtgagtatttacggaatgaatggtgctgggaagcagcacggctatgcccggtgctaagcccagtaagtcgtgtctcctaagggtgattaaaaagctggcagtgacattcctggtgagcagggaccccatcagcccccttcatggctcacatcaaagacgaatggtggagctcctgctctgtagaagcaacacaatggcagaatcgggtttgtgtctgggtggtgccctggcttcacccaggagcaggtgtgggtacagatatggtggtgcccaggatcccaaaggggttgtggaccgtgtctctggttgtgcacgcatgtgataatgttcactcagtgtcagggttgcaccactccagttgagcacctcgtggaaagcggtgaatggaccatgcaccctgcacggcctgttagcgcttgccgatgtcctagtgattgccacgtgccactgagtccaggtgcttgctggccgaagcttgagtgtctctctgaaggtgactagactagaaagggaatagagtgtaaagaggaaatggaggtgttacgagtcaaatggaaaaaaaataacagtttagaaaaaaattaaaagtaactttactgagttgttataagtcaaataatcttaatgtgttagaggcaattatgattcaaaaaacagaaacagcaaaatgtagaaacctaacaacctgtctttgagcttttcataagtgtggaaaatctgcattaagctgcatgaaacattttttattttgcttctttcacattgttcctgatagggcaccattcccaaactcacagctaaatccaactgccgctatgaaattgagtggattactgagtatgcctgccacagagattacctggaaagtaaaacttgttctctgagcggcgagcagcaggatgtctccatagacctcacaccacttgcccagagcggaggtaagcaggtgctttctgcctcctggcgctgcttaggaagaaggggatcgagagagggaacgggacagtaggggccaagtcagtccatgcatgcttctgggttggagagagctgtagtttgggctggtgtttcagaaataggattcaggtttgactaagtaagactgtaatcttctaatacctattcatataaaacaagcctcttcttgttaatttccctgtttttaggttcgtcctatatttcagatggaaaagaatatttgttttatttgaatgtctgtggagaaactgaaatacagttctgtaataaaaaacaagctgcagtttgccaagtgaaaaagagcgatacctctcaagtcaaagcagcaggaagataccacaatcagaccctccggtacgtcaacaacctctgtgcgattttcctttttctttgtatttcttgagatagggttgcactctggcgcccaggctagactgcagtggtgcaatctcggtgcattgcagccttgacttccctgcctcaagtaattctcccacctcagcctcccgagtagctgggactacaggcaggcaccaccatgcctagctggtttctgtagtttttgtagacatggagttttgccatgttgcccacgctgatcttgaagtccttgcctcggtgatcctcccacattggcctcccaaagtgcgtggattagaggcgtgtgccttgggactggcctgcataattttcaagtgcgttgtgtgtattcttgtgaaacataactccctctccttttcttcctctttccattttccgtaaggtacgggagaatcagttactccagcattccttcctagtagacttcggcaagttgccgtttgtcactaaacaatcaaatgtttttcctggctttagagtaagaatgcttctgttagaactgttcactttataaacttgctgtttgtacggaacctactgtaggaaaagtatttaatgagtttacagttgatagggttttttattttaaaattcgtttttaaggagttttgatttttctctggcagtttgagaatctgaagcaccatcaacataacagaaaattttaaacaactaaaaaaatgcattcagcacatttcttttgacccttaacttggtagttgaccttcataaaagcaggatgaaaatgcagttttctgaaaatgtgttaggggcagttacgattcaaaaattaggaacagaaaactgcaaaaaccccagaactggtctttgagctttttaaaagcatggaatatctgccgagaagctgcattttaaacattttatttttgcttctttcaaattgttcaggatcagtatagtccaaggcccctcaggcacggctgtgttcatggcggctgttaagaaggctgtctaattcttgggcgttatttattttgtacgaaatctaaaagtgagaacaagagaagtcttcatgctcacagcaaaaccttcggcactttcttccagccagttactactttgaagcgagaggatgtcaagtccatacatttggaactcatttcctgtagatatttttccctagctggctagagagcttgctgttttagatccgtagtgatttgttgatgctacgcaaaaggcttaatgtagacatttaaaaagattcaagtttttttcttggttctcccaaacacatttgtctgtgtattcacaaaaatctagatattcggatggagacctcaccttgatatattttggaggtgatgaatgcagctcagggtttcagcggatgagcgtcataaactttgagtgcaataaaaccgcaggtaagtgtgcgctggagttcagcccctcctctttgcattcatgggcatgtgcttgtgtgtgtgcacaggcgtgttcttggaagtgaacactgaatggaggagtcagatgccctcctttggactggccagctctagcccccagactgggttttttctgttggagtaacactttccccacccccactgccccagtggacacacacacatcctgtttgtgttttcctcggttttctctgtttgttttgggaatgggcccagcaatgagcttgttgggaaagttttcatcttgaattttggtgcacactaaactacagcaaggacagattcggcaggggcgggatggcttgtcaattttgattgagtgacctcttcttttatgtaatgagtatcaagataatcctttttgcaaagtggtgaccctatggtagagtttggatctggggattgcagaatgtcactgggtgcgttgaagctgaaggcgtgcatttctctgagtaatgagaagcacccttgagtcaccaaggcactggcatatcaaaaagcggtgccgctgtccatatcttgacgattgtagacacagttgtagctgtagagagatgatgggattccgtcatcatcagagacctgccccatctgttgacccccaggctgtgactccaggcaccctgcagggcatcccaccactgctcagagcaattctagggcccattctggtttccagcctaagtgctgccccacccagagggtctttctggcccttgcttccgtgtgttctgtgtgtttttctacagcagagctttgggtggcttggttacaggatgggttgctacaggattcactgtgggatgagggagaggcagctggacatgatgtgaaccatgctctcgaagcctccggagatcaggtctgcgttgggagagacaggcacccctgccctggtagcaccgcacccctgcgaacgtcctagcaagcaggcaaagaaccagcccagggtcttgccactgggaaggctttcaagcccaaaatgccccagtaactgctgttgtggcacctgcccctgggatgcccttgttcacaggtctgccattgctgtccttgttctctacatggccccttttgttactttcacaatacacacattttttaagtacctatttgcttaggccctatgaggctggagggtgttgtgaggatagatggctctctaggtgttcacagactagcagcagagagagataaggagcatgatgatggaggttcagggcagtgctgctagagtagagcgagtgcttagtgttgtcgctccgctgctttaccaggagggaggcaccgaggtcagctggctggggtctgggctgggtgcaggggtcaggcagttcagagaggaggaagtgctgcctgagccacactacattgaggagcatgccagtcccgtgttggggtggctttagggcctgggcctccagacattcaaaggcatggaccaggggaactgcgagcaggttagaggcgtgtatggggaatgtggctgaagatgaccctggaacggtgagtgtgcagtattgtaagaaacttgtatgtcctgcagaggagctggattatatctggaaatctgtgaagtcccaaggattttcagcaggggtatgacatacatctgactcgtgaatgagaaaatcagtgtggcctctggatggacctcgcatctggtctgagcactccctgcacccctcagcttctccatcattctctcatcgccctcacctcctagcctacctacgctactagcctccttagccatgtctgcaccctgaatcacgtctctcctacttggtgtccccagtccccagggatgcagcctgtatcttccccatgtgcccagcccctctgatgcctgaccttggttctggctcccaggtcaccccaactggctctcctggactccggctggctcaggctgctctgctgtggtctgaatctccctgcaactttgtgatgacctcctttggcctgttctgttcagggctttttattaatgacttggccgagatctttgagagtgtgctgatctcatttggggatgctgggaagacagaatcattatccaaaaagatcgaaatggacgagcaggatatgagaagggcattatatcgtttcagacttacagggaagaggtgtggacatcgatgagctgccaaccaaacaaaaaacacaggagagaaaaaccaaagaacagaaagaaagaaaaatagaaaaaaaaaagaagacccgcagtagagtggggagatcttgccttgtagttatgagcatagatgaggccacaccctctgggtttggttcccagctgccctagtttttagttatgaaatcatgggcccagagggagctaaagcccagatgagctgaggcttgacaaaacgggtgaaggcctcccatagctccatttttccttttcattataaaaattttcaaacatggaacattaaaacagaaatttacatgcctgccactctgacagccattgatgttttgccagatttttcatgtaagccatgcgtcattgatggctcatatcaccccaccctgatgccaagaacgaacattcctttatgtaaattcagtaccatcgttgtacttaacaaaattaacagtgacatcctgatgttaaaaaacccatgttttcctaggctgttttcattatgattgtaacaaggagcctggacagagagatgtcaggtgttttgtgggagggttttgagctggctctcaggcaggagttggattaaaaaatacttacatttccttccagctctgtaattcagcactccaaactctgagagcaaattgtgtactgtaaaattagttcattattattttgctcgaatttaaacttagagtttttggagaatatcccttggtagactctgtttattagatagatgtatttttgaaggtgaacgagtgttaattggctatgtaatagaagtgtggtttaagttggatctctaggaattattcatgtgaatctaggttcatgtacttttcaggatgcaagcgcatcttttggtcataatattttttaccagtttaaatctagtttgttgtaaagcgatgctttattattggtgatttttttaaataaagatgttagataattttttggaagagcagaattcattaggataggctaataaactactcacaatttaagtggctcagcccattaaaggtttattttcttagttcagtgctagtctttggggatggggctggggtcgggggtgcgggctctgctccatgtggtcatttggagacctacgctttttccatcctgtgtttctgccatctgcagatgtgacttccaggggctctgcaggatgggaacatcaatttgctttgttttattttttttccaggccagaaataagtcacttggcccagcctgaatatcaggggaggctgggaaacggagtttagctatgtgtctagaggaaaaattaaactagttgggtaagaggtagcattgtttttgccacagagaaatgggtgctgctgcctcctccttaggcagagagctccttggttccatttgaaaaccttccttccccttttgctggaattgagagactgaggacacaaagtggtgtgctggataataaactagagcctgtggtgccagactggcaacttggggattgtgtgagtgagggagagattgtgcagagctaatcctaacattgctgatgagtggacagaaaccataggcctcatgaatagtgatttctgaagtcaaagcccagtatgcttaaatatcaacccaagtggtttgggagaggggagcacagcttactgttctgctaaaattctttgaggaattaagtaagaatacgtgtaaggtacgtagcaatggttatttacaaaatggactctgcctgcagattattagtatgtctcagatgtaaaaccagctcaaaagtactaggacgatttgtagtagtatttaattatttgtaaacttagacgtttttcttcacgtttgcagaatacaaatctttgtcagtagtgaaatgtgaatctagtaggattaaactgtgtgtaaaccttgtgggcgggatgaagagaggcagaggcgcgtcactgttgctgttagttgaccggcaagctcaggggcccagctatggtagctgcctctgggttgtcagctgcgcccaggaggtgaaggtggaaggcattccttaaagacagtggcttagtgtacttattaaaaaccaaaccaaaccagccaaccaaacaaacaaaaaacacaggagagaaaaccaaagaaaaaaagaaaaatagaaaaaaccccacagtagagtggggcaatcttgccttgtggttatgagcacggatgagggcagaccctcagggtctgattcccagctgccctagtttttagttatgaaaccataagcaaattatttagccaccctaaatctgcaaaatggtgctaaaattgtacctttgccatggggttttgaggatcaaatacattaatatagtcatgtgttgcttaacaataggaatatgttctgagaaatgtgtcattaggcgattttgtcattgtgtgaacatcatagagtgtacttaacacacacctagatggtatagcctgctgcacacctaagctatatggtgtagcctattggctcctgggctacaagtgtgtatagcatgtgagtgtactgaatactgcatgcacttgtaacacaacggtaagtatttgagtatctaaatatatctaaacatagaaaaggtccactaaaaatacgatactataatcttttgaggctaccgttttatatgcagtctgttgttgaccaaatgttgttatgcagcacgtaactgtataaagaaagtacttaaacagagcctgttcttctgcagcttgcctttatgtagccgaggtgctgagctcagtgcctggctgagattgtgctcactacaggtttgccgctgtggctggtattataattatagtgatgataatattaaagattggatagaaattacaattgaaatatcatttgctcttggtacagaatcttacttcctgttttcttagatcattacctagcttatgataccaaacctcaagaaggcagatcacatggtgggaggctcagacaaggattatgaaaccatcaggggtgggaaaaggagtgttgtgcccacggacccctagcctggaaaggtgcagggataggatttccagcaaggagcaagtcagcaaagcctctgaatctcagcgtccatgggatggggacgtggcctgtgaagagctggttttcagacttaggcctgaactattcctgctgatggatgggaaatctgggtggctcactcttggtggaagaagaggcttgatttgaggagggtgttacagacaggtgcactgacggaaccacagaatttcagcactgtttggagttgtgctgctaacattgtggggctggcataggaccttggcgtgcttcactgggagcgactgactatagatggcttccactcttgttttactttagggatgagtcccagagaacttgtcttgttcacagtcgcatcactaagtcagcagtgcacagggaactagagctccatttctgtcctcctttctgtgagtccccagtgtcacccagagatgttcaggagcctctgggagctgaccacagcccgggagcagaggatcccactcactgctcttgcgttcctcctgcctgcccttttaatcttatctttggaggtgctgtacacagccttctgtcaatgtctcccaaggtgaaaggcatgctggcctgccatcgaggacttagggttaagcatctgaagcttaatagaagcctgtgtcaactcagatccccatggtctctaaaaaaacctggacctgaattttttaacggagcagttggcattggtcctgttcagtttcttccttgctccttagctgttcctcaattttggtcacgtatggagtttaaatttctcctcttgaattgtgcaggtaacgatgggaaaggaactcctgtattcacaggggaggttgactgcacctacttcttcacatgggacacggaatacgcctgtgttaaggagaaggaagacctcctctgcggtgccaccgacgggaagaagcgctatgacctgtccgcgctggtccgccatgcaggtactgccctccttgccatgcgggtcttagtccacatgctcatggaacattttcccatgagtacttttggaaatgcggttactattttctttgtcagtgggttgcgtcacagccctcccccagttttttcatgtggctgtgtgaattattagaaggagcattggactgggaggtgaaataactgaatttgagaccagcatttttgaccttgtgttttcacccttttacacactgcctctcttccatctctgaggtgggatctgcagcctctgccccctggggttcttctgtttggatcctctaggcagatggatgtgcaccttgggctgctgttcaccgctgcctcagcgtgcagtgggcttgtactcgaggctgagcttgctgttgcacggcaggcaccggatgaggtgccaaggaggcagcagcgccccccacagcacaacccctgtccttgggggcctggaatttagcaggaaacagagcaggtggaataataagaatgggagtctcaagcagggataatctgatgggggggatttctggttttaccctcttggcagctcaaattaggtgtacagaagccagttgcctctgtaagggggagatgacccgaagcagagagaatgacttgcctcatgtaattaccacccagaacagtcacagaactgctggcggtatgttctcgctcgtaagtgggagttgaacattgagaacacatgggcacagaggggaacagcacacaccatggcctgtttagggttgggggtgaggggagggaacttagaggatggatcagtaggtgcagcaaaccaccatggcacatgtatacctatgtaacaaacctgcacgttctccacatgtatcttgtttttttttaaagaaaaataaaactgccagggtgacagcactgctgctcctgtcttctgagtcccacctggtttgctaaataccaggttagaaagaggaatccctcttgtggagtgtttgagaacctgcctcactgtgaaccgcctgggcagggagtgctggcagtgctgttgtggttaaacaccctgtgtgctgctgggaacggtgccatagttaattctggcacatgtgtgctagtgaagacattggttttctgtgaagtggaaagagttctagctgcagagttggagacctggctgaggactggtgttgccgcatccaaccacatttgcttgagcgagctgctctccaggcccgggtttcttacggtgaactgggtggtgctgttagattccttaagttaactttttttttttttaaacattactgtgtataagagacaacctaggatctatgagataaggagagatacatttttcaatctgcagacttcctgacatagctctggtttcttggaatctgcagtatttcgtggtatttgtgcgtagatagccctaagtaaattatgaagggagagctaaaaccattccttactgcttgaagaagtcccttaagactttacagcccacctggctccaccccagacttccagtgtttagggcaggtccttgttcacatgcacagtcttgtatggtttcttttaggctgttgacattggaaagtacttctccaaatgtactgtatcaccactgatgagtcatggggttttgccttccaaaccccagtacccaacctgcaaagggagcattttcaaatgagaacgtgtatttttatatctttacctcctccttgacacactttgtaagttactccttcagcgactgttcgccgtgtggtttgctttttgtggatgccctcgcccttgcttgctgtgctggtgacactcagctggtgccccctcacgtcctgcaggtgcctaatcagtgtctgatcacactgaccagctcaccagtcttgtgagttcagcggccacctgtggtaccttgcttgtcttctgtggtagcatgcattgcatcctgcactcagtctgcagatgtgtaagaggttgctggtttcttttagcttcacaggccttcacaggggccgagcggggtgtattagcaatggtgttaagcggggtgtactagcaatgatgtaccactctactgcgtcccaagacacaggctggcttcttgatttgggttttcagtttctaatttcatactgtggggcttgggagaattttgccgttcagttctctgtcccccagttgggcctactcttctgaagaagtattgggatgtagtttgtttctgtcacattaaatgagaaacctgagaatctcggtgaatttttgtgctttcagtctgcccgggttccagaaacagcgctggggattgagtgacgaagtggtttgggaactttgagcccttgacttttggcttaatcactatttattctgtgactcagagaaatcagcattgcttttggctaaaatacacttttgttttgttacagaaccagagcagaattgggaagctgtggatggcagtcagacggaaacagagaagaagcattttttcattaatatttgtcacagagtgctgcaggaaggcaaggcacgaggatgtcccgaggacgcggcagtgtgtgcagtgggtgagttgtgcctggatggaagatctaggtgatgcttttctagggcatccagtttggaatgagttagaagatctttctgtggttcatctaagcctcctctttctataatcacatgaaggatggtaaaaatttttcattcataactcaaatgtcagtaattgcttgatgcactctggaatcctgaagttggctagagctccctgacatgggctaaagccataactgggaacagaaggaaccacgtggaaaatactacatcatctttttagtttgtaacctgaagaataacattgccagtgtttgtgtacaagtgattttattttattttttaacaactttattgcctagaatcgttcaaaagttatggcttgagtgaagtgtaatctcagctgtagccctagtgtaagaggggcttgcatgcttcgcttccttttgctgtcattgttttggtcccgtagctgtcatgcagagacttctcaattatttgatacaggtatttagcacttcatttttgtcatttatgactcactttgaaaatgccaggctatgagaatagtgagaatctgttaaaagcattcaataaggaattgtgagcctcgttggattttaggaattatctcggtattcagaattgctggtgtgtctttaaaagcaggttcaggcatgtccatgtctttactaagaaggactttggaacagagttttaatcctttataacaaaaagcaagtgaaccaagaagtaagcggcctcctgcttgggttgctaaacaggtttcgttaatttctgctttggatatgagacacattctcaccctttggctgtgtggctgtgctttcaaaagactttgtgtcttggggtagctgaagccctgacagtaggggacaatgtcagtttacagttggtgctgatgcatgttgcaagccatttggtctttcttgccctggaagggcattgtgcatccttcatggcgctttctggctgaacctatggatgaccctggaggaccccaatgtggctgttaatgtctagccaaacgtggcactctagggaaacccatccgctgccttggtgggttcagggggctggagaagggctgcacttgctgggtttgggctgatttctttctttctttctctttctttcttttttttttaagtcacttctttgcgtgatgatcatttttaaccacatcttctgttttctccccctttctcttccagataaaaatggaagtaaaaatctgggaaaatttatttcctctcccatgaaagagaaaggaaacattcaactctcttattcagatggtgatgattgtggtcatggcaagaaaattaaaactaatatcacacttgtatgcaagccaggtaaaaattttaaaaaagatgaaatcttttctggcttctgccagaggtcctgcattcttcatagctctgttcctcatcagtcactgcaaagctgatcagacagattggcatggtgttcagcattttgagttccagactctggcgatgggagataggtcatttggaatttttccctcatcccctcctcaaaaccaaatcagaaatggagaaaccagatggtgtcagaagggagttgtgggtctcagcgctgtatcctcttcctcgggactgatactcggccagtcatgtggttacttaacttccttcaaaggggaaaaaaatcataaatggtttaaaacattgcccgtgatctcaccacttaaacacaatgttaattttcattacctttatttatagatgtatgttgtttttaccaagtcaaaatttttatggtaacaaatcttaatgtttctcaaagtgtagtattttgtaaatacttttctatgtttcacagttccattaataatttttaggaacttccttgttgacatggtgtggttttactatttttgaacattttccttattgttggattaatagcgcgtttccagtgttgctaattgtgctattatgtatcctctctctacctcccattgaaatatttcctttggataagttcccagctgtgggataaagtcagaagctagggtcattttgtttgtttgttttatatggtaaaatatacaacataacgtaaaatgtaccatcctaactgcttttaagtgtgtagcttggtgacattgttgtgtaataccaccaccatccatctccagaactttttgatcctcccagactgaaactcagttcccattaaacacgagctctccattccctctcttctactttttgtctctacggatttgactgttctagatacctcatataggtggaatgctacagtatttgtagggctgttttttgacccttctatgcattatacctcatttcccactgtcccttccaagtctacttctagcagagaagaatgaggtaagatattttaggaatgaacggattagtgatccccatctcttttccccattgacaggtgatctggaaagtgcaccagtgttgagaacttctggggaaggcggttgcttttatgagtttgagtggcacacagctgcggcctgtgtgctgtctaagacagaaggggagaactgcacggtctttgactcccaggcaggtctgtgtccaagcaggacctctgctttaatgtgacttggaaccacttaaggttttttccttaacattctgtgtgaggttttcaaggtgacccgccttagaattttattcatgctgtttgaacaaaattctgaacatccgatgtttgaggcttatttgagatactgaaaatactatcttaaattcattattgaggtggttttgctgaatgcaaaaccttcggaacacaagggaataaattatgtttgaaaaggctttcgtgtgaattctaggcaagaaacctctctgagggagaccttacaagaaggccataatatcatgctcgtcctactttgaacatgctgttgtttattagcccagcagttatgggctttgaatagcgctttaggctaacccagtagaagggaatggtggagttggatccatctccaaggaaaatgttagtaatcgcggttctggtggcctcaaggggcagcgtctcttctgcctcctccacttcttcctgccgttgggaacctcctgggaagaacctctccctttcaaactgtggggtgagaccactctgttaactgtcggactgaccttccatacttttattgtttttattctttcttagggttttcttttgacttatcacctctcacaaagaaaaatggtgcctataaagttgagacaaagaagtatgacttttatataaatgtgtgtggcccggtgtctgtgagcccctgtcagccagactcaggagcctgccaggtggcaaaaaggcaagtagcttctcagttctgtttcattcttaggcattatatgctaagaaatattattttcaggaataggtgtgttctcacttaatgtcattgctttatgacaagcatttaaatactgatgagacctggtctgaaaactgaaggatgttaggagtttaatttcccagagaaaggagcaggcccatccttgggaaagaagggtggattgaggtcatgcctcactattgcgcattttgtgcttctcagtgcctagatatctctgtgcgtatttctgcattctgcgtaactgcagttcaaatgaagtgagttgtctaaaccagcggtgccaagaggagatttgggtcccagtgttcctgctgccgttggagaccttgtgtgggttcctgtggtctgcagcccgggcctggttctggtgactcctcacgtcgctcacgggccctcccttcagtgtggcagccttggagtgcttctgcccctcaggtctttgctgagagaaacgtgtgtttatttcagtgatgagaagacttggaacttgggtctgagtaatgcgaagctttcatattatgatgggatgatccaactgaactacagaggcggcacgccctataacaatgaaagacacacaccgagagctacgctcatcacctttctctgtgatcgagacgcgggagtgggcttccctgaatatcaggtaggaatgtttgtccctcatcgcgctccctgaggatactcatgcctgtggtgggcctttcatttaagcagagcttgtatcagtctgggtttccagccaaatcatcaccgtcattagatttgccagggtgcctgggcagtattagtattttaagctgtttatttagtgggttgtgcaccttaataacagcccacaagcctgtcagttttgggtacaaaacatacaaaagcataaaaaaaaatcctgaattaacccccacttagcagaggctaaattttcatcctgatttgttactggacagtcttctttttaataaaatgaagggagatgggcagactaagcttttcttcacagtttctcattgggaacattgctctcgtccttttttgaatcctggttttatgtcacgtgtctttctctttttgccatccctccgcgcatctgccgtggattaggaagaggataactccacctacaacttccggtggtacaccagctatgcctgcccggaggagcccctggaatgcgtagtgaccgacccctccacgctggagcagtacgacctctccaggtgaggcagagtcagctgctctgtttttggcctggtacagatgctgaggttgcaagtgttgctggtgagcgtgtgactgagctgatgatggggagtgatgctggctgtggggctgcaggaccaaggtggggcattttcagcagagtgaattctaataacagtctggtcgcctttgggatagcaaccagtcttggccacagcagagcctcggcctttagcttcatcatttaaaacaatgactgtcagtgcagaggcacgggggacagttaaggtccactgcatactgagttcagcgaaggtggagtgtaatcctggtgcgtcatgcgcccagacaagccaactcctggtagtgtgattggtggagcatgttttatttggtagctttacttccccaactacatagaaataaatgagactgaaatgtgtaagctctttaaaagcatatacattttgctttgaaattttagtctggcaaaatctgaaggtggccttggaggaaactggtatgccatggacaactcaggggaacatgtcacgtggaggaaatactacattaacgtgtgtcggcctctgaatccagtgccgggctgcaaccgatatgcatcggcttgccagatgaagtatgaaaaagatcaggtgaatctgttttcactgcttgtctcctttgccctcctaattccatgacttagtgggaggaggtggttattctgggacatccagatcaaaggcagcacagctgctcgagagaaaccctctgagtaggagtggggcctccatgtgaactcatctgcctcctgtaggagcagaagtgtgtcacacaggaatcattgttcacatggagaatgctgtgttgcagacttttgatcacacaaagggcagaggaagcaccgaatggttatgtctagcctgaattcaaaagtgtctttaggtgctttcagcagacacctgtgaaaaagagagttttgcttccaaaagctcttgtttctggattgattagggggaaaaaccgatttgggagagttgctgtggatgaaccagattcaagcacacgctctcattcgctgcagttcgtccctgggttgaatgcagtcaccgccagaacatttacccgtctcctgtggtcgttgtacgtggtgaatcttaaaagagatgtctctggacatctgtattggcttctgtaaaaatagcatgttgggaatgtacttttcttggtgtatgctaatggcagcttggaggtttttgaaaggaaggtggcaagtgtgctctggtggttaggaatcgagttcctggttgtgtttacctctgcacatgtgtgttctttactggagcaatgagttcagtgtatagtcagtcctctttattcacagattctgcatctgtgaacttgcctacttgagaacacgtgtaactccaaaatcaccacgcggaacactttctcagtcattgttggaacgagtgtagtggcccaatgtgcatagtacccgacaagcctgttcctggttgaagttgaacagggggacactctggcctcttgtttctgcctcaccctgagatgagcaggggatggagagggcgaggcagtgcagtgcaaaagctccagccctggggccagttggacggggtctgaattccaactctggcatctcaactcagagatgctccagagctggaacttccgcgctgcactgcctggtaaggtctccctaagagaagtttcttgcctagaattcacactaaagccttttcaaacatgacttactcccttgtgttcggaaagtttagcggggcagccttaggtgagccacttaacactccttaacctcgtttttccttctgtaaaataaagagagtagaatctgtcagcatgagttgtcttgggatttcagatttataatctgtgtgtaataggtttgtttgcctgatgtgcggccagtcagtacgctgagacattggggattacagccgagaaagagtttaattgtagggcaggcgaatgaggagatgagaagaaacctcaaattcacctccctaaggaatttgggttgagggacttaagggatttggagcgggccaaggtgtggggattgtttattggtagaagagtgcagggtgaagtcatcggatggggagatgaagaaactgcatttggttccctgtagggaggtcttcatagtggttagtgtcagccgttccaccggaattcaggatctgaagaacatcttacacgattattgaacgaaagccttatgattccaatgccagtgattctttctgtagcaataatggggatgtgactagtatctagtgctatgtgactttcagttacaggccagcatgcagcctgattggtgctcaattgcatgcctggaacgcagcatgcagttgttgttaactctttgaggatggtttcctattccatatgtaataaggggatttccccaggagcagtggttctgtattcaataattcattgtttgctgcagctttatagaatgtaaccaccaccaataacgaatcgactgtatcttcagggggaaaagcctaacaagactggttttcttgcagggctccttcactgaagtggtttccatcagtaacttgggaatggcaaagaccggcccggtggttgaggacagcggcagcctccttctggaatacgtgaatgggtcggcctgcaccaccagcgatggcagacagaccacatataccacgaggatccatctcgtctgctccaggggcaggctggtaaggcactgctgctggctggtgaccttcactgctgcattttttgactgagcgttgccttatgtgtctcttaacagcagcagtcttggggtgggtggcggagctaggccagtcttagttctgcttaaggtcagtgtgcggtatatatgttcacaggcagggagtgatttgtggtaccttcatggctgcgatttctgaagtgtaagcctcatcttttgctgcggagtttgaggctctggtgacatacactgtttcctggattttttttctgagtcgtacagacattatcttgcctcttagttcttgtgagttgaggatcgtggcagtggaacggggcttagagatagtttggtcctgtaggggccaagggaaagcttccctttcaccctttgaagtttccctgaaaatcagctgtcaacaggagaaaagacattaaaattttgacgtgcatagcaccggggaataaatagcaggagaaagatgacccagtagcctaatgcaacacagaaggttatgtaccctatttcacaggggagagggagataggggatgtagacagttcttttgacggggcagcaaatgattatttgggagaaagaatggacagaaattaacttgcaaatgattctctttggagcctgaatgaggaaggcattatcttgtgcacaagtctgtccaggtgtgattgctgtcctcagtcttcttttgtgggatagataatgagatttccgagtttcttttggaaagaagccttcttggtcaggtaaggaaattccagagaaagtctctccctgtgcttgagggtggaggtaacaaggcacggttcaaaggatgaccttgattctcaggcagcttctcagcatgtcaaagcactgatccttggggtattgctttctgagccccagcagtccaaaccacaaagaccacagataggaatctgaggcttggtatagctcaggcctgtgggtgaacgatgagggctgtatgtgtaatacaaaacaggaataagaaattaaggctgagggctgggcacagtggttcagatctaacccagcactgtggaaggccaacatgggaagatcactcacttgaggacaggaattggtgaccagcctaggcaacatagtgagaccccatctacaaaaaatttaaaaaaaaatttagccaagtgtggtggctcatgcctgtagtcccagttactctggaggctgaggcaggaggattccttgagcccaggaggttgaggattcagtgagccatgattgcactgcagcctgggagacaaagcgagcccctgtctcaaaaaaaaaaaattgggaggcagaggtaggaggattgtttgagcccaggagtctcagactagcctgggcaacttagtgagaccccatctctacaaaaaattagccaagtgtggtgatgtgcacctgtagtcctggctacttgggaggctgaggtgggaggatcacttgagcccaggaggcagagattgcagtgagctgaggatgtgctactatactgcagccccttggcaacagagcaagatcctgtttcaaaatagtaatcatataaacaacttcagcaaagtctcaggatacaaaatcaaggtgcaaaaatcacaagcattcctatacaccattaacagacaaagagagccaaatcatgagtgaactcccattcacaattgctacagagagaataaaatacctaggaatccaacttacaagggatgtgaagaacctcttcaaggagaactacaaaccactgctcaaggaaataaaagaggacacaaacaaatggaagaatattccatgctcatggataggaagaatcagtgtcatgaaaatggccatactgcccaaagtaatttgtagattcaataccatccccatcaagctaccaatggttttcttcacagaattggaaaaaactactttaaagttcatatggaaccaaaaaagagcccacattgccaagacaatcctaagcaaaaagaacaaagctggaggcatcatgctacctgacttcaaactatgctacaaggctacaataaccaaaacagcatggtactggtgcaaaacagatatatagaccaatggaaccgaacagagtcctcagaaataacaccacacatctacaaccatctgatctttgacaaacctgacaaaaacaagaaatggggaaaggattccctatttaataaatggtgctgggaaaactggctagccatatgtagaaagctgaaactggatcccttccttacacctgagacaaaattaattcaagatggattaaagacttaaatgttagacctaaaaccataaaaaccctagaagaaaacctaagcaataccattcaggacataagcatgggcaaggacttcatgactaaaacaccaaaagcaatggcaacaaaagccagaatagacaaatgggatctaattaaactaaagaccttctgcacggcaaaagaagcatggatgaagctggaaaccgtcattctcagcaaactatcataaggacagaaaaccaaacactgcatgttctcacttataggtgggaattgaacaaggagatcacttggacacacggtggggaacatcacacaccagggcctgttgggggctgggggggagggatagcattaggagaaatacctaaattaaatgatgagttgatgggtgcagcaaaccaacatggcacatgtatacctatgtatcaaacctgcatgttgtgcacatgtaccctagaacttaacatataataaaaaaaggtattaaaaataataataataaaatgaattaaggctaggaggtagaggaggtgagtgggattgatgttggccctgagttccttagccaggggacaacagcagactgtgtggagtttgctctgctcttctctccatggaaatgctttggggccattttatacagtcccaattgcttctgttttttaattggggtaaaatatatataacattaaactgaccattctgactgtctttgggttacatatattatacacatctctggtgtcctgtatttatcaccagtatccatgtccaggacttttacagggtcttgctgtgtcacccaggctagcgtgtagtgggtgtaatcattgctcactgaatcactgcagcctcgacttcctgggctcaagtgaccctgtcacctcagcctcctgagtagctggaactacaggtggagttacctgtagttatcaaaatggtttttaaattttttgaagagatggggggtctgtctatgtggcccaagctggtcttagaactcctaggttcaagcagtcctcctgcctcagcttcctaaagtgctgggattataggtatgagccaccatacacagcctagaagttttttgatggtctcaaatctaatttggaaaggagagctttatttctcataaagatttgcagcctgcagggtggccatttctgacaggctgggaagtgtagcctcaggccagaagccagaaacaagcgctgggagggaggaagactaagacacgaatggatgctgaacaggttagtcaagtatacatattcagcaggttacaggagcagctatgcatattcacgaagggatggcacacacatgcgtggtaggcaacatgtatgcagcatgtgtccccatgttcattttgggttgaagacataacatttaaatatattacagttgggccctgtatgtcgaaaggtgaagcagaggacatgaaggccctctgtgtgcagcctccttagaaggccaggaccacctgggagttgtggtctcttatcagcagggaatgctggtcgattgttgtgttgtcagaaccacaaaaagggatggacgttgtcaggtggtaggttgataccagcagcagagtctttcaaaagggtcggcttctgtttagcacttagggaagaaagcctagtggttaacgaggaaaggggtgtaatggggtatgtctcacctcccaccccgtcatggacaggaatgcaatttttaagtttctctggagtccccttggctaagagtggggtgtgttcagtcagttatggggcttaggattttattttcatttcttattacctgtagttttaggtttataccagggtcatgtgtttttgagaaattatcaaatggttaggagagtggagagactggaagccatgttcattatcaactaaattattaacaatcccttgttaagggtgtgtggcagcttcctcaagccccactgaaatgagccagcaggatgcgttctttccctgcagtggcccagtggacgctgcgtcactcacctgcctggtctgctttgtcattggctaacactctttttcctgagagacacttcctttagagttgaagatctcggtgatcagggaatgaatgacgggcaggctgagcttggcccatgctctctgcgggaggtgttctacccaggttgtacacactctccttgggttcacctgagcttgggccgcccacttcttctctcagtctcaggaaggatccaggtttggtgttccacggggagatgcctaggttgcccagttcagcctgctggtctgtttttgggcacgtctgtgcattccctgcctgtggactgccccctccttctctggtttcttgttgccattgagacactgggtagttccagaaagttcttggacccttggttttccagcttttctgtgataccatatttagtttacagggtagcttcacattgttgtcgtgtctctcagcactcatatagggcctgcagcacaggaaatacactcactgaaggaagaaagggccgctctcccaggggtttgcagtcacagaactttcacaggctaaagctcagtccctttcacaagcacattgtgaagtggaaggagcaggtgtgtttttattctactgctagtgttgctgaggcctggagtgggtgggggctttcaagggtagagagcccttgacggccaagggtgtggactcagtgttagtggctgttgttcctgaacccgtgaccctgggcaggtgtcttaacttccttgtgcctcagttttctcatttgtaggctgtgtttgtgggtcactgtgaggcgcagttgagaaatactaacaaaactcatagtgcagtcctggtgtgtgataaacactccctgatcggcagctaccattgcctgtgtggtggtggtgctctcacaaagctaatggctctttgggggagctttttatggaaacatacacaccgaagggcacacagatgataacgtgacacagctgggtgagtgtccataaactacacatcaagaaagaacatgcttccccctaggagccctcctgtgccctcttcctgccactgctgagcatcctcctgacctctgacagcgcaggccattgttgcccaatcctgagctgatgtcagtgaatcctacgtaccgttgcctttgtgtatggcttcttgcattcaactttttgtgtagggtacttttcagaaccttgagctcagacctaggtttggatctgaattctaccatttactgctggcacgatttctatatttctgaatatccaagcgtaggagattattttgtcttcatagggagaatgagaacattaaattctaattaggtaatgcacattaagtgcctagcttattggctgactcataataaacatctagcagattttggctatttttatgtctcaggcgagtattcttttggttctatcaagttccatgttactgtattgacttttaccctggatttgcccattcagaacagccaccccatcttttctctcaactgggagtgtgtggtcagtttcctgtggaacacagaggctgcctgtcccattcagacaacgacggatacagaccaggtacgtgtgctttcacctggccctcgtgctgagctgcctgctggacatcctcaactcaccccagtgttccagctctgaaccgacccctgccccttctttctgaatcagttactatgttgcattgacaatgggtgtctgcaggtcacccagagttcctctccactccgcagctcccagctcctgggataagaaccaggtccctcagtcttactctctgctcactgtagtttccttccttttgtttccattcctttgtgccttccatgtggcagtggtatcctggtgggctctggggcttctgcaccaccggcagatgtctgactagtcgatacgtcactccacacctaaaccatctcagtgcctgtcccctagagggtagagcccgtatgttttaatgtgaccctatccatagagcacagcctgcaggtgttaatgtgatcctgtctatagggtaaggcctgtgtgtctctcacctgtgcataggccagagcccacaggtgttaatgtgatcctgtctatagggtgaggcttgtgtgtctcaccgtggccctgtgtgtagggcaaagcccacaggtgttaatatgatcctttctatagggtgaggcctgtgtgtctcaccgtggccctgtgcatagtgcagagcccacaggtgttaatgtgccacttgagtctctcagtgcctactggctcctcccgccttctgcccgggtccatgccctccacttgttgagtgcaccctgcagggcatagtagtaagctgctcagtgacgttctctctgacctccccaaggtagtgagttgttttcacagcaccgtgtatatttctttatggtgggacctgtttgccttcccacttcctgttctaagctacactgcagactctggcagcagagaccaaggcttttccaaaccaacggccccagcacagggtcctggctttgtaactgctcagtgagggcaggatgccaggcaccctgttcatggacaatgtttctggggctgtggccaccgtctccttccctgcattcagtggacagagggaggcccagggcaaagttaaatatggagaggagaggatatcatttgacagtcacctggtcatacttcccatgattaccttaagggaataattgagacagaaaacagaacatgagatttcttaagatgtttattttctttaagaaactaatttatgagtcttatatttcctctccaactttagggagtagcagtagtcttcttagggaaatgcagtagccttaacagcttccaggtgagtgtaatttctgagtctgggctcacacttggtatacttcagggtggtgtatttgaagaggctacatgtagggctacatttttgatagggattttgaaagtaaatggagaaacagttttgtcaggtgcatacttgcaggtttctggaggtgctgtatgtatgttatgttcctgtggaattggtttgaatgcgcccctttttccccattttgtttcctgtaggcttgctctataagggatcccaacagtggatttgtgtttaatcttaatccgctaaacagttcgcaaggatataacgtctctggcattgggaagatttttatggtaagagcgatatgatgcatttccagtttgctttgaaacagggggagagtgcattattgaagtcacctgcacgtggtgatatgagagaattgcccaggccactgtggtggcagctcttactcagaaggagatgggaaaatccagatttaagggaaagatgaagtaaaaccatttaccaccattctggcacagttcagacgtgaagactgttattcttcaaataataagttgttctctttaaggaaacactttctaaaggtagtgctgaagcctgtactcattgtccattggtctctccttactgtatcttcacaccagagagcataattgacttcatttttacaactataatataataatttttaatggaataacaaatttaagaaatgtagggtaccactttatatttacttgtaattaacatgatttcaatgatacatactttctcataattgaaaatattataacattatgacttctgtgtcttccctctcttatatatggtacattattacatgcagtagatcttacacatttatagatacggggatgtatgaatttaaatgatgtatagatactaaaccttaaaggcagtttatagatactgccctttggacttatgtactaactgtactaacatgccagaaagtggaaagttggcaagttaactaacaaataagaaatgtttaacctagtgggatttggagttgctagggttcttgtctgtggtgagatacgaggcataaatttgtttgtatggctcttaccgtctgacctgcagtttaatgtctgcggcacaatgcctgtctgtgggaccatcctgggaaaacctgcttctggctgtgaggcagaaacccaaactgaagagctcaagaattggaagccagcaaggccagtcggaattgagaaaagcctccagctgtccacagagggcttcatcactctgacctacaaagggcctctctctgccaaaggtgagctcagagccatgttgttttgtagctaaaaagggccctggtggctctgtggctggccatgcaccttcctgagtgtaggatgtgcacatcccccgccaccatgggctgtgctgtccaccttgctgcaggagccatcacggtggtcttcctgcgtttgacctcgcagaatacaggggtcccgttatccgtggcttcacttttgtggtatcacatggtccgaaaataataaggtattttgtgagaaagaatgagagaaaccacattcacgtaactgtcattacagatattgttacagttgttctgttttattgttgatctcttgctgtgcctagcttacaaattgagcttcatcctctgtatgtgtgtataggaaacagcatagtatatatagggttctcaatttcaggcattcactgtgggtctcggaacatatccccccgcagataaggggggctgctgtagcctgtattcaacacagcagtcagagtgatgtttctgaaacatcacatcatatcacttcccagctcagagccctcggaggctctgcactgtacctagagtagaagccagtgtccacagtacggccatgggacgcccgtgggggctctctgagatgatcaccccctgctgctcttcccgcttggcccgctggcctccctgtttctgatataaacaaagtgcactgtctcccaccctcccctcttgaatctttgtacttgctcctcgctctgcaaccagcacagctgcaggcaggggttttcgtctgcttcattcattccgatacatggtaggaacttagtatttgttcaataagccaacgaattagagttacattgtcttctaatgcttggattggtaaactcgtgggatttaaatattttctggaagagtaggaatgccaggatgttaggcttatggtagaaacctgtcataacataggccgctgttgcagtgtgtaaagctgtcatcacataggccaccattgcagtgagtgtgtaaacctgtcataacacaggccaccgttgcagtgagtgtgtaaacctgtcatcacataggccaccattggagcgagtgtgtaaacctgtcataacacaggccaccgttgcagtgagtgtgtaaacctgtcatcacataggccaccattggagcgagtgtgtaaacctgtcataacacaggccaccgttgcagtgtgtaaacctgttgtaacacaggccactgttgcagtgagtgtgtaaacctgtcataggccactgttgtagcgagtgtgaccactttgttcatgtcgagtccctcgatacacacttggtgccctggtgtcattgctcccacgaacggctgtgaagcttgttgccagtggcagccttgtcctgttgctgcactgtgcttgtgggctgcgccatgaatactgttctgtctcttaaaatctgggccttcttgctttacaggtaccgctgatgcttttatcgtccgctttgtttgcaatgatgatgtttactcagggcccctcaaattcctgcatcaagatatcgactctgggcaagggatccgaaacacttactttgagtttgaaaccgcgttggcctgtgttccttctccagtggactgccaagtcaccggtaaggccgtgcggcctaagaactgagaggccggtcaagagtcagtgtgtgtgtgagtggatatgaaggtgtgtttctgtgtgtatgtatatttgtgtgtgtgtggtgtgtatgcttggttatgcaggcagcgtgacatttctgttatatattctctttgaatgatgcctagagttgtaatgtttttcttgaagagaatctgactatatagttaatggttttaagctatcttttgggatcagatacatcttaagaacagagaagaaaatgcagaggaaacacatttcacatgtactgtcagagcttcttatttgagggtgaaaaaaaaagaaaaagatgttaaactccctaagctgtgccctggaagctgacagtgtatacaggagaccttgacctctgggattgaccctgcctgctctgcaacagtggtacttccttgtcaagggcagtgggggtttggcttttttctttaaagagtctttagggactcactatgttgcccaggctggccttgaactcctggtcctaagtgatcctcctgcctcagcctccaaagtagctgactacaggcgcatgccaccaggcccggctgtgaagggcagttttgagggacagagtgggtgtgttttgtaggcaaagcctctcagcctcccgtggatttccttatcctcacagttaggaatgccaggttcacgcctcctcagggcttatttagggtgaaaggcagttcttgagtgctcacaaggaggcagagttctccagcgtggttttttgttgtgtttcagacctggctggaaatgagtacgacctgactggcctaagcacagtcaggaaaccttggacggctgttgacacctctgtcgatgggagaaagaggactttctatttgagcgtttgcaatcctctcccttacattcctggatgccagggtgagttctccttggtctcttgattggcgtctgttcattttattagagcatttgactcaaggtcatcgccttcctcatgcccaaaccacttattctgttcttccaggcagcgcagtggggtcttgcttagtgtcagaaggcaatagctggaatctgggtgtggtgcagatgagtccccaagccgcggcgaatggatctttgagcatcatgtatgtcaacggtgacaagtgtgggaaccagcgcttctccaccaggatcacgtttgagtgtgctcagatatcggtgtgtgttcagaccagcaatgagatgttgtccccgggtgactccatttcccatttcccttgaacctctgaatcttctatcttgtttaaaacttgcctgtgttttcgtggagtttcagccattgctagggtttgacgagaatgcactcatttcttcaggtcttaaatgtttaataaatgttacgtagtttgcacatggaggtcaaagattgggtactaactgtggctatcatttatttaattttttttttttttttttttttgagatggagtcttactctgtcacccaggctggagtgcagtggtgcaatcttggctcactgcaacctccgccccccaggttcaagtgattctcctgcctcagcctcccgagtagctgggattacaggcacctgccaccacgcccagctaacttttgtatttttagtagagacggggtttcaccatcttggccaggctgatcttgaactcctgaacttgtgatccacccgtctcggcctcccaaagtgctgagattacaggtgtgagccaccgtgcccggccccatttgattaatttttaaaataaacaggaaacaaatcaggctgctgatttatattacagggctcaccagcatttcagcttcaggatggttgtgagtacgtgtttatctggagaactgtggaagcctgtcccgttgtcagagtggaaggtaggactgggcctgtccctacaagtcattttaaatgtatagagtagcagacgttctgaacgatgccttagatatgagaccgtgtgataacagccatagctggggtcatgagacacacgctagggggaggataatttcttttccttgagcttttttttttactgaagcatattgctaatttcacgagtgacattttccttgtgtgcctggattgatgggattttggcgtctgatgcttgaagacactaatgtggggtttggttttgtgttgtttgatgaagcaagtctttattcggggacctagactttcctagaaagctgtttgccaggcgatttgtattatatataaacaaaatcatgtggaaatggcttttaatgcccatttatagctggtatttacctaaccaaaaattgtaaaagtttttttttttttttttgagaccgagttttgctctgttgccaggctggagtgtaatggcgccatctcggctcactgcaacctctgcctcttgggttcaagtgattctcctgcctcagcctcctgagtagctgggactacagggtgcctgccaccatgcccagctaatttttgtatttttagtagagacggggtttcaccatgttggccaggatggtctagatctcttgacctagtaatccacccgcctcggcctcccaaagtgctgggattacaggcgtgagccactgcgcccggccatttgtaaagctttttgcttgaaaatgtgaatgcgtgtgtggttgcagttgcccttcacttcttccatgttcttgaaggggacaactgtgaggtgaaagacccaaggcatggcaacttgtatgacctgaagcccctgggcctcaacgacaccatcgtgagcgctggcgaatacacttattacttccgggtctgtgggaagctttcctcagacgtctgccccacaagtgacaagtccaaggtggtctcctcatgtcaggaaaagcgggaaccgcagggatttcacaaagtggcaggtaccattgtttgtcgttttccttttgttgcaaaggaatggaattaaaatattaaaatattttgctgaagatgaattttcccttgagtcagaaacatgagtgttctactgtaaaaaaaaaaaaaagcatattaatgatatttcggattttgcttgattttcttaaacagagtacatactgaaggatgttggtagagcatgtctattttattcttagttagccatgccagttactgactctaaggtcatatttctcttctttattacaacgttgggacacagtgagctagccagtgttggatgttctggggtagtacttgatagcattgagtcacagggaatgcatttagtacgaggtttggctgtagaaattacagggcacgctgttggtcattcatgctgtttcagcagttgggcaagatttaaatacatttaggaacttgtaaaaatgaagtcaaagtagctggtggtgagtacgtggacagccctcaggcacagtggagaaagtgacattcccttaggtgatgaggctaaggaatgcctcatgtcatcatacacgggtcagtctgtgacgttgcagcagccttggacaaggggaagcctgattttattcccaaagtgtaatgtgacaggagtgcatggtatggtgctgggaggccagggatactttgtctcacactcttcagggtgtgtggtgtcacatgtcttaggctaagtttgacagcctagggacccgaaccaaaccttgtttaatgttctccttctttacaggtctcctgactcagaagctaacttatgaaaatggcttgttaaaaatgaacttcacggggggggacacttgccataaggtttatcagcgctccacagccatcttcttctactgtgaccgcggcacccagcgggtgagcatgtaccgacggccctcagcggggtcttctccccaccctcaggctgctgggatcatattagaaagaatctgtcctcagatctcatcaaatctcctggttaactgagtttaaaataaccatttacagaaaatatgttgaaactttcatcagttagtattgattttcatgaacgtaaccattctttactattttcattcttaaaactcaaagtataaactaaagttttgcattctcacttttatatatgtgcctcttaacttttttagccagtatttctaaaggagacttcagattgttcctacttgtttgagtggcgaacgcagtatgcctgcccacctttcgatctgactgaatgttcattcaagtaagtccatggatgtgttgtctcttttggacagactaacttggtatgattttgctttaataattagtggtcttgggtgcaggggattagattagtcagttaatttacctaggactcggtttgctcatattaaaatgaggagtcgggctaggttaactctcagctccgtcaccacctggagctgctgtggtgactgcatggggaagggattggagctgaagcagagagtggacccctggcactcttgcgtgatccacatgtcagtgagcagagtgggccaggagcggtgtggtgacccctgcgatgaagggaggtcttcgttgcatgtgatcgtccacagagctgctctcaacagctttgccagatcgccctctggacacctggggtcccatccttagagattttggttttgtgggtctgcggttctgttttttggagggatgccctgtgttctgccgtgtgaaacacccagtatgagccacttgatcactgttgactttcctgggggaaagtgcaggtgattctgtttccttccggcctttgtcctgttgtgtcatcggttatttatgtaggtgaaatcatcatttaagttttaggaacgtatgtaaatgcaagcatttagtaatttatgttcagtgactttaaatcataattttagtaaccttaccttttccagttaacattttgtaaatattttcatgtgaaacaaatttgtttctcatttctactggatgggaaatgtcctcagtagatatccccagttcacttagcagttctctttctgccatgtgaggctgccttcagttttctgatatttatatacaaggaataaaattttgattttctttgcacataaagcatttttcctagagatatgtgtatgtgtgtgtgtgtgtgtgtgtgtgtgtgtgtgtatatgtatatatatatatgtattttttttgagatggaatctcgctctgtcacccaggctgaagtgcagtggcgtgatcttgtctcactgcaacctcctcctccctggttcaagcaattctcctgtctcagcatccctagtagctgggattacagacaccaccatgcctggctaatttttgtggtgtttttttttttttttttaatgagacagagtcttgcactgtcgcccaggctggagtgcagtggcgtgatctcgactcactgcaacctccgcctcccgggttcaagtgactctcctgcctcagcctcccgagtagctgggattacaggcgcccgccaccacacctggcgaatttttttgtatttttagtagagatggggttccactatgttggccaggctggtctcgaactcttgacctcgtgattcgcccgccttggcctcccaaagtgctgggattacaagtgtgagccactgagccagcctattttttgtatttttagtagagacagggtttcaccatgttggccaggctggtcttgaactgctgactgcaggtcatcctccgtctgccttggcctcccaaagtgctgggattataggtgtgagccactgcgcccggccttcctaaagatatttttatgctaagtttttaaaagtagaattaaatcagaggagaattttataatctcataataaaagttaatatatgtctattgtaattgagagtccaaaaatattaatagatgaaattacccaccctcacctctccctccccaacccctagcttcactccactttttactgtttcttcttgtggttctttttggaaccttctataactctaaacctctgtttgtcagcttctaatggtgtctgttgactctcttttaaaagatgaaagctgtcctcacctgtgctgttctcctctcctctttcctctgccttggctttgttagttctatttctgtttcttctgttgactacttttagagcatttggtgatattcactaagctctgttcttgtcccatcaccttcaggcagctttcccttcctgccacctgcccctggtttgggcactcctcctctcgtgcgtgcagtactgcagctgccactccgaggtctccttgccatgtcccttgtcacacgtttggttagtcccacacagtaattagaatgatcctcttgagatataagtcccaccatgtcgctcttgctgaaaccttcaatgcagtgagcgcccatctcattgggacctacaggctgaagttcttcctctgatggacatgacccccgtgttgtctctaataacctcactttcactctgttccagccacacggggtttctgtctttctcgggtcatgtcgggcttatgtgcctcgggccctttgctcatgctgttctctgcctgggatgcgctttactgggtgccaggatggtcagtgattccatttctctcagagtctattcacaggtccccttctcggtcacgccttctctggctccactgtctaaaatttcaacagctgcctctgccccccgaacttcatatcccccttatctgccttttttccttcagctcttacttccatcaaatacagtatgtatttttaaaagtcttatcttgttcacggtcattttcttccacaggtaattttggtaaactttgtaagattgatgatgtttaatactgttttgtttaatacagtacccccagtttagcacacagcttttgaatgaatgaccagtttttattcccctctgaagcgctaagagctgccgctgaggtggcatctgtagctgctcccgttcctgctccgtggtggcagagtgtgtgtctcactcactgttaatattgctcctggcatggggttggttcccagttactgtctgtatttgggatttgtgtagttagtgaacctttagcctgtgcagaaaggtcagcaagcccattttaatttcagaatttcagtaactgctggcggccttggttttaaacaacaggtggcgtgcggctgccccgggcatggcccctgctgtgtgtgctcctagcatcttggctgcttacctttgtcaccagcaagttccacttctcagtggcctgagcacagacggcacgcactttgcagacttgagtttttctgttaaaatttaaatttttttttaagtgagcctaatagtttcctgaactattatgttcagggaagttatgttgttgctgattctgatggggtgtgtgtgtgtgtgtgtgtgtgtgtgtgtgtgtgtgtgacagagacagagagaagtcgagtctaaagttctgtcaggcttagactatgcctgaatacttgaacgtttctagacagtgcccaatgtttaaagagaatacgaccaagcctaactaactgcgggttttcttcttttcagagatggggctggcaactccttcgacctctcgtccctgtcaaggtacagtgacaactgggaagccatcactgggacgggggacccggagcactacctcatcaatgtctgcaagtctctggccccgcaggctggcactggtgagagagggcctcctcgtggggtggtgtttgcagtgagtgtatcacaggccagcactggtgagagggggcctcctcgtggggtggtggttgtagtgagtgtatcacaggctggcactggtgagagagggcctcctcgtggggtggtgtttgctgtgagtgtatcacaggccagcactggtgagagaggtcctcctcgtggggtggtggttgtagtgagtgtatcgaaggctggcactggtgagagaggacctcctcatggggtggtggttgcaatgaatgtattgaaagctggcactggtgagagagggcctcctcgtgggatggtgtttgcagtgagtgtattgaaggctggcactggtgagagagggcctcttcatggggtggtggcttgtcatgagtttatcagggaagatcaagtaggatggggattctttggaggcgctttactctctgcagcatggacgtggttcggccgagaaacagcaggacgaagaatgatttaagggtgttaacagttgatccctagtatggcccagggtaaatcagtgctgaggactgctgggaacatgataaccctttctgaacatgaggagatgaagatataatagatagaaataatagccatggtgaggaatccttcttagcaggtagaagatggggggtgtgacgtggaggtcttggtgtgtgcctgcgtatgttgagagttgtatggtcggtccttttgtgatgcagggacagctcactcaaacctgcagtggttggctgagactggatgtcagctgtacatgggaaaccaagggcacctccagggatcttggtaccactcatggcccctcggaaccctgaagatgaaactcatcccatgttcgtggagtttcatacagccccacctgtatcttgggtggctcacctcaaaggcggtgtggttatttttagctgcagaaggtggttccatcctctgtgtggtttgaggctgtggttccacttccccttgctgcgttgtgctgtgcagacttcgacagtggctgtacccctgtggcatgggactagttcttcacccagggcacatggcacaggcattttagggactgggaaacaggcagaattcttggtagcttcttgaataaagaaggtgcatggacgtaggccatttaaaatgttcctctgtcttaatttgggaatataaccttcatcctatatggggttcagaaagaatttcgactgctacagcctagctattcctctacactcacgcccgcctgccccagtccatctgtgacaaaacagcatgtaagtgagtgagaactaacgtgatgtcattgtcatctgacttatgtgaaagaaatagcaggtattttgaagtgactcttagaaagcgtatgaagttctgcagcgtgtgtgacatttattgcctgatgaagttctgttctagcctggggagtcactaaaggcaactctttcttgtgtctggtgctgcagagccgtgccctccagaagcagccgcgtgtctgctgggtggctccaagcccgtgaacctcggcagggtaagggacggacctcagtggagagatggcataattgtcctgaaatacgttgatggcgacttatgtccagatgggattcggaaaaagtcaaccaccatccgattcacctgcagcgagagccaagtggtaagggactgttcctgcaccttctgctgttgcagctttgggaattgagcccatgtgcagggcggtgagccgcacgtcctcatctgccttgggatgcgagttctagagcctgggatgatgcgcccttaccagaggttgggggaacagcgtcgccgcggcctgcaatctggggaaccctcgtgctgtctggctccttagaagcttgcctggcagttcccgactcagaattggttctcttcagagtttgactcagacccctaaaggctgtggaggagattgttgtttgactacatgcccttttgtcttcacggcggcagcttgggaagcacgagaaggttggctgggcccgggtcacaggtagcgctgccacttcccagccacataacttggttaattactcaggtagtctgccctgctcagccgttcataacatgaggcatacttgtcctgcccattgcagggtttcgagagaagaggtaggaagtgccaggtgtcatttctgacacacgggagatgcacagtcagtgagcatgagtgcctgtgatcagttcttcccttacttgtttggcatgcacgtaagcaggtgtcgactgcatacaggtttttctgtgtgtgagattgtggtgagccccagtgctagcgtgcatgacgagctcggtggctgagttgggcattaactcgggcaagaccagctcgctgggtgtcagggtggctcgccccatgctctccagcggtgggcagcagtggtaggggagcttgggatggggggctccaggagcttcaggcctgccctcttgcctggagcggcagggaagtttcctcttgggaagattgtgcagaggcttagtccagactcatgagctgctggggcctctgagcattctcctctgtgacctgagaggctcatggccgaggacaaaagggctgccccacatgtggggggcaaaggtgagagggtgtgtggggcccctgtgcccagggcccagaaggctgggagggaagggtgaaggggtgtgtggggttccccatgtccagagcccaggaggctgggagggaaggatgagggtggtgtgtgggggcctctgtgcccaggacccaggaggctgggagggaaaggtgaagggtgtgtggaggccctgtgccccagacccaggaggctgggagggaagggtgggggtgtgtcgaggcccctgtgcccagggcccaggaggctgggagggaagggtgggggtgtgtcgaggcccctgtgcccagggcctgggaggctggactgcagcgtggcttatcagggtgcccagcaggaatcatggggtttacctgggaaggaaggtgctgctgaactcatcatgctaactctgcagtggacatgaagcgttttgagatgagcagagtaagccttggctggtgccagtgggaggatgcgtggaatgggctagttctcttggtatatctttttgttttgactgtgataatggattttacctcatttggtttttagaattttatcaatgatttacacatttgtgtctccctgtagcccttccagcatcctttgcacgcctgtccccaacccctgtcctgttcctcagcctgagggagcttcctggtcccctaagtgtgttgctgcctgtgggtgtttcacttacctgcaggggaagcccatggtggcagctcaggacacattctgaccctttgcttttcctaatctgcgcctcatcccacaggcacatggagacagaaatgtcacatgctgtggagtttttcagagaagcttccacttgtaagttgaaatcatgatagacatggagtttttgcgtgatcccttcaggacctgtctgtgctttgttgtagaactccaggcccatgttcatcagcgccgtggaggactgtgagtacacctttgcctggcccacagccacagcctgtcccatgaagagcaacgagcatgatgactgccaggtcaccaacccaagcacaggtgagaggtggtgccagtcgttaaccccagcgcaggtgagagacggtgcccccaccaaacccagctcatcaggggagagacccaaagagaagctatgggcagcaggcgccctgggcagaggtgtcatggtgtgtgggtgtgtttggcctttctctggatgggctgctgtgtgttctcctggctctccttcagtggaggagagaatgctcccacagagaatccatccctcctgtcactctcctggtgtgagaggtgctcctgactggggttactgacagtgtcagtccagcagctctaggctctccagggcaggttagagctagcccctggctgcctttcagcatcagtgtagtggattgccaggagtctctcacctgcccttgtgctgggcacccagaaaggcacaggcacagtccattggcagcaagaggtgtgctgggcaggctctccccatgcccaccagactcttagtggctgctgtggtatggcccagcagagggtgctgtgagccacgatcttttcagctaaggatgggacatctcatggatcaagggactgacagtctcatgatacagcctggctgttggtggaggatttaggacaggggtcgtggtgagaagtcagaagtcccgatgctgacataatctgtgtgtgagctcgccgatgatgagcctcccaagtctcagctccctggagtcactgtgtccccatcttcttccaccctacaggacacctgtttgatctgagctccttaagtggcagggcgggattcacagctgcttacagcgagaaggggttggtttacatgagcatctgtggggagaatgaaaactgccctcctggcgtgggtgagtgctgtggtctctcgtgtgttgtctgactctcccgtcctctggggttgtcctcagtctctttgcatgctaatggcaaaaaggatgagcagagccaggaagctgagacgcttttgtctcctgcagcagtcaccccatgtgggggacacatggtcatgtgatggaatgaacattcaatgtaaaacaatggttaaagccggattggacacttgaagttataagtgttggctatgaaattgatggtcctgacttgcgaaagttctcatcagaaaattggccatcgagtctgtgattgtgttttctccgcctttcccttgtggtgcaggggcctgctttggacagaccaggattagcgtgggcaaggccaacaagaggctgagatacgtggaccaggtcctgcagctggtgtacaaggatgggtccccttgtccctccaaatccggcctgagctataagagtgtgatcagtttcgtgtgcaggcctgaggccgggccaaccaataggcccatgctcatctccctggacaagcagacatgcactctcttcttctcctggcacacgccgctggcctgcgagcaagcggtgagttttcagatgggcacgggagaagtgcatgtccagtgcctggctgcacccgggccccttcgtcaggttcacttgcccactagtagatgcccagctgaactgtccactcctgatcaccccaataataaagttgactggaagtgcccagtgctatgtaatgaagcattttgacacctttctactttttttgttgttgttattcagcttttaaattcttatggatgacctagtggtgattaggaaaatttttttgtagactcaaagcagtctttcctacttaacagaccgaatgttccgtgaggaatggaagctctattgttgacttgtctccccttattcatcgcactggtggttatgaggcttatgatgagagtgaggatgatgcctccgataccaaccctgatttctacatcaatatttgtcagccactaaatcccatgcacggagtgccctgtcctgccggagccgctgtgtgcaaagttcctattgatggtccccccatagtaagtatgacaaatccaagggtggagataatttttgcaagacttttagtgataacctttgcgttgtttcttgccttcagtggggagttgctcaagcataaaaaaaatggagaaagtaagtgggactgtgtatgttctgggtccgctactggaagattaaaggtttgcacattgaactgttcgctgatgatggtagccagccagtctttgagcatgggaggtaacacgaatatgtgtgtagggactctacttgtcatgagcctcagggttgacccaaatcaagaagtttttaggtgaagtgacaggaaagcacattgccctagcctggtttctttgtgtgaaatgccttgtcttctgtagttaaaacgcttgcgaaatgcaaacagtttctttggcaaggagttataattaagggcaagagtacgtttgctaatagctaaatattttgccttaaaagctttggttttatgcattaaaaaattattttgtagagatgggagtattgctatgtcacccagccaggctggcctcaggctcctggccttaagtgatcctcctgaagttctgggattacaggcatgagccacagtgcctggcttactagcatgttttaatagaaatttggatctttaaaaattgtctccatgagttatattcatattttgtcaaatccttggtatgttttaatatttgaatgtatctcacaagtcgtctgtatttctgtctgtatcatctattatgctttaaagatggatcctcttgtaacatatctagatgtcctttagaaagatggccattatatgtggcagtgatatggggagatgtcaggagtgtgtaaggagatcggccacagcctgaattagcacagctccagctctgtgtgagatggaggcctggacaagctgagtctccccaggaagctctttggtagcgtcctttctgacagcgcagaccggggatcctcgatcgggaatcattgcctggccacccattgtcaaatgttaaaagatgtagaaagttatttaactggagaaggtgtggtgccacgtggtctgaacgtgccccacagtggtgaatgaagagcactgtagctgagaacaaaatcatggggaagctgcttatacacacactcacacccacatgcacacacacgtgcatgcacacacacattcatcacatacacagttcctggccattcacctttatttactttttaaaaataaaaaaagagttttttgttttttttctcataatactcagactggtcttttatttatttgtttattcactcaaaaatatctcttgggcagccgctgtgtgccaggtgctgtgctaagcaatgaaaatgaacagtgaacacctcctgtcccctctcccaaggacatagccagtggttactgctgggccacgtcagtgggcagtcccggggcagcactgggcagtgagggtggcaggtcagcatggaggttccggccttcccctgtcaggtggtgggaggaccgtgtagcatccttagaggtttttcaggttccgggcttccctcatcagctgatgggaggactctgtagtctccttgatgtgactggagagattcctattgcttaggatctttgaaaattgaagatacctagaaatagaaccaaccttagaactaacgttaggatcaaaacgataaccactgacatacggaggttacacagcatctgtcaagccttccaactggagttggtataaacccagtttctttagatgctgctcattctcagaacctatgaggtctggtttttgcaattctgtatcaattcttaattccactaaccttgggaatggttaatttcctgaaatactgtttgccctcgctctttgtttaggatatcggccgggtagcaggaccaccaatactcaatccaatagcaaatgagatttacttgaattttgaaagcagtactccttgcttagcggacaagcatttcaactacacctcgctcatcgcgtttcactgtaagagaggtgtgagcatggtaagtgtgggcctgtgacgatctagatgctcaactgcgggttagtgagccaaggctagacaaccagaaagtgcgtgtcaggtccaaggatactcttattcaaaatgtctgccttgggtaagatggtacgctagtagtgtgtctgaataatttaaaccactgattgagggctgagtgagctcccccgcagttaacagcatatagaaacttgctgtaatttaaaaacatagaacacaagtatagaaatgacattcagctttgactgctgatgcataaaagtgtcataacttttgtttttactttaacaattactgattttattctaactgggaagtcagaaagacatttgggcagctatagtcactcaggacatagcccagaagttaacaagtaacaaaagacccctggaatcagaatagctacaacaaagtggcaccttttacttataatgaggtattgacttccattttatgtgcattaaaaaaagaataccagcttccattataatgagttcggtattggttatagtctttgaggacgttttcttttgatccctgctctgtgagataaattggtagattatggcccctattccacagggactcagagtagctctgcaggggcagagccaggtcccagctactgcacaggggaacagctctttgctccagggacacagcaccacagcctgtcgtctgtgcttctgaaatctctgaagctctgaaaacttggggctcctttgacatgaatggactgaggctatttatggtgtggatttgtcccacctaatgtggatattgatacatctagctgcagaaatattaatatgtttgatcacaggatctgggggtgtgagaattgcctcttaaaatcctaataaagatgttggattccaaggctcatctgacccctaggagttcaggtgatggattaggatctgttgggtgtcttgtaattctgataaagacatccttctgatgtttgggcctggagcaggtttgtaaagggactgttagacataggtgtgctgacagtgacagaaagtgacctggcagccgcctgaccagtgagagagacagtatttgagaaggaggaggaaacagtcctgctgtttggggctactccacaggggcccagagcacctcaaagcccttggatgtgttcatgaatcttagagtgtagtgacagtcctagttagtaaggaaaggcagagctgtattcagtccacccattgcatctgtttataagcgtattggcatatttttataggggtgtctgggtgtgcctctgtagatgcacacagcatggggcaacgtggattttgccttgcggggggcttctgcattaagttcttcgttctttaaaggacagtcttcacttctaagacccacctcatcatgagtgatgctttgttatctacaccaccagctaaagagtgtggaactatgccttgctttgactctgctgccaacgtgacaaatcgaattagctaatgtgattttagttaattctcagcagctgcacattgagggtgattagtgtttacttgattttagaaatgaagcatcttatgctgaatgtgtgttctagcgttccagaaagatttttagaagatttttcttccccagcagttttcattttcaatggaagtacttttaccactgaatcatagggaaaaagatgcttaacattaattacaaatggaattcctgagagctgcctcatctttttttgttgctgttgaatgagggagggaataaataaagtgattctacaatacttggcctatggaatatctggccatgtggcatcttgccccttgaataaatgtctcccgtgtctagagacagtagattggagcacttgtgaggcagggtctcagtttcacagacctctctcatgacatataagccctccccctttcttcctttgaacccgtagcacagaacattgaggctttctctctaagtagaagacaagacctggattcagccagggagctcacaggatgtgtagggggcaagggcagggtgatgtctgtgccttgaagatggcattgggtctttcagctgctgttgtctagcatcccttccctctgagaggccgctgtgggttatgcacagcccctgtagggacgtggtgtgtcactgctatctatccctatgccatggggtttttaagacccgtgctcttcctggcaacagggaacgcctaagctgttaaggaccagcgagtgcgactttgtgttcgaatgggagactcctgtcgtctgtcctgatgaagtgaggatggatggctgtaccctgacagatgagcagctcctctacagcttcaacttgtccagcctttccacgagcacctttaaggtaatgcgttcaccctgggcgttgctggtgcaggtgtaccaggtgccaggtgctgtgaggctgctgggagtgttttggataatgtggtacctgtgagctgagagggtgtatgtggccactgggcagcatcttggtgctctcgtagggcatgccaggtctcaggaaggttcttggattgcgtggccaactcagcgcagctgacacttgcgttgtacctcatggctctgcacttaacgctttttgatgataagtaacctcatgaggcgggtagtgggaccctttgtatcagacagagggcaggtggggcagcccggagacatgaatgtaaggtatccatgggggcagggccagctcctgggtggctgaaatctacagggatttaattcctccaacctggttgaagatgatcaaggcagttgtttgctgattgtggcagctttgggaagagggaggtaggaggtgccctggaattgagaggcacttgggcatgtgcctccatgccatgccagagccctggcgtgtgctgattctttgggctgctggtcttactgatgtggtgtcgtggtcactggtgcctgggggcccctgactccctaagcctagatatctagatgttaccatgccagtgcctggactggggtacggaaccccagcacctgctgtggcacggcggctggtgagtgatgagcctggagttttgggcccaggtgtcaacaccctggctcctgtgatggagccctctgcctgggtacaggtcctcccgacaggtgtgcagtaggtgtgagccttctgggcgctgggtgggccaggagagtcaggtccatgcttcagcgtgcagcgtcggctctgctcattcactcacttggcccgcacaatgtcttattacacaggtgagggaggtggggtgaccccactgctgggtcccttctcactgggctctgactggagacgacagccagagcagtggctggctggcaggggtggccgaggcccccagcagggagcaggaggagcaagcaagctgggcctaggggttgggggaggccccccagggaaagcctagggccaaggcgattgcgtggctctgatgcacacagaggagtctttgctcttcctcatgaacctgcctccagcatcagctgcaatagtggttctctcttcactttgagacctgggtgctgccactctgctgacggccacgcatggtttttgtccaggtgactcgcgactcgcgcacctacagcgttggggtgtgcacctttgcagtcgggccagaacaaggaggctgtaaggacggaggagtctgtctgctctcaggcaccaagggggcatcctttggacggctgcaatcaatgaaactggattacaggcaccaggatgaagcggtcgttttaagttacgtgaatggtgatcgttgccctccaggtaaatatttgcaatgaggtaaataaacttcaagctcatagtaaactagaaattagacatagcagcagaaagaagctgcggagtggagctccacggtcctatgagtgctgtaaccttgggcgtgaatgtgagctgttcctctgtacacccccggtgtgaatgctggtgtgtgaatcacgctgtgttctctcagttgcctggtgagttttggcaggtgaatgccggttgtcacgtaggtgctttaggatgggcagcttccttagggactgctgctgcattctgaggtgattgtgcctggcgaggcacagctgccacactgataatgttcttcttctttccagaaaccgatgacggcgtcccctgtgtcttccccttcatattcaatgggaagagctacgaggagtgcatcatagagagcagggcgaagctgtggtgtagcacaactgcggactacgacagagaccacgagtggggcttctgcagacactgtgagtaggacggctccgcgtccccacatggcctggggccttgatactgtcaaggctcgattcacactgagacctttgtggatgccccagtcagtggcaggaattctcttgcataaaatattttcttactcgggctgtttcccacagagaaacgtttgaattgctctgtgggattgctgggtaaccgtatctacagaccgtggtagagctgccgtgagatgctgtgctgggtggctggctaggcccactcactagctggagggccttgtgtccacataccaggttttagccctggtggttcagattatgcctcaggaaaatgaatgtctgctatgggtcttcaggattctgaagctagtgaggattccggtaaaccaggcgactcatttattgactttctgccatgtggcagcccaggtggggatggaggtttcttggtgagccacactcagtgccttgcccctgcggtgctcaggaagtttcatgagaggagccaactgctgtgacttgtgtctacggaccgtgagatgagggaaatgcatgaaaaattactaatttttggccaggcgcggtggctcacgcctgtaatcccagcactttgggaggctgaggcgggtggatcacgaggtcaggagattgagaccatcctggctagcatggtgaaaccccgtctctactaaaaatacaaaaaaaaaaaaaaattagctgggcgtggtggcgggcgcctgtagtcccagctactggggaggctgaggcaggaggatggtgtgtacccgggaggcggagcttgcagtgagccgagatcatgccacttcactccagcctgggtgacagagtgagactcggtctcaaaaaaaaaaaaagaaaaattactaattttcataaatgtccagtatcgggggaaccagcccccgatttttcaacgtaggttcttttctatttccctaagtgttggccggtctgagaaataaggggaaagagtacaaaagagagaaattttaaagctggtgtccgggggagacattacatgttggcaggttctgtgatgcccccgagccgcaaaaccagcaagtttttattagcaattttcaaaggggagggagtgtacgaatagggtgtgggtcatggagatcacatgcttcaaggatgactagaggtcacaaggcagaaggtcagggcaggatcacaaggtcagcgcgaaactagaatcactaaataacttccatgtcccactgtgcacacattgtgagggttcaagagcagagaaccggtttaactagaattcgccaggctggaatttccaaatcctagcaagcctgggggcgctgcaggaggccagggcgtgtttcatcccttatctgcaactgcataaggcagacacccctagagtggccatttaagaggcgcccctgccttcctcccgggaatgcattcttttcccagggctgttaattattaaaattccttactggggaaagaattcagcgatatttctcttacccgttttcggtaataagagaaatatggctctgtcctcaccggcccacagtcagccagactttaaggttatctcacttgttccttgaaaatcactgttatcctgttcttaaggtgcccagatttcatattgttcaaacacacatgctttacgaacaatttgtgcagttaatgcaatcatcacagggtcctgaggcgacatacatcctcagcttacgaagatgatgggattaagagattaaagtaaagacaggcataggaaattataatattgattggggaagtgataaatgtccatgaaatcttcacaatgtatattcttctgtcacggcttcagcaggtccctccgttcatggtccctgacttcccgcaatagtccagggaccaaaatgggatgtattaaggaaccaaacgtgttaaatttacgaaggattgctatagctttgttttgaggcttattttgacaaaacgttattccctattttctgaatcacactcctgttttcaagtacttgtaggtattacattattatcttaaattttttttttttttgagatggagttttgctcttgttgcccaggctagagtgcagtggtgcagtcttggctcactgcaagctccaccttctggtttcaagtgatactcctgcctcagcctcccaagtagctgggattacaggggcccgccacctcacccagctaatttttttgtatttttggtagagatgggatttcaccatgttggtcaggctggtctccaactgctgacctcatgatccgcccacctcggcctnnnnnnnnnnnnnnnnnnnnnnnnnnnnnnnnnnnnnnnnnnnnnnnnnnnnnnnnnnnnnnnnnnnnnnnnnnnnnnnnnnnnnnnnnnnnnnnnnnnnnnnnnnnnnnnnnnnnnnnnnnnnnnnnnnnnnnnnnnnnnnnnnnnnnnnnnnnnnnnnnnnnnnnnnnnnnnnnnnnnnnnnnnnnnnnnnnnnnnnnnnnnnnnnnnnnnnnnnnnnnnnnnnnnnnnnnnnnnnnnnnnnnnnnnnnnnnnnnnnnnnnnnnnnnnnnnnnnnnnnnnnnnnnnnnnnnnnnnnnnnnnnnnnnnnnnnnnnnnnnnnnnnnnnnnnnnnnnnnnnnnnnnnnnnnnnnnnnnnnnnnnnnnnnnnnnnnnnnnnnnnnnnnnnnnnnnnnnnnnnnnnnnnnnnnnnnnnnnnnnnnnnnnnnnnnnnnnnnnnnnnnnnnnnnnnnnnnnnnnnnnnnnnnnnnnnnnnnnnnnnnnnnnnnnnnnnnnnnnnnnnnnnnnnnnnnnnnnnnnnnnnnnnnnnnnnnnnnnnnnnnnnnnnnnnnnnnnnnnnnnnnnnnnnnnnnnnnnnnnnnnnnnnnnnnnnnnnnaatctatatcataattaagtttaagggatggtactatgcctggacatgcacataggccaaatttatgtttctccccacccaaaacatctcagcggagtaaagaataacaaggcagcattactgcaaaacgtgtctcgcctcccgccacagggcagcttttctcctatctcagagttgaacaaatgtacaatcgggttttataccgagacattcagttcccaggggcaagcaggagaaagtggccttcctccatctcacctgcaagaggctttcctcttttactaatccacctcagcacagaccctttacgggtgtcaggctgggggacagtcaggtctttctcatcccacgaggccatatttcagactatcacatggggagaaaccttggacaatacccagctttccagggcagaggtccctgcggccttccgcagtgcattgtgcccctggtttattgagactagagaatggcaatgacttttaccgagtatactgcttataaacattttgttaacaaggcacgtccttcacagccctagatcccttaaaccttaattttatacaacacatatttttgtgagctccaagttgggtcaaagtggctggggcagagtggctggggcaaagctacaaattaacaacatctcagcaaagcaattgtttaaagtacagggctttttcaaaatggagtctcttatgtcttccctttctgcatagacacagtgacagtctgatctctctctcttttccctacactccccagcaaacagctaccggacatccagcatcatatttaagtgtgatgaagatgaggacattgggaggccacaagtcttcagtgaagtgcgtgggtgtgatgtgacatttgagtggaaaacaaaagttgtctgccctccaaagaagttggagtgcaaattcgtccagaaacacaaaacctacgacctgcggctgctctcctctctcaccgggtcctggtccctggtccacaacggagtctcgtgagtgccttcccagtccacccgcggcgccacaccctcagcatgtgaacttcagactgcttgacgatggttggctcttttgggttctcaagatgggaatactatgcccatgtgaggctgatggtggttgagttgtgactgttcctggaagcagcccgcagtgtcaatcctggcacagagggtggttctgaggtcagagtgggggcaggagctttggtgactggaaacggagcctctggagctggaagaacctgggcggactgagttaggctgggtttgatttgcgtttgtgtgtagctcaggttgtgggaggcgtgtgggttttctcgggtctttggcaggagctccttaggctttgctggctggggtcagcccatggtcctgaccactctgcgtggggagcgcccgcttggccaggtgctcctgcaagacatcaccgaggagcaggggcatggactcacagggtttaagtggttctaagtgaggtgggaaacttgccgagattctagccactgcctctcccagccccggagcccttctttctactgtaccacgctgtgtccagggtggccgcaggtgtggacattccactccgcgtgtgtctggttggtgagctcccttcttcagtgaagacttcttttgccctttttttttttaattggaaaagctattttagtgctacattcagtgatggaatggagcccttagttatcagaacctttctctgaaagtaaagtgaagagccctcctgtgtcagggcagagacgtcacttgcatgccttttacctgcccctttgtgtcgttttctaggtactatataaatctgtgccagaaaatatataaagggcccctgggctgctctgaaagggccagcatttgcagaaggaccacaactggtgacgtccaggtcctgggactcgttcacacgcagaagctgggtgtcataggtaaggcctgtgggtcctggtccttggttcaaggagcagcatctgaaccgggaaggtgagggtgttctcaggatggcaaggagagtgagcatgtgctttggtggaaacctccagatatgattgcctgtcactgtctcacaggcattttggctctcctggcacattaaaataagtgctgctttgtattatatgagactgcaggtcctagtctgtgtgtttagaggggttgggctatctcggggaagtgcgtctatccaggaggaagtctcagaatgttcagagttcctctgaagttcacattctagctgtagatcaagtgcctaaattggcataaacacacgtgtttgtttaggaaagccaaacagttgcatgaggacttggtacaggtagttcagaggtacatctttgtaaaatgtcttaacaatttttcacgggaaattgatcttgtacttggttgctgagtgaaagttgttttctttcattatttaaaggaggaaaatagaggtttcttagtaagagcaattaggatttgttggagggaccagtaaaggaaaatattcacctttgcctcttaggctggagtggggtttctcgagttgtcctgattcagccacagggctacttcagattagcttgagatgttgagatggagaaagagaattccgagaaaactactgccacccttgataaaaatcacacacagactctgcaggttggtaggtggagggagagctgccatacaggaagtggcgcccagaccgccagcctgagacccgccctccctgggaggttcttactgctttagaggtcagttattgctgccactcccacactgccccagaagggggaaggagggaaggtcgtggagggttgctttttcccctgtaatcttgcagtatatatggatattcgactagtctttccccaacttcagccaactgaaatgactaaaacacttaaggcttcctaaaagtttgaggcaggaggagcaaaagagagtagtgaacacagggggtgacatggaactagatcatctgacttcttagcggtgacctgcaggccacctccatttggagagcaccattttgcaagtccagcctcgcctggcgggaagagctcatgctttctcctgggactggcatttggcatcctgagcacctgctgaccggaacgagaaataatctggtgtctgacaccaaatgagctcttaatctttggcgccaacaagacagcatctaaggacaaccacggtgcccccattgtccgcttagggaatggacccctgttggggtgggaggtagactttttgttttcagaaccaacatgtctcaagcagctgtgcttaatatatgtttaatccccatccactccatggggcagcgttgtcatccgtttcacaggctgggcccctgagccgaggaggttgagcctcctgcccaatcagtaagggctgtctacactattaaagttttttcttgtttgatcccatatgccagaagttttaaaaattttccgtaaaacagtggaattcttttttccaaaattttacacagaagcccaatatttaaaacaaattcagctggagcagctttgagtttggggcaggcctgagagcctagagtcccacctcccacctcaccatccagcagccctcagtacctcagcctgtgtcctgtggaaaacactcgggaagtgagcactgtgcccatgttgcctccaccgcatgcccctgcctggaaggatctgtgtgtgtgtggtcagggtggaaggcacctgcttcccctggacaccctgcgccatgccctggagacatcatctgtccatgcagccaggctgggcccagaccgttcccagaacagccccctgcgcagccacaagcagcctcttggtggtggcttgagagttggaacctggcggccatgctgccccagtgatacctgcagcttaaagcatgtactcacttttctctcagaccctgcgggttcgagggctcaggtttttcttttaacgggtcacttttaaaagcagacagtgctcgactgaaagctagaagaccctagaaaaccacagttggtttctgtttctggcttttcactttttccattctgtgctctgttattactgggaggctcacatgagggtacctgtcaggaaagcacctaatatgatagagagagtttacacaattggagcgataatgaaggctgccattacccggggtcccactgttcacatgagtttgttgggcactttctatacatgcccgaaacctgcccactttggacagtgccctgttctgcaggtaaggccctcaaggctcagaagctcagcaacccagggccacaaagtacgggagtaggagggtttgggtttgaccccaggtcttaggctgtgacaattgtgcagtgggccaggtgaccacccctgagtgtgggaatgcaagaacaggtcgataaacctttagggagcccaaaatttattttcttctggcctttaaaccagatttttactcctaacattgaagctttgtttgtttgttttttgtttttgtttttgagatggagttttgctcttgttgcccaggctggagtgcaatggcgccatctcgatcttggctcactgcaacttctgcctcccgggttcaagcaattctcctgcctcagcctcctgagtagctgggattacaggcacctgccaccgtgcccgaataatttttgtatttttagtagagacggggtttcaccatgttggtcaggctggtctctaactcctgacctcaagtgatctgccctctttggtttcccaaagtgttggaattgacaggtgtgagccactgcgcctgcctgaggctttttataatgcactagaaataatgtcagttcaatcatttgtgtgtttcaggtgacaaagttgttgtcacgtactccaaaggttatccgtgtggtggaaataagaccgcatcctccgtgatagaattgacctgtacaaagacggtgggcagacctgcattcaagaggtcaggagactgggggctcagagcgggactgtgcagtgagcatactggagggaattcctccttggggttttcatgggcaggttttggctgagtcttaggagctcagggccagagccgctgattgtgctgtattgggcggggctgctccaggcagggaagacctccagatacagtgctgagacactgttacaagaccagtgcaacttctctgggctagcttgtctcttgaactaggtttagcactggctgagcagtacttaactgacctctacctttgaatgtcatagtagaaacaaaggggcgtggatttgtcccacccgaggtgttcaagcagcctggctgggaccctcgagcagctgggacctgcatctggacctgggatgtgcttggattatattcaagttttcccggccacattgcatctggtgccagggagagcttggccaacagagggtgcatgtgagctgctgtttgtgaacagaactgattccttccagacgctgagtttggaaaaggggtgactcagaaattgccaaaggatttatgaatgtatgagtctgagaagcttaaacaaaaatctaaaaatctaggagcaaattttccaggttttgaatgttgcacggtttacaaattttaaaaaatttatattgaatgcttgcctgctttgtcacattactgatgtgtgcaccacagtcatcttccctgtccattgtggtgatgaaaagaagtgagtaaaataaccaccctcgctccgagctgccgtcagtgttgagtcgggaaattctgcctaggcctgcgcagcccggggagtgggggcctcgggacccaactgaagtctcgcagcaccttgactgaaagccagtgagctgcttcaagggctccgcagtgttcattgttttgcagtcttcccttatgtctggctggggaagtgactgtagcctgtgcttccctcctcctaggtttgatatcgacagctgcacttactacttcagctgggactcccgggctgcctgcgccgtgaagcctcaggaggtgcagatggtgaatgggaccatcaccaaccctataaatggcaagagcttcagcctcggagatatttattttaagtaagtaaaacgttttccttctgagctgtgaaatgtgttcaaaattaaaccagcaatgccgctctttccctatcggggagcactgcaggataaataggtctgtgttttagttactgttgctggagtcatcgtcatcttttgcttaaactgaggaaaagcgttactcaatcattaagttttaacaccaaagatggtgaattctcatgagtgtaaaaataaatcccccgtccttctccctctcttcatgataatctcaggggttgaagccgaagccttctgacatgtttgagcaggaatcttctgggcttaccagtgtttagaaaataagtttctcagcagtgttactggggctgctcttgggggtggtggccgaggtgcacagacagggcgagggccgtgtggtgctggatacggcacctgaggaaggtggattagcactcagaggccagaactggttggggagaaagcctcttgagagggaaactggtgtcctcagaattgctgtggggtcacagacgtgctgccctagcgtgtccgtgcttcctttccctaggaaaggaagcatcctggggccctgcagtgattctgaggactgagggtttatgtcatgaatgccttcttgaaggacttccatgtcactgtgatcttttctgtctcttcaggctgttcagagcctctggggacatgaggaccaatggggacaactacctgtatgagatccaactttcctccatcacaagctccagaaacccggcgtgctctggagccaacatatgccaggtgaagcccaacgatcagcacttcagtcggaaagttggaacctctgacaagaccaagtactaccttcaaggtaatccgtggcttcccacaaagttccacatttaacttcctccaaggaaggggattaaaattttcaactaactcccttcagttgaaatctcggaccacttttaaaacaaaaaccatggtctaattctttactttgttatgaatttcttgacagtggattgagcgatacgtgtcagaactaagcatttcactgtaggcaaattgtgtcttagttatcaaataaatgtacaaaaaaactaaaacctggtctgatccagtggttctgaggttgggtggaggctgagctgtgcacagtcagaattgcctttgatttggttttaaccatgacacttccttattttggaatgccaaataatattagagaagggtaagagattttatatttgtaagaaggatgaaaggaaactggcctaaatgttaggatgtaggttaaaatcaaccaggacgcacatagggcagagtccagggtgtgaaggaaggttttaaactggcactaataagggtgttgccctttgttccctcacataatcgtgaaaggctgcttttgttttgaacagctagtcttaactatatacctttcataatttgatttttgaaccgtgtgtggatgtaataactctttaaaaaaaaatgaagtgtgtttaaagaaaaccccagcctgctctgatgtcaaagagctgccgatcatgtcctctgggaggggagagtagtgatagctgagaaggagcaggtgctctgtgccctggtgctgagcacattgccgagaaggagcaggtgctccgtgccctggtgctgagctcatcgccgagaaggagcaggtgctccgtgccctggtgctgagcgcatcgccgagaaggagcgggtgctctgtgccctggtgctgagcgcatcgctgagaaggagcgggtgctctgtgccctggtgctgagcgcatcgctgagaaggagcgggtgctctgtgccctggtgcggctgagaaggagcgggtgctccgtgccctggtgctgagcacatcgccgagaaggagcaggtgctccgtgccctggtgctgagcacatcgccgagaaggagcaggtgctccgtgccctggtgctgagcgcatcgccgagaaggagcaggtgctccgtgccctggtgctgagcgcatcgccgagaaggagcaggtgctccgtgccctggtgctgagcgcatcgccgagaaggagcaggtgctccgtgccctggtgctgagcgcatcgccgagaaggagcaggtgctctgtgccctggtgctgagcgcatcgccgagaaggagcaggtgctccgtgccctggtgctgagtgcatctccacgacggcagcacctgatggagggaagctgggtcagcatcgctgctcctggtcacagattgtagacagcgccctggtgcatctgctcatagcacctgtggcccctgaatagaactgggaaagtgaatgttctgctttctgggtgagttgatgatgggaaagttgatcagcctcattcacttgcataactccacagcacggagctagcactctgtgtttctctgttctctgccttcctcacacttcggtgaatccttcagtcattcagaatcagatgttgcatgtcacaggttgtgccttctcttgctgtcctctttcccagtgctcggtaaatcttgattaaaggaaggaaggaaggattgtttcagaagccttcaggggccctatcatgcagagaaggaaagtctaggctctctctgacacagcttgaagatgtctgagaggctcccatgtaccagggtagccttgcaagctgctgctcctacacatgcctcagccatcaggttattcactagttcccaaagtcaccctgtaacctggtgggtttacatatgctgctcttggtgctggaatgccttggcccaccttcctcatccttccaaacctacttctagtgcccctcctgggaaggcccaccttctcatagcagggtgacaccgctggtgtgtctgcaggattccaaacctacctccagtgcccctcctgggaaggcccaccttctcatagcagggtgacaccgctggtgtgtctgcaggattccaaacctacctccagtgcccctcctgggaaggcccaccttctcatagcagggtgacaccgctggtgtgtctgcaggattccaaacctacctccagtgcccctcctgggaaggcccaccttctcatagcaggtgatactgctggtgtgtctgcaggagtcttcacgctccatcgcgcagcactggccacttgtctggttacacataagacctccacgttcacaagtggtatgtctagcagacctttgaggatccccagctttcagagtgcttgtgcatgcgcatttagtcattcttggtaaataaaatccctttcagaccttttcactttcttcattcaccagccccaggaagtagctttagttttaagacatcttttcatctttcatgaagaaatgaagtttctatctcttcctgaggcttgccattccttcgggagggcagagctgtctctcatcaggacgtggagctgctgggcggtttgcttccccacatcagccctgtggaacagtccattcagcagcccctgcttcagctactcccaagcgagaatgtggggccctcccggagcggagccacaccgcctgtctctgggccccatctgtgtgtggacatgtccgtctcctaccctgcactctcgcctctgcattcctggcacccagcagcaccagccacaaagattttcagccagtgacaaaggttgggagcagcagagttcatgcaaggagtccacacaagggttcctcacttctgacagcaacagcacactgaaggggttcccaagccaacttcagatttaccctttcaccataactcacagagctccctggaagcagttacacttatagttatgatttactgcagcaaaaagatacaggttaaaatcaaccaagatgcacacagggcagagtccaggagggaattgaatgcagagttcccaccagctctcccgtggaatcagatgtgttgtgttcccagcacccacgtgtggcagtgcacatggagtatcatcagccggaggtgcttccccgagccttggtgtccagagtttttcccggggctctgacatgggcaggattggtccattgatcactcaggtactgcatggccagcccctgctccgtatcctgtcattagccaaggagcaaggccagccctctttttgggcaaggttaaattcttgccttccctcttgttgccgttgcttctgttcctggaggagctcctggcacagtgatggggtctcaggcctccaccttactgcacgatgaagagtttgaggagatcaagaaggagactggcttttcccacagtcaaatcacacgcctgtacagccggttcagcaacctggacaaaggagagaacaggacgatttccaggggattccagaacttgccatcaacccagtgggggactggatcatcaatgccttccttccagagggagaggaccaggtaaacttccgtggattcctgcaaactctggctcatttccaaaccattgaggataatgaaaagagcaaagttgtgaatggacctgaaccactcaacagccgaagcaacaaactgcagtttgcttttcgactatatgatttggataaagataacaagatctctcgtgatgagctgttaagggtgctgtgcatgatggtccaaataaatatctcagataagcagctgggcagtatcgcagacaggaccattcaggaggctgatcagcatggggacagtgccatatctttatcacagactttgctaaggttttggagaaggtggatgtagaacagaaaatgagcatctgatttcttcactaaaggacagacagcaaactattccttgcagtctagtatttaagtactggaacttgacagtcctcctgtccaccagccctacctccaccccatcattccccttctcccaaagtactactgctgttgcataacaaccccaaatatgttctgtcaacacaaacctgcttttggtctataaacagggcgttacagaatggtacacccagtctatttcttctcagtatccattcgccagttcttcatttataaatatcgtcttcctctgttctgctgctgaatgccacacatccatccagtctgagaaagtaagatagggaatcctgccgaggaacaagccagcaaagctctttcactggatgtagactgcacctgctgccttccctctggcgagtctgccagcatgcttctccatcctttttatatgtcctttgcttcccacttctgtgtacattcaacatactgttcacgtagtcatgcagtctttctgctttttgtgaagcctcagaatctcctctgttctacttggcaccccaagctatgcctggtattgtatttctgacttggctcgatagttcggtggtctggcagtttttatctaccttcattattaaaaggccctctggagctgggcgtggtggctcacgcctgtaatcccagcactgtgggaggctgaggtgggcagatcacgaggtcaggagatcgagaccatcctggctaacacggtgaaaccccgtctttactaaaaatacaaaaaattagccgggcgtggtggcgggtgcctgtagtcccagctactcgggaggctgaggcaggagaatggcgtgaacctgggaggcagagcttgcagtgagccaagatcgtgccactacactccagcctgggcgacagagcgagactccatctcaaaaaaaaaaaaaaaaaaaaggccctctgggatgttgcctctccaggagctttttggtaaccaacacttctctcgggagtatgagatcatcctctgcactcttctctgtcatcaaagggctgctgggtggagatattcttgaaaggtggccttggtgagaggtgtggagtcaagtcttttaggttgcttgcccacgtcactctacctctggcctctgattctcaactttgtacctatggggcgtctcttgttagtgcagtgttgactattcaaaaagtagcaatatgcctgcagatttgcttagtcttgggacacggttaccaccagaacggctgctcagacaatatgcttggggactttctcatggctttttgaacaaggaggctgcgcaccctgtgaagcctcctgcattcacacctctgctgcatggtttatgcctcagtgttatgtgcactggaatgcttttcactatacgtttccaagttagaaagattagtgttatggaagtgcctaatgtatcctagtccaaaatatttaaagattgttctctgtgtcttgaagttttgcacaaaattctttatgaattttacacttggcaaatgttaatgctagaagccatagtccgcttcttatacaagtccaaagcgttgactgttgtatcattagctccctggttacactggtttcccagctccttgtgtagaccactgctaatcccttagaaacaagaggtctggcactagtagcacaacctaaggtggcattccaagtctttaagcaagtcacagcaacttttctgccaaagtcagcttagtttagacttcagtgaatcaggctgttgccatcctaatgtatgtctctgtgagtctgttcattcacatatctgccgttggctgactttcttgactcgctgcttgcttgcttgtttccttgctttggaaagctattgaagatgtgtacataattctttaggaaggggattgctaaaaaatacactgcaaagcgatggaaaacagtggagaacaggggagtagccaggctggatggctcaaatataaatgaatgaggaattctttatgaagtgtcagttggactttgtgattgagtgatgtaatacaggaattatatagaaagggaagaatatctgatactgatctgttagatacttcagaggctccttgatttgcatatttaaagttcctaaaattgtagcttttcccttcttttggctgtacagcagactgttttaatccacggttgtgccttattgttccattaaaattgtgtcttcagtccatcaataaatactcgtggttaaaacaaaacaaaaattctttactgcatgctgactaagggcagggctctatccatgtgcatcgagtggcctcgtaagctgtgaacagagtgcctgtgggacgtgggatgaagtctcttctgcctgattttaagtctttgcaaactttttagaccgtaaggagctaagctcagtctgctcgtgaaaaatgatggtgacatgccatgtgtgcccttcccgtttgacagacggcgatctcgatgtcgtgtttgcctcttcctctaagtgcggaaaggataagaccaagtctgtttcttccaccatcttcttccactgtgaccctctggtggaggacgggatccccgagttcagtcacgagactgccgactgccagtacctcttctcttggtacacctcagccgtgtgtcctctggggtgagtatgacatccggaagcttagcacttgtaccccacatcttcccttaagaataagtgtatgtgtgttttttccccaatgttttcttgtgaaatattcagaacatgcaccaaaaaatagagaaaatgatagaagcggaccccacatagtcagtgccccgctccgttgcttgtcagcatcctgccactgatttttggtccatggctgcgtcacctcccaccacccccagcagcagtgccattgtttcctttgtgtgtaccatgccccgaatagggtccagtcagggcaccccagctctgtccctctaccctgttcccattgctgcctccctctccttagctcctgggaggcaagtactggtggtgcctcctctgtgtaatcctggaacatcttttgtgtcgtaatacaaatgattgtttggtaaagtttcactttgatttgagtgcagtatttttactttgatttgagtgcagtatttttacgtttgtttgaatgaatgaaaagcttactctccagattttgagaatcagcatgagaacagagggagcagtttctgctctgaaggaaggtggcacctccattggttgtcttgtgtcccacagccgttttatactttgccacgaataacatgttgtcagttgctttcctcttggatttattttcttcttatgttacccccacccatcattgtatttatatttatttttattttttatttttttgggatggactcttgctctgtcactcaggctggagtgcagtggtgcggtcttggctcgttgcaacctctgcctcctggttcagacgattctcctgcctcagcctcccaagtagctgggattgcaggcatgtgtcattatgccctgctaatttttgtatttttggtagagatggggtttcaccatgttgaccaggctggtcttgaactcctcacctcagataatctgcctgccttggcctcccaaagtgctggcattacaagcgtgagctgccatgcccggcctggcccaccattttacataagcttttcattctctgtcctgagactttaagattgggggaacatgaattcttgccatgtaattgtttccttcatgtcctgaaaaagggaccgtagagtcagcagacgacagtggtgggggtcatgggggaatgaagatcacacattttacatcttaaatcagcactccccctgcccacccttaacagtggacatgagctcagcaaaaaccagctttgtcctgtgctgttcaggcctgtgtacttagggatcctcagctgcacagtcagggaaagaggcttttggttgaaatttcacttgtggtattttcagcttttgaatgtttatggtgttccggtgacgtcattacaaaatgaaaggattgaaactggaagttcttcctgaaagaagcaaaatgtgaatttttataaaagataaaacccagaagtgaactttccctgcattctctgtcatggagaggctacagctgccatgagatgaatcctgcctcctgacatggcagctggtcttctgtgtgggtttgagggaccaggccaggctaggatcccgtccatgttgaatgtttagagttcgacttctgtgagtaggaaaagcaccgtttatagggctttggtgtttgactctaaaaccagagaggaagattctccaggaaacctcggtttcatgatgttcagaacatcaggattgggagctgtttaaatcccttaacacactgacaaggtaataaggactttaaaaaaaagaaacagaagttgaaaccaagagcaaaaactcagatggtggattttgagggatgcaggtaccacccgggggtgacgtggaatagtgcctgagatttttttttccccaaatgttatcagtgttgtacattgtagaatcatgtaaatatggccagacgcggtggctcacgcttgtaatcccaacattttgggaggctaaggtgggcggatcacttgaggtcaggagttctagaccagcctgggcaacatggtgaaaccccgtctctactaaaaatacaaaaattagccaggtgtggtggtgcacacctgtaatcgcagctactcagaaggctgaggcaggagaattgcttgaacctggaaggtggaggttgcagtgagccgagatggcgtcactgtactgcagcctgggtgacagagcgagactagatctcaggaaaaaaaatcatgtaactataacaaacaggtagcaatgttcgccctaatagattaccatttttagttcttttagctatttcttctggaatttacctcagtattttaaattaacatcctatatctcatctgttgacttcctgcaatagtagatgaagatagagctgtcttacaccttcctcctactttacaaaaatggttctttcacaatatttgattaaagtcaaaaaatttacacaaagctaaaagacaggcatctacagatggaaggggcaggctatgtgcccagcacagttattgatgacaagacccacccacttatgaaataccaggagagcagatacaaagaaaagactgtaaaagctttaggggaggctaatttgttgtattagaaaataattcaagaaaggttaaaatactttaaatcctcactttatatcatcgataggttcttggaaactgcaactttatgtgaaatgatgtataatgaaaccagttttttttcctcagctttatgttatgttatgttatgttatgttatgttatgttatgttatgttatttttttgagacagagtctcgctctcgcccaggctggagtgcagtggcgcgatctcggctcactgcaagctctgcctcccaggttcacgccattctcctgcctcagcctcccaagtaactgggactacaggggcccgctaccatgcccggctaatttttttgtatttttagtagagacggggtttcaccgtgttagccaggttgatctcgatctcctgatcttgtgatccgcctgcctcagcctcccaaagtgctgggattacaggcgtgagccaccgtgcccggcctcatcaactttataatgagacagttttgaaggaaatgatgtcattcgaggacctcccatagtcgcttcacggaaggttgcagtttgaaggaaactgtcagcgaccctatgaggacacactgtactggacaacagtggtgtctaagctgagaggggtggcagagttcccagcttttaaaatttcttacagtgatagcatcatatgaaagtaaaaccattttcttgaaagaaatgaaggaaggaagaaaaggtagagttcctaattgtttggaagacatactgttagacttcctgtcttagtatgcatgccagtattttaagaataaccactaaaataatataaatatagtatgtaacttccaaaacagcggagaagaaaaggagaagtaaaaatacttaaatccccaaagaagacaagcaaggagaaaaataaaacaaaaatcagataagtagaaatttcagcccagtatggtagaaataaatctaaatatatctataatcataagtatagcttgactaaacttgtcagctaaaaaacaagttgtcaaactggatttcaaaaacaactctgtttacagggaacatgcctaaaacaaggatacagaaaagaccaaagtcaaaggagaagaaaagatataccagaaaataatctgaaagaaagctgcagtagttatgttaatataagataaaataggatattaaagaaaaatattagggataaagaataaagagggtcattataattttaaaagggctaatttcctaggaagatacaagaatcctaaacttccatctacctaataaaaaagccttgatatgtaaagcagaaattgacaaaaccacacacaagaaacaagcctagtgattgctgggttgagtagacaaagagtaaagctttttttggaagattgagacagcacagtgaaaagcaagatttaatagacatgcgcagaacactgttccctgcgttgggagaacactgtttgcccaagcttacatcaaacacttagaaaactttagcaaaaattaaccacaaagcaggcaagtcagcaatttcctttttttttttttttttttttttttttttggagacagagacttgctcttttgcccaggctggagtgcagtggtgcgatcttggctcactgcaacctctgcttcccagattcaagtgattctcatgcctcagcctcctgagtagctgggattatgggcgtgtgccactacctcctggctaatttttgtatttttagtagagatggggtttcaccatgttggccaggctggtctcaaactcctgacctcaggtgatccacctgcctcagcctcctagagtgctgggattacaggcatgagccactgtgctcggcctaagtcagcagatttctgactgatgcaattaactacatacatgatgcaattaagttaggaaccaagaacaaacaactgaaaaatagaaatacgtttgaagactaaaactcacttctgaataatctatggtccaaagaagaaatcaaaggtagaaagtaaaatacgcttagaactgagtgatgatgtgtctcttggatgcatttcgagtggtcctgagtggctggagctgcttctgggtgagtgggtttctggcttggagggagaggtctgcatagctctcagacctgtctgtggagtgtggtggtgcttctttctgagcagaggtcaacccttgcaggcccacctagaactggacgccaggctgtccctgtggtttcttgtcttgctgatgttttagattgtttggcttaagctgaactttgagagcggcagcccttgcggctgggccgcgggttggcctgttgccctcaacctcagttctttgagcagccggcatcttcagcagcacaagatgcgccccgctggggttgcctcttatcaccagcagcacaggaggaatttctgtttatgtgatcctgttcctgtgtgtgtggccccaagtgacagagggccagagagattagaagtgtcaagtcgttacactcttgagtgtcatcttgctccctaagcgcaaagggaagtctccgtggttgtttctcattttctattattgtcccaactctgcttgagtgttcgatgtcatggaaacgcactgctttttcccacaagtgtgcatgtgggtcttgggtgggaatggtgaactccgctggtgaggcagctggtgtgctcaagagccttctcctgggatggagcaggcttggagagaggagacccgtcgggggctgtgctgggctctgctgctccctgggccccaccctggtctgtggccgcccctgggccccgtcctggcctgtttctaaggccccctgggcccctttcgtgtggagatggtgtctcatggtgggctgcgctcactgcttccagaagaaattctgagaggaaagagctctgaccctggagagaagtgtggtgcttcgggacagcctctgccccagcctagtcctgccgtggattgggccacctagagggggccgcgtccctcctgcctgtctcctctgtgtttgggtgaatgatagttcatggagctggaagcagtgccttcttgtctgctttctgacaaccctgccacaaactcatcatcaggaactttttgcagccctcttccatgtggagtgggacttgtggccttgttttctgggcaggagtaagaatcacatggtgttgggaaagtcagagctgctcttgccttggggactcaggtctcaggttgtggctgtggcagcaggaccaccctgtgacacggctccttttctgtgacgtccttgcagggtgggctttgacagcgagaatcccggggacgacgggcagatgcacaaggggctgtcagaacggagccaggcagtcggcgcggtgctcagcctgctgctggtggcgctcacctgctgcctgctggccctgttgctctacaagaaggagaggaggtaagcgggtggcagggcgaggtggggcgggtggatgcatgcctcccatagctaatcttggggtcagttttgtggggttttatttatttgtttttaagccctacagcagcgaaggctcgaggttcttagtccaaaactctctggaagcagtccccagcgttgtggtttttaaatgcctgcatttctgtctgaccaaggccgaggccctcgcacatcacccgtgcctgcggcttctaggaccgtggtcctttgtgtccaaagatgagtagaacattaaacggcacctttcatgggtgccttttcccactgagcagctgacccctctgccctcctcacatcataaatgcaggagtttattaagcgcctgctatgtaccaggtatgatgccatccttttgcgccactttgctgggtgaaaggactctccatgtgacggtcaagcagattttcacgtcaggcgtcagtgttagtggctctgacctgggggcaggagctggccagctcaggcgttccctgctgccactgtcatttgccagctgagccacaggccaatgagagaggtggtcagaaagtaccaaccatggaggttgcagtgagccaagatctcaccactgcactctagcctgggcaacacagtgagactctgtccaaaaaaaaaaaaaaagtaccgattgtggccctctacacccaaaatgcagaatggggcagaagaaggtctgggccgggaagggcatgtgatgtctgtctctgcgagccaccattgggcaggcttagtggcgacggactggtgtggtcctgttagtcatgtgaaaaagtccttgccctaatgttaagttgctctagagggccctctgctgttggattccaaagcccatcttctttccactcaatcacaacaaatacattagggtatatataacctgtcacggctactcatttgtcattcagaatgtgggagaaatgcagccaccaccagccccctggtggtgcagatgggggtggggctggcgggggtggggctcctgcccatgccctctctacactggagtaattattgtctcctttttttttatagggaaacagtgataagtaagctgaccacttgctgtaggagaagttccaacgtgtcctacaaatactcaaaggtaattttctgtggcgagtctcttgaaggcctgcctccccggccccctgtgctgcgctgtccatgtcgttctcatcaggggtgccaaggaaagcagtcacaggctgactggaatccagaaaggaaagcaacacccgttgcctcagccacttacgccagcacatttttttgttatttttttccctcaagtttctctcgtggttacaactgatttccttgaagtatttaataattaggttgtttccactgtttttggctgttctttaaaaaaaaaacaaaacacacacacacacagtagtgaagatagttgtgcatgtagcatttggatgatttctttcaggtaaatttgcagaaaagaggcattatctggatcaaaggacataatgtttgtggtctcgatgggtaatgatgaattgctctctaaaactaggcttttgactggagtccctcctttgacattcctcccctgccatgcagtgggcacctttcagtctatgagtagcccggaagagccccttctcccccagctgcgctgggggatcactggtctgcttttcggtccaggccatcccgaacgccttctgcttggtcccacccttggctgtgagactcctgccaaatgaccccactgccaccctcccaaaccctcctgccttggtgcagtctcattaggaacaggaaggtgttgccagccctcgtcttcctttccctgggaactggagatgcagtgactgtgaggacagtgggccagttcttccccagctcgtgccagcagagagcatccctgatgtggtggatggtggagcagaatggggtctcttagggggctcacgtggtctctgctgttgatccctggcaggtgaataaggaagaagagacagatgagaatgaaacagagtggctgatggaagagatccagctgcctcctccacggcagggaaaggaagggcaggagaacggccatattaccaccaagtcagtgaaagccctcagctccctgcatggggatgaccaggacagtgaggatgaggttctgaccatcccagaggtgaaagttcactcgggcaggggagctggggcagagagctcccacccagtgagaaacgcacagagcaatgcccttcaggagcgtgaggacgatagggtggggctggtcaggggtgagaaggcgaggaaagggaagtccagctctgcacagcagaagacagtgagctccaccaagctggtgtccttccatgacgacagcgacgaggacctcttacacatctgactccgcagtgcctgcaggggagcacggagccgcgggacagccaagcacctccaaccaaataagacttccactcgatgatgcttctataattttgcctttaacagaaactttcaaaagggaagagtttttgtgatgggggagagggtgaaggaggtcaggccccactccttcctgattgtttacagtcattggaataaggcatggctcagatcggccacagggcggtaccttgtgcccagggttttgccccaagtcctcatttaaaagcataaggccggacgcatctcaaaacagagggctgcattcgaagaaacccttgctgctttagtcccgatagggtatttgaccccgatatattttagcattttaattctctccccctatttattgactttgacaattactcaggtttgagaaaaaggaaaaaaaaacagccaccgtttcttcctgccagcaggggtgtgatgtaccagtttgtccatcttgagatggtgaggctgtcagtgtatggggcagcttccggcgggatgttgaactggtcattaatgtgtcccctgagttggagctcattctgtctcttttctcttttgctttctgtttcttaagggcacacacacgtgcgtgcgagcacacacacacatacgtgcacagggtccccgagtgcctaggttttggagagtttgcctgttctatgcctttagtcaggaatggctgcacctttttgcatgatatcttcaagcctgggcgtacagagcacatttgtcagtatttttgccggctggtgaattcaaacaacctgcccaaagattgatttgtgtgtttgtgtgtgtgtgtgtgtgtgtgtgtgtgtgtgtgtgagtggagttgaggtgtcagagaaaatgaattttttccagatttggggtataggtctcatctcttcaggttctcatgataccacctttactgtgcttatttttttaagaaaaaagtgttgatcaaccattcgacctataagaagccttaatttgcacagtgtgtgacttacagaaactgcatgaaaaatcatgggccagagcctcggccctagcattgcacttggcctcatgctggagggaggctgggcgggtacagcgcggaggaggagggaggccaggcgggcatggcgtggaggaggagggaggccgggcggtcacagcatggaggaggagggaggcgctgctggtgttcttattctggcggcagcgcctttcctgccatgtttagtgaatgacttttctcgcattgtagaattgtatatagactctggtgttctattgctgagaagcaaaccgccctgcagcatccctcagcctgtaccggtttggctggcttgtttgatttcaacatgagtgtattttttaaaattgatttttctcttcatttttttttcaatcaactttactgtaatataaagtattcaacaatttcaataaaagataaattattaattgggtgttaccattttttccttgatagtgagacgttcccgagcgagttacccatctgcctgcctgtcttttctttctgttaagtgactgaatttgggttttaactctggtgttctcgttgaccctttatgaggcagcactttcatttttctccagagtctcctggtcgtaggtgttaactttgggtccaatctgccttcccttggctctttctagatccgatttctttaccttctccaggccaacctcggggtgtggtcctgttcatcaaaacaatgaacatggagtttagagtccagtgagtcaataaagcttttttttgtgcaacctgatctaacatggagatgttttctcttgagtaaactcactgagttttccatcttaaattactcagcagtgactgagagctacctgcatggaagcaggaagttactccagtgttataaacaaacttcttagactcaacatcctattctccatccctttttttttcctgtagagtccaaaaacctcaaccgtctcatttttaaattatccaattggagttacctttttaaaaaagttattcttaaggactttccaatacctctcctgaggaagacatgtcaggtcttctaaaagtttacattatgaccaaagaaagatgctggtcctcaggcattctacccagggggctgttctccaggccattcccacctcctgctaagaccatggggagccctctctgtaaggaggggcatatgcagggacctgcccatccccttggtaagctggatggcaaaaaggcatgttgtctgcaccactggctgcctgctaatgtcgctgtcagtggggaaggagaagtgacaacacgtttgagtgcatttgctttgactcttagaaacccaagcctctgaaaaaagagtaactacttgccagctgttgttacagatgatatttttaggaaaacatcccgtgacagcaaatcagaattggactctttttcagagaaatgattttattgatggagtacaacctgggtatttagcttcctttcaacaaaattttttgtgcccctttcttgagactgtccatgaatgacagagacatagaataagaactggggtgctaaagatggaataggcaaaccccacaccaaggaaatccacagtgaagtggaaatctggttcttatgaacattttaagagcatctgaagcctgtacttcaccaaccctaaaataatacgtaacacgagatgattcctcaggaaggaacatatagacatacagacaggagacaacatatagacattagaacttacaggacaaagaactctttttccctgaatcatttgagatgaagtttcttcccatcaccaggcattcctacaaacaaggaccttcacacgactaagatgccacctggtgattaaagaacactttgggctggtccgatccattgtacaagttaaagcactgatgggtacacaggtcttacccctgttggcgatcgggtcacaaggagccagtgtgtgtgtcaccaggaggttgtatggacgagactggatttctggaaatatcctttactgactctgaagaatcccatggctcagggaggtacactcatgtcctttcttacttctccggttccactctgttgactagtagttggcctcttgagccatacttgctgtcagttctggacattgttctgtgagaatggggtcaacgggcagtcgtggtgcaggtgagcttgtgtgcaaggcggcaagatagccacattgagttggggacagtatggcctgggggtgttggataggtaaggcagaagcaagcccagaacttggagcctgttgtgactgtcacagtaaggagtttgaagtcctgaaagcagttgagagctgtaggagggccagattgggcttttgagcaagatagtctagatgaaagtaaagagatggagacgcttcagcaaccagatgggaggttgggcatgggagctgtggctgtgctgagctgag

SEQ ID NO: 160 - DNA, 9174 bp, Human
tgagccactgagcctggccccttggttattctttagattgataatgtaacagacagtgtaaatacatctacaaattcagaaggttaagaaagggtatgcaaggaaaaccggtctgtccctcagtcacatttttcaccaccacccacaagaaggcattgctatcaatttatgtattcctcccaaaacattcaataaatgtagaatcagttgcatacattcatcttgcttttattgtacacaaacagtaccacactctgtactttctcatttgtacttagctaggagattttacttcagttgaatcactttacttttagagatttttctctataagaaaatcagagttgctctttcttgttgatagctgtctatcttccagtggaaggatgccccaggatttatgtatccagcacctagagatgggcatttaggttacttgcagtatggcttccagatagggattggttcgcgtattttttcacataagtttaaaatgatctctcacgtctgtctcatcatctgtaggataaacagctgagggtggcattgttagcacagaccattctacctccagcttcagaatttcagggtagttattattttcacctgcccttacaccttccctgaagggagcagcagggatcatttccttgaatgtaagaatgactgtcacttgaggtgattcagcaatgctctactgttttagagtgttttagccagattacagagaaaggcatttacttagggcttgcttacagtaaacaggactgtatgggcatcagaaatgtgaattcttgttcaggatccaccgttatagcctctgtgactttgacctggcaatagccttccttctctggcctcagtgttctcctctataaagcaaggggctggacaagccatctccagtttcccagtttggcaacaccactcctaaaggatctgaagggacaacaggaggcccaggcctggaggtagggtagccctgagcctgtgcctagaatgggaggcaaagatggtggcaggtgggtgggaaaatgtggggtttgggggtcacaggagagaccaaggggcaggcctggagcatggcacgctccctgatcacagctctccactggaaggccatggagggagtgatggggagagcctgcaactcctggagataagcctgattctgactttctttgaaggatttttttctttcgacttctttcctgtgaaagagaatatccgagaaatgagaattttaactaaagagaaaacctttgcatttgctactgataaatatctggcctatgcgggaaagtcatgggtgccctgggattctggctccactgctaacaagaccttgttagaccttcttaactgcccctccagagaggagaaaggctcttggaggtagagtgagattggggagcttggcagagccctaggatgaactgtgtttttgttttgttttgttgcaggttggagcctttttcctgcagaaagagaagcaattccgggcttttccacagataacctgctagggctcgcagagacctggattctaaccccatctcgcctttcctcacctggggcattgttttctgcgtttgagaactgctgggtgggctggtgttacccaggatttttaaatttttgcaggagacgctttgcaggagatctctagggcttttttctgtgtcaattaaagagcctggccagctggacctgggctgtctttttgacaaaaacaaacgtcatccccctcccagctgagcacttgttagaactggactttaactgagggcctgaaccccctaacaacgggacaaacagtatgaaatcaaaaccgtttaccctcctcccaccagcggtttgcgtagggccttgggtgcactagcaaaacaaacttattttgaacactcagctcctagcgtgcggcgctgccaatcattaacctcctggtgcaagtggcgcggcctgtgccctttataaggtgcgcgctgtgtccagcgagcatcggccaccgccatcccatccagcgagcatctgccgccgcgccgccgccaccctcccagagagcactggccaccgctccaccatcacttgcccagagtttgggccaccgcccgccgccaccagcccagagagcatcggcccctgtctgctgctcgcgcctggagatgtcagaggtccccgttgctcgcgtctggctggtactgctcctgctgactgtccaggtcggcgtgacagccggcgctccgtggcagtgcgcgccctgctccgccgagaagctcgcgctctgcccgccggtgtccgcctcgtgctcggaggtcacccggtccgccggctgcggctgttgcccgatgtgcgccctgcctctgggcgccgcgtgcggcgtggcgactgcacgctgcgcccggggactcagttgccgcgcgctgccgggggagcagcaacctctgcacgccctcacccgcggccaaggcgcctgcgtgcaggagtctgacgcctccgctccccatgctgcaggtaccacagtcccgcccctgctccagcacctcctgccgcccgcccccgcccggcacctcccgcccccactcccctaactactgggtggggctgcagccgggcaggggcttgtccacaactagagcttgaaaccagagcacgtagttggggaaggagcttgggtcacccagtggagcccgctcattgcacggtcttggcaggacgtgctctgggagaagaaggaagatgttccagggcacacatagcttagtggagactcaaggaggaagctcccacttggccctcgtagcccagagatctttagagacccagacagcaagagtagagggaggcggtggggctgcctccgcagttgggatgccaccctgggtcccccaccagtctccttgccagcacgtgggcagccccagtggctggagcatccgggaaggcctaagaagggaatccctcctgctggcctccccaggaggtgtttggaatgtcctttgtaatatacgtcctggatacagtatgtgcttcccagatgtttacagaacataatgtgagagttgaggctaaaagcttcacttccattcattgccatagaaaaacaatgtttgatgtgtatgttgccccctaagaacatgacaatcaggttctttcctggatttaagcaggcatttgtttgtagcgggaagtggaggaaatgcctctttctctactccagcccctatctcctcatctggactgcttgcacgtcctgtcctgtgccattcttggaggaattaggacttccataccctgatagggtgttagagtgagtgtgtgagagtcagtgacccttccaaggagggaacagggatttcctgcggattctctgcccttcagaggaaatgaaagggagtcgtctcactgatcctcaaggagatggatttccacagggggtcccttataggccagtgtgctgattctgttcatgtacctttggactctatctgcaagatcctcttgccatgggggtggagggggtgttgcagagaagtccattaggacgtgggaaggcaggggccccaaaatagaagagggtagtagtttgggtcaggagagctgcattctagactccacttctagatgaactgtaccatccattcagggatattagtaaaatccccattttaaggatggagaagctgaggtttcgaggctccctactaatgcggttaggaactgaactctaatcctggcttctttagggttgttctcaacctcagcaaatgcatttgttgctctgctcccctgctgctttaaaagcagaaacgtggggcacccttgccaggccctgaaacttactattgtcaggaacagagctggcatgctgttgggacataactcttcctggaaaccattacaaggtcctttacagtgagagtcagtgaaaatcaggttagggaatgtggccatcctcatggcccagcctggttttgagggaaggaagtgatctcctgggggcccgaaaggggcagatgctttgggagggctcatggggtctgcaatgtttcctttccagaggcagggagccctgaaagcccagagagcacggagataactgaggaggagctcctggataatttccatctgatggccccttctgaagaggatcattccatcctttgggacgccatcagtacctatgatggctcgaaggctctccatgtcaccaacatcaaaaaatggaaggtgaggcccagcaggtgggtggtgggaactctcctgtcagaggatgtagcttgagtcggctgtgacaagcagacctggcccactccttcctggtcctgatgccctggaaagaaatgcttttcccccaaaacctagtggccatttctcagttaaactttgtcaaactgtgaacacatggactttcaggagaggagcccactggatgcaaagaaaatgtagttccggacgataggttacttcatgtctctgagctcctctctaaagggtgtgagaacattgagttacattgttccaaaacttagtacaagggcctaactgctttcacccccattgtatgatttgcctccctttaaaaaagttgtcataaaatagacataaaatgtactgttttaactattttgaagcataggtttctgtggcattaagtaacaataagtaatgcatgttattctgcaaccactaccaatatctaccttcagaattttcatcttcccaaactgaagctcggaactcattaaacatcaactctccattatcttaattatgtctgttttgaattctaccacttgagggcgacagagaatcaaagtcggagtgatttgatttgagaaaataaattacttccacaaacatgcctacccagaaaaagggaggattaaaccattttctcaacattttggaatttcatctgagaataacgataaatggaggaaagttaattcttaaattatccaaatgaatgccttaatcctcacttgatttagtttatgtaaaagaaccttgtagattgcagaggaaagttattcaaaatctagaaatgtcttctgctaaattcttaattaagagttatgcccactcttctaaccagatggcgggtgccaaaagtattcagtaggtggcaggaagagttgggaagagttttgtggtgttggtgaggctcttgccaggggatgtctctgtgcaggtgttgagagagtgattggtgagggagagaatggtgttcttgttctttatctgaacaacttaagacagactaactgcaggtgggaaaaagaggcccagagggagcacatcacatgacacctagtcccaggtccccgtggccagatcgtagggccactcctgcttctacaaaacctcttccatcagtcattgtctaggctgataattcactgtgtcttgttagatatgctaatgtcaagttattctcttaggagccctgccgaatagaactctacagagtcgtagagagtttagccaaggcacaggagacatcaggagaagaaatttccaaattttacctgccaaactgcaacaagaatggattttatcacagcagacaggtaggtggccttgccagtgtgcgtcgtcagggtgaaagggactactgccctacattcctgccaagccacggtcattcatgtcaaagaaggtccactccaaagtagacaccagaagtggttgtattgagccagatccacccctctgggaacctggaacagctaggtgaagaaagcctattgaacaggtcaatatgtcaccaccagaggtggaaaacctgcgctggaccaggggccctggggctaagcctgagctccatcactcagcaagccaatagctatggaagactttcctaggccccctaacgcttggatcttgggttcctcacctatacaagagaggaagggaacaaacttaacttagaaaagcaagtatctatttggacagctcttaacacttttttctccttgaactgtctaataaaacacaacaacatttttgtggcttgccagataataaatgagatcaaacagaccaagatttcatattgaggagtgctttaggtctcagtgaagtacaggttctgtagattttattgggagaaactgaggactaggccctgcttcacaggcaatgaacagtggggcacacacgagacatgttccctctgggttgggctcccctgacatcaggctatgaagcagacagctgtgcacacactgtactgtttaacacacatgggaagtcattattgcacatgccactcggtcactgtctctattttatgatgagaaccaggagggtgtgagatttgcctgcatcatgggcagctggtttcacagccgggactcttggcttggctctgcagtgctcggctgcactgaaaaaagggccagctatggctctactttccctgtcagcttgtcatctgctgctcttgaccttggtcttgtctttgcagtgtgagacatccatggatggagaggcgggactctgctggtgcgtctacccttggaatgggaagaggatccctgggtctccagagatcaggggagaccccaactgccagatatattttaatgtacaaaactgaaaccagatgaaataatgttctgtcacgtgaaatatttaagtatatagtatatttatactctagaacatgcacatttatatatatatgtatatgtatatatatatagtaactactttttatactccatacataacttgatatagaaagctgtttatttattcactgtaagtttattttttctacacagtaaaaacttgtactatgttaataacttgtcctatgtcaatttgtatatcatgaaacacttctcatcatattgtatgtaagtaattgcatttctgctcttccaaagctcctgcgtctgtttttaaagagcatggaaaaatactgcctagaaaatgcaaaatgaaataagagagagtagtttttcagctagtttgaaggaggacggttaacttgtatattccaccattcacatttgatgtacatgtgtagggaaagttaaaagtgttgattacataatcaaagctacctgtggtgatgttgccacctgttaaaatgtacactggatatgttgttaaacacgtgtctataatggaaacatttacaataaatattctgcatggaaatactgttatctctgtggatgtttatttagtgatattatctttttgaaatccctttgtccttcaccctcaccttccttatgcattttgtgcttttgtgataccaagatggtgttttgggtctgcagagccccttgtcctaactaccctagatcttgccccggctgccccagggtttccacttcccagtggcattgggaccttcctcctctgcctggccaggctgggcattcctgtgtcccacctctccattagtccccatcctccccagggtcctcagcctcttcctcttggtttggtttgtcccttccgttcaacttataaataggaacagggtttctttcctcttaaacacaagacagaagtgcttccttggttttgctccctagcctttcccttgcttgccctcccttcctgctagcctccttcttccacagggctcccagcatccttttgtcacttctgtttccatgactgagccctgattgcatctctcttctctgctcctcagagctcttcttccttaacactgtgccctgcttggtgtgcccaacgctgcccctcctaactcttgctcaccctgttgactgcttctttcctcccctccacatctttcctagcaccttgcccatcccaggggattccatctcggtctgctggctgcctccagccctgtctcttggactccccctgctctatgtcggggtgaaagcccacacttctccttgcctcaggccacctcttggaggcttggcatccatggctgcttctctcatctgtggggctggtggcctccctgacattctggtttttcctggagactctagctccctatcttgggtcccccctttaaccctccaaccccatagctgccaggctgccatcctctctgccatgaccctagggctggtgtgtaaactcagcactcagactcatcaagaggagcagccagaccgatgtgggacagggacagactgatagctgcagcccagggccaggaggtgtgttcatttgctcaagcaatgaaaccacatctggcacagcagctgcaattggagtcaccactccattaagcttataataattcactgttattgtctaagatccaactgtcttctgcacaggccaaatagcagagttcagtggggatgtggtgagaatcaccactcctgcatctttcaagtccttgatggtggcactaatttctgccatctctctgggattgcaatatggcttctgaactgatcaatgacagttcagagccagtgccctgtagttcctgaaaggtctgattacttcctttccctcaatccacaattgccccagtgaaagcctctaggtccctttggagaacactggtagaaatattttcaacagtgtactggggccctttctcaagggggcccagcccctccttcattcaaggggttctgggtctgtaaactggcttaagtctgagaattgattgaggtgccaagactctgtttttgtgattcaaattagatttttgttcacttgtccttgaactttcctgcttatacaagtcaataacaatttagtaggcttcctatcagtttcacttctaggaatgtcatgatcaagtagccaacgtcatagatccacaggagtctgactattctgagtgctgccttggctctgctgtccattagagtagctgtacctaccttgcctttgttggttgagtgcctccacttggtccctgccacccttggactctcattatttccattgcatttatgtttcccagttcagcagctgcagttcccactgtacggtctggcctacagagaagagcaatgccagagctcttctagtatgctgaggctcccctcataaatgtattccttatggtcaaggtgcaagataatgccctttggacctgcccatggtgggtaagaaagtcttaaatgacaaattccctctaacattctagtgtccctaagcctttgagttcatttctactgtaaatcaatgcagatcttg

SEQ ID NO: 161 - DNA, 70435 bp, Human
  misc_feature (1)...(70435): n = A,T,C or G
tcacaatggaagaatcacatgataataattaataaacattgactcttcttggccaggtgaccaatattatttcacagttgatcgttgagggcagagccaatgacctttgtcctgaattttaataatttactgaagttttacattaaatcagaatataattgggaagaaaattagtgtttctttgtggggagtgcagagtaatgccactaattgcttgtataaaagcattcccgaggttgtattttcctgttctttcattagaaaattaaaactacagtaattttctgctgtttgtaaaagggaaaatgtgctggtgaactgtattcagcaaacttaaaatgtcaaagctcttggccacctttttatgcccagtaatgataaactgtcaacttccttacattatttgggaatttactagcaacttgttgcagctctcacagcacacaaatctcttataatatgtatggtctgaaagaagcagcagtctgctggtattttgtttcttttgttctttctttcactttaatatttgagcaatttaatatttaaaatatgtgttagggcaaataaccatgtttttctgtttaaggagatggacaatgaagaacagtgtaaattaacctcagtagaataatgctttacaaactatatttaggtaactgggggattgttttcaggtaaattattatcaagtaaaagaattgagctgattctaaaagtatattgggtttaacattttatgaaaacatgtttattcacacagatacatacacgtgtacatctcctgggaacttggaagggttaagtcagaccactgtcatgttacaggaagtgtttttccactgtgtccagtaccttgagtttgttatgtattcaatatgtagtgtcatcataaaacagttgcacctacctgcattagccctcattgtctcaaggtacaagctgaaaaataatagaaagtaaagctcaggaattgaatatttctgctaatagtgtgttggtatttttccctcagttcacagacattcttgatttcaaaacgcaaactacacaacccagggcactagggttggaattcaatgtttattcaaaaaggcaccctaaggcagttagggaggaaacgctacatgtatgaaaaataggagccgggaatcaaagctgatctgagcagagcagcagcgactgtatttactaacacttgttttctgggagcctatgagagaaatggaaataattagaaggaagctgaaaggatggggttttgtggcttgttctccttatatggagcaaagaaaactgcagcaactcttcgggagctggtattccctactgccatgggggcagccgaattctgggtggaggagtttgtttataccttaacacatacaggctattttgttgattaaacaagcaaaaaaaaaaaaaaaaagccccgtttgcgctttcaaacactccctcaatgagaaaatgtctcataaaaatgcatcatgtgataagctcttgctttagtcccaaactgagcttgagtccacttggagatcttagaattaaagagttcttagggaatacacgttttagctaagaatatagttactctgtcatgaaacagggagctttgccacttgcttgttttggaaggaaaataaattaaaaaaagattgcaggggattttggttattatatggccagggctccgtttagagtctgtggcattcaaagctggctttaatcacagcatgatgcttgaagcctccaaaagtctaagtgtttcctttctttctttcttttctttttctttcttttttttttttttaaagcgttacttcactgaagcagagggctgcctttgagtgacgtcacgagttagagcagcaagctgcacaggggaagggaggctgggtgagtgacagcccagcctactttttaatagctttgtcatgtgactggggactgtagtaagacaggtgccttcagttcactctcagtaaggggctggttgcctgcatgagtgtgtgctctgtgtcactgtggattggagttgaaaaagcttgactggcgtcattcaggagctggatggcgtgggacatgtgcaaccaggactctgagtctgtatggagtgacatcgaggtgagctggggcagggctcggcgctgcagccacaactgacgcttccctcagatgctattattcctgtaaggggggatgggcttgggcaaagagaggagccaggaaagtagtccaggcaggagcttttagaagaatctcaatcttatcttaactccaataagtttgctattttaaggtggctctgagatggcttgagcaaatcaaagcttagctgctgtcatcagtatctgttgcagttagaaactctttccatgtgactttggcactgtttctactcatatgcaatatttatgctctaagatattgatatgaatcagaagctgaagtctttccagtggtgtttagtggcctggttggaaaaatgccatttctatttataataagacgaagataaaaatattaaaatggatgtgttcaaatatagtccgttttgactctagtccggatttttcccccctctctctctgttcatcagacagagaacttacaaaatcctaaataatcctgctgggctattttagattgcttttcccacagaacacaaaacaacgatgctgcttcctttaaaactcctatacgtggttgaaagatttggccagcgaataaaaagaaacgcctggcagtgcaaggttttccgttcgcgtcggtggcagggaagccaatggttaaatcttcctgtaccacggagagctgcctgaagctgagagagaatagagtttatgcaggactgtgtgtggagctgctcgctgctagtgtaaaaatagacagcaatacatcaattccacagtctctgctggctacaattcatacaggggggaaaataacgcaagcagtttcctcgtaatctctggagtctagtggggggacggaggacctcggcgtgtttgcattcagcacaatggaatgctctcggaaggaaagtttgggcaacttgggaaacaagcgaaactttctgtggactctggtgagatggactcgaattgaattgcatggaggatcccagctgctaacaatgaatctggcaaaagactgcgagtgtttcctctgggtagctgggggcacgtagggtaagggggaggatcaagcccacacgtgatttgattaaataagatgtccatgtggtgcagcgatacacatctaaagtgaaaataatttggccaaggccgtctgtgaatgcatttttcctatctagcgaggcatgcccgggattcttaactctttgctgggtttgcaaatgttggctccatttgccctcccttgccttggtagatcgtatttgtggattgtaattgttatcttgttctgatttcttggtaaggcggaatagatatggataattcatatgccctgtagccattatgagtcagggttataagtggcttcaaagtcctaattgcctttgagtagccggagtgtcctgtgggtggttgtctggctggcactgtgggtctcagctgctgtagtttcatttttccatcatgtattattcctgatgctgttaggagttgattgaggaactagatcatatggaaataaggaagatttattttaatcattggaattcctgcagtcattttcaaataaacatcagaagcatttagaatagtggcctttaaatttttttcttaaggaggaaaggtcttggctacttgtccagccatggatagagtcgccagtcggctgagattggccagtcacttctctgttgcactataggcagctagctgctagaagctttgcctacacggcagcggctctgggaatcacctccgcctgtataaaatattacgagcagcaggtagcgttggcagttttcattttttgaatcattaatgtttgctgtcatcctaaaacgtattatgcccttttgcacataatgacagggtagtacattggttaatataggcctatatcactatagctacttggagtgccccgtgtttcacagtttaatgaaggtgatatacagtaaggttactaagattgatagagacaattcacatgacatacaccccactaagactgtcattctttactgcccctctctccaccccctttcccctgtcttaactaatttttttaagaacccagtttcttttttcattaatataattaatgtggccaagtccactccttcttctctctctctctttaaaatttaccatcaatggcacaaaaacctccaaaaggttaatggagaattatacttaattataatgattcattatcatcagtgcagttaagctaatttattgtctgctccttaactaagagaaaagtctgttggggtgaaataacatacaataattagccttttgtgtttagtgactgctttatcctcttaaatcttattataaaattgaggctacagttgtgaaatagctgtcatagttgcaaagaggcagtagaatgtgtctgtgtagttgcaataaagcacacctgttacagaggtatagggaaacagtaaatatcagcatgtcagatgaggacagttacagggcttggactgttaagtctggcattgtccaaaggccaaatataaattaataacaggaacacttgctaccactaatgtgttttagattagcaggataatgccacattcagaagcacagattttattagcatgtcaacattggcaagaacacatgcacttttctcaaccataacataaaagcaaaatgagagagagagagagagcgcacgagcgaacaagtgagaggaaggaaaggaatatgtaaatgacaagatagcaccaatacaacaaattgacctggtcttttcaatggttttcaaaagttatttaaaaatacatatttatggaaggttaaagggttatgagcaagtcatgccaaagagggcagttaaagagagggacaggaagaagttgtccacaaatcagtatgccactttagcattccaaaacatggttggttcctaagtttcacaacaggaacttaagccatatgtagacagcctacattttcttgattatttttacttttgtgttgctatttttgttgttcatgttttttttttttttttttaaagactatgcccctataaaatcctagtgtatcttgcaccgttgaaaaagttctcccccatctctgaattggtgacattgaggaaaagttaagatagtgtgtttgggcttggaggatcagctgtgtgggcaagaatggagtctgggcagtgttacatccacaaccaaatatgagcattgtaccagaacgagatctcttcagcccagcctccagttacttatatgccttgtcaagtatactgatctgtaattttgggctaactcagataataaaaggaaagaccaataaaatgataaggaaagagttttgatggtgaggagggccctttctttgcattcccttgtccctgctgccagggatctcactggggtccaatggtcttagagaaggatggcaatgattttcagtctccccccatcctccccttaccaactgctgactccattacccagtacttacttctcagcgtgttgcttttgatcacgctgctgcatatgacctgtgtaatgtggcctgctaggaatccctgccagggataacaggggtgcttgagaaagaaaatctgcataaaacttatttcattcaaaatgtaaatgtcaaggagcatctttcattttatgcctaactgcagcctggatgtgaacaattccacagcatctctcctgaccttggaaggcagggccatgagggtgctgcgtcagtgtgtgcctcctgatttagacacccccacttacaggtggatgaagtccttactgttctggcaatgccagacccctgcaataggagttcctgcagtgttctttactgtctgcggactgacattagcggttaggtagccaattcaagtttaggagaccacctcattggtaaggggagtccacttgcctccaaaagccgcatggtaaaacagttaaaaagactgtctatttcatgtaaggggatgaaatgctttgacaatctaaaataatcttggtgataagcagcccagccatggtagagatattttaaacctctcaatatgtagaaattattttaaaactctaaacaaaaatagttattttgaattcacgtagagcacagtttagatatacataaataatgaacaaaatatagtgatggtatgctattgtgagttttcttttccaggtactaggtgattccaaccgtacacacacatacgtgtgcaaacacatacacacacacacatcttgcaagttacatacaaaagccgtatagaaaaaaaattatgatttttgtccttcatcttaaggaacttgcttttgcctttaaggatgaagtccagaaagtcatgaagagtcaaataagagtaaatgatttaaataacaattcaggagaaccacagatgagtcaaagggctttgcatcattagttgctaaatgaattatttggattataatgcttaaaaggagtgtaaatggagaaaatttttcctagtgtagttcctctgttctttttccatttagcaatagtttattgagtgtctattatgtgtgataaaatttccaaggtaaaatcaagtttgtattatggttaactataagacagtttaaaactttggaagcagtaactatcaaacaggtatcaaggattttgtacaaagaggtccaaaaatatctagttgatttctaactggaagaatcagagaaagcttcgtggagcttggtatttaccatgtgtttggaggtagcttttggatggaataaagcagggaaattatccttcaggagccaagtgagtaaagattttaggatgtttttcctggtgattaaagtgccagaaactagctttggtagtgtagttgaattaactaggcttaattcctatcacatgctattgcagtttaataaattcctgtggttaatggaagcttttttaaattttttttttctgcctcctgcagtgtgctgctctggttggtgaagaccagcctctttgcccagatcttcctgaacttgatctttctgaactagatgtgaacgacttggatacagacagctttctgggtggactcaagtggtgcagtgaccaatcagaaataatatccaatcagtacaacaatgagccttcaaacatatttgaggtaaggacatcctttggaaacattaatttttcattgagtttggcttgggcccgactaacatggtaatagacctgaatgcataatgagttcttactttgctatcatcaaaagacttttcatcacagttacatactttctaatttatggaaaaacagcatttggaaaacaaatgttttgtttttatttttttaaagatttaaaaaataaatcaactagggactaggaatcaacaactgtgagtgagttaaactgtgttgaaatactaaagggttgtgaaagattagtgacaaagaagaacaaaagtctaaacctgtttattcctgtctatttcccacagaaagaatgagcaataaatggtacctcatataaattaataaataagaaggcctttctttttaaccaagggggtagatgtctacctttgtttgctttactaattaggtgagctcttttgattattattattaattatatttttggttcatatctctaatttctttatataatgggaattgctaaacttgactaatctactgtatacttataaatcagtcaaaattcatttacttttcagtagcaagaattacctccgtgactccggactcttattataagcctaccctataataaagaatgttaatctattcctattaaagtgttactttgagaaaaggaattctttcccacaagatcagtactcatttacttgaaatacattattttttataggaacaaacatttagtgagtactctggcaagtgaattaaacgaaggatgacatatcggctagttttctttatcacaaccgccagtgccatcatcatcatcatctaatgttttctgagcacctactatgtgctggacttttcttattcatcagcaaagacatttcttatacttccatgttatttggttgaaatctgagtcttaagaaagccaagtttaaaatattaactgagttttgctggaacccagcatataatacatgctgaataaatgtttgttaaatcatgagagaatgatgaatatattaatgttgataacaataatagtaatgacaataatggccaacattttggtatactcatgcttaatatatgtcatctcacttatccttgaaaacaacctattgttaggtcctattgttatcattcctgttttacatatgcagacactgaaactcagagaggttatttgttttccccaaatcacacagttgacaataaagacctgggatttgaaccccaaatttatcggacttcaaagtttatatccttgataaaaatagagaacccatgaatttgggtgacagccatcctttacaaagacatatcaagctgcttctttgctcaatatatttaaaaatagaacagaatctttcctttcagtgttggttggcacggaggtagagttagctggtgagccgagacggctgtaggttctgcctatggctgagattttgtaatacctctggagattaagtgggttttagaagaatgcttaaggtagtagagtttggactggggagacagaacaaggtggagggaacactgaaggttgtggttagttctactttcccaggcttctcagccgggtcttagaaagttcatgtgaggacttggccagttagaactggtaaattgaacattcctcactcagtacacttgtcaagttacaggcccattctaagtcatgctgcattaaataaacaatgctttaaaaaatgtccatctccatagacctcttatctaaaaatcacctatttcatatcaggtgaatgccatgcattttgtagaggctagagaataacttagcggtaggggagatggcataggagtcaatgcctctctggtgggctactttaaaaaaaatacaactttctccataacttttatgtccctatattttgtgttgtggtatttgtgagaggtactttgcatttataccttcaggagacttggttcagcatctagttaattatctacatgtaggtgcttaatatatgccatgccaccctttttgtctccctgtatcatattctatgctaataaaattattttcagcactctaaaacagaagttcatttaatttagtctctcattaggtcattttaaaccaatgattctcaaccaaaggcgattttggtccccgccccacaccccaattcacgggacatttgacaatatctggaggcatgtttggttgttatccctggggacaaggggatgctacgagcatttattgagtagagactagagacaaggaatgctgctaaacatccaacagcctacaggacagctcccaccacaaaaaatgattcagcctccaatgaaaaaagcactgaggttgaaaaaccctgcttttaaataaagtcacaggcttcccctttataaattactaatgattaattggtcagatttctgagagaagacatagtaagctactggatataaagaatgagaagtcgtataacgatatcgggatgcctggggctccaggactaatatgtcaggtatcctcttagtgtcagagggcaaaagtgactgtttaggtaagttcccataacagttttctctgatgtcacaaagcccattctttatcgaggcaaagggtaaagtcatatgtggcaatgcccttaccaacagcagcagcttcaggagtatttgcatggcatgaggacacctccactctttgccctctagtgttaaactcaggcatcttttctgtaatgtgaaaggaaagcgtgttttcagcacaggtgacattctaaaattgggtcttccctgtgaagaaggttcgtatgaaaccagataactctttcatggccacaggtttgtgttgcttctaccaaagcagcatttcagggaagtgccttcccagggccggccactcacagtggacttttcacctgcactcaccttcttccaatttgcaaagccctgcctcatcacatttgagaaggccttgtacttgagtaagttaaacagtcacgggctctgctgtctctgatctgacaataacaagcattatctactttggattcccagaataaaatcaggcactgagtagttaaatgcttttccctgactcaagtagcacgtcaatgacaccactggaaactggccatcgactgaattctcatcaaagcagaaagtgggatttagggatatataatagagtggcagagtcttaaaatgttgagagtaaattatgtatctcttctttttgtttcttccatatgtttgaatctaagtttaatttttatttaacatcacaaacttaataatgataaaaaatgaagctgaatgtcacaatttgagaaagggaattctgggtggtggcagaggggtagcaacatgcaatagcacatgttggttgagtaactggacacgcaaacaatgttctctgcttacgcaacctgtgtttggatgtgtaaatgcaggtgaccaggtacgattcagaagccactttaaaaaacaaagcaaaaggctcagaggtaacagcctccagtgaatctgatccatgtgtaaggaaaacaggatgcgtccctggaccggctggtagcaagatttatgtttcagaatattgcaacataacttccttccctctgttgcctttgtgcattgtttgaaggaggagaataaaggactacttttgcagcacagcagtctgtaaagatggatggcatggggttagtttaaatagcatattggcctttctgggtcactgtgggcaaccttgtccctggtttattttaacacctgctttaatgcctccatgatacaactgaatgggcatctttcattcattcgtctgttacttctgaatgaagctacttggggttcgttagaatgatggcaagtgagaatgcagtcgtctctaggtcattacttgtaatacgttctgaggactgcctttgctgatggggggagaaggactctcacagctgtagccagcgttcatgtttggtcattgctggaactctcaggaagcctgaaactgtgaactttgtagcagaaaagggtgagtggtggttttgtatttgtgtgtaaattatcctgctatatgcaatcaaggaaatgaatgtggacgctttcaaggctacttggttattctagtgggaatatagatactttacttttcttcatttggctttcagttatattctaaattttgcaaaaatggacatatattatgtacctatcaaaaagttaaaaataacaaatattggcagttcaacagaccatgagcatttgaggagtagggaatctgcctgtcttgttcactgacatttttctagatattttctcagaaaatagcagaaagtaagaactcaacaaatacttgttgcataatgagtgagttgatcttcatgtgtttattgatagaatgaactgcgttaggtaatgtgaagattatatacaaagcacaaaagaaggcctgtgtcctaaaggactttaaatctagtttgggaggcaaaatgaacaaatgtaaaacaattaggaaaccatgcaaggctgtgtatacaaatatacaagtatatgcatatgtttttagttcttagcaattcgaaaacaatacaagactgtatattcatgtatatgtatatatgtgtatgtacctacataggattatatatatatttgcaatttgcaaacattgcgagctcgtgtatgcatatatgcatgcatatatatgtgtgtgtatgtatgtgtatttctagctgaggagataaacagcaagaataaattcacaaagccttgtaagagaagagcagagcgttttcatagacgggatgtggaggtgagcttggtttactcaaagtaaaatacatattaatgggaacgtggcagtagtgggagtaagtttggatgtaaggtaggtacaaaattacggtgggtcatgagaacccagttggaaatgtttagagtctgtttagaaagtaggatgtcattgaagattttttagcagatcaacataatggaggtggtatttaagagtgataatgctgacagtcgtaagaggtataggcaagtaggaaatacggaaaatcagacagcaggcagtgctgcattccaaacccaatgtgatacaggtacagggaagggacaaggtgatagcagagggggtggcattcagggaacagattcaaagtaccttgaaggaaaattccatcagccctgataactctgagttcggatagagagagaggtggtaaggaatgctaactcaaagatattccaaagagaagcagaacctcgtggatatcgttcctggttaagtttctgctcacctttaggagctgaagtactttcctagactcgtgagtcattttacaaaggggccctctatctttccactgcctcagggacagaacatatttaacccaatccacaaatttacgtggtgtctgctttttttcacttgtctccttggaggaaatcctgcagccttccatggtaatgaattcctgcttctgactgtgcctgtggtcagacagacttttctatgaatggcaaacctcctggaattttaacaaaacaaatagacaagaaaaaaagaatgcatgtatatacaacctcaccttaatttaatcattggaagaataaattcttttttgttatgtgggaggactgaattaatttacaataatcacttttataagatttctgggatttccaatttgcaatcaataaatgtttgtcatttaaattaaatttacggcccacagccagatttttgccacacttggtaatgacacttacagagaacatagacttcaagtaagaaaataatagccatttaagtggagagataattggctgtaacataagaacattgaagaatgttgaaactcatagagacttatggagtattttaaaaatttatgttgtacttatctttgcatttgtagtctaccacaaaattccaaattctgggtataaatcagttagatgttcatcttggagagtcataaatcaggaagcaacaatctgacccagcctgtgtgctgctttattttcagcctctcctgtcggcttatcttgcagggagactaaatagtgttgttcgtttgtgtgtgtgtgtgttcatctacacacctcatttaagcactgtggttttagacttctcggcttgataacatctggcttatcttgggaacatctggtttatcaccctatttcttccctgccattatgctgaccactggaaaaatatggctcaggagttctgacccacagggctctgtctcttggtatcaacccctgctaataaatagcaactcacaggatgcaggttacgtgaccatctttcactggcactaactttcctgctggtggcttttgttaatggaaggtgtggctaggagagatgaaattggctgctttttttttttttttttatggacgttgattcggttcttagccatttgcagtttgcaaagtgagaatgtgtatgtttcattaggcacaaggatttcagaaagtgctattttgtattttgggataggagaaaccaatgatttcatgtcagatactctaggcactccagaaagtaaactgggacattttatgggcttattgtaggtttttccaacctcccggagtctcaactggctcatcaaagttactctgcctggatatctttggggccaaaatagtggagacccaaattcacaaggaggaaatcttggagcagaatcaggaaaaagtggctcattgcttcttagatttacttcaaagataatagtgtaggtgaaagtaatcacaaggttcagggtgctgcattggacaaactgtctatttgtatagcaaccatgtgtctgtgtggagaccttatacacttgctgtgtttatttgtccatgccccactatctctacgccaggtcctggaagcacagcccagcagatgactcacctctggatggaatcaacacacaaagcagataaaaagctgaacattaaagaccacattgttaaagcagagagccaaattgttcctccaccattccctatcccagacttcacatctaacaaggttaatttgtccctataattatgtgcctattctttgagtaatgaaaaattttattgtgggttttataaaatgaattgcctgtgatgtaaaacaatttcagtaagggccatttttttttcttcttcttaacctctcaggttccttttaactttttttttttttttttttttttttgagatggagtctcgctctgtcgcccaggctggagtgcaatggcaagatctcagctcactgcaacctccccctcctgggttcacgccattctcctgcctcagcctccctagtagctgggactacaggcgactgctacaacgcccaactaattttttttttttttttttttttttttggatttttagtagagacggggtttccccgtgttagccaggatggtctcaatctcctgacctcgtgattcgcctgcctcggcctcccaaaatgctgggattacaggcgtgagccactgcacccggcctccttttaacttttaagactgtgcgctcagaggtacgtttgaaagcaaggcagcatcctatgctttactgtagctagaatgagagcagggaaaaggggagagagatccacaatgaaatacacactcttattcttggcaatggcagagttgtttgaagctaaatgacttcttatccattaagccatttgtcccaaagtgatgatagaagatacttttgtgccttttcttttccaaaatgatggagtgatttgcacagtttcagattctaaacactaatattttgtagacctgcccatctccattactactgcaagttattcattcaaggtttgcagccagatggattaatgaattaccagatcttgcataaaatgacttggcctgacttaaacaactacttttttttttctttctccttttctttttttgggggttagggtggggagcagtcttacaatgggtgttaatgggctgtagagggagtgagcccccattgagtttttttaaactagcttttttaaagcttcactgcactttttcattcttttctgaacttctgctcagaaaccgtcagttcaaggaggagcaatcaggctggtagggcagagaggaggaaggagactcagtagtcaaatccctggtggccgatgcccttccctgcgccaaatcagcatgatttatcagagccctctcttcagcacagagttgagagtgagttccagggtcctcctcacacaatatgcatagctggagctctgaactttgaaggaaagcctcagagctatttgcaaaatgctggtgcttagtgaatactaaattacatttaggaaatagtctactgctaccagttatacttcatttttattcttgacacagacacctaaatcagagaacagtaacatttcagagattatggaagcagtttgggtatgctccagccctataataggatcagaattttaaggccttttgtattattaccaatagtcacttagtttctactgcagtgtactttgtagggaattacagcttttactaaaaagattaaaatgctattatgcaaatgattgcagtatgttattatgtttacaaattaacatccatggctcaacacacaaattaactaactatgctatctgtgttattaaggatttaataaagtaactgttaataaaaatgggtagcttggaactttagtagaaagcaattgtgatttaacacgtggaacttgagcattgtgtttaatgttctaggtgatataatggtaaaataaagttgaaaaaagcacatagaaaaaccaaaactgtgtgaacagcagagctgcttgcctgagaggctgatgaacgtgaactaaatagcttcaagctacaatgtacagtgggcagcatagcaataaatctaagcaaagcacacaaaacatcttctattaataaatagttcattgaaatgataattaccctccattacgtgtttgatatgttccatacacacagagaatacttatattattctaaaatggatctcagagcaaattttgctgtggcgaatgggatttagctgaagaatatcgctgggtgataaaagagaagaaggctgggttcagactaagatggctttacaaacaggctgcaaattgctattccgggctgttcataagagatcataaaagcaaggagataagagccgccaaggtccctgagaaatgaatgtatgtgattatgttatctcgtaggttggatttactagacagaccgacaacaccttcactttagcccaacaggaaaagtagaaagagatacaggtttggataacaaactttgttagaataggaaattccaaaacactgtaattcaaatgtttcagaagagagccaggattccagtcactgacttctgtgctggatctcaaaaaaagagctagggatatgacctaatattaagcaaataaacaaaaaagaaacaaaagaattacaagaacatcctggagaactaattctatatttcaaatattttggactgatgtttcttaattctcaaataaagatgttgaggacttctaagtccacaaacaattatctttttaggtctccctattgagggatactaacttgaacttcttagtaggaatatctggatgtgcttaagaaatgtacaagcagggaagacaccgcaaagttggtcaaggtttgtacccttgcatacaatacaagcaatttattttgttccaaatagcacctctgtggttgcaaaactacttatgcaaatttttgatatctagctttagcaaggtgcctggttccttcatttcatcccacatttggataaattgtgttgttcttcactcttccaaatttgtccttgtggaagcgaacacttgtaaattggttgaagcttgctaagagaaagaaagggaggaggtagggaagaggaggaaaaaacttgaccaaaagcagttgctgtgacagcttatgatttgatggtttgtggtcttgtcctgttctcaggcacctgatcaagaaagtggtacaatcctgctatgcagacattctggaaatcttgccaacattcacctgacatgaccaaggtttaaagtccttgctgtaattttacaaagcgtagtgagagtgtgtgcctgtgtatgtgcatatacactctctcatatcctttttttttttttagggggaaaaaagtgatctttgccatagaagggtggtaaaataattagtccaatagacaaatgtcttggcccatgtttaaacagagctttaaggacacagtgttcccaagagtcacatatctaaatacaaaccagtgtcagctgccatgcagaccaaaatgtaatagcctgctttcacataggtcatcgtcaatccattttggtcgcagtcacactgcacatctgtttctgcgagctgcagcttcttaaggtggcatttggacttcatcagaacacaaacaaccaagctataaattgccacttctggagttactttgaataagtgtatactgtttcatatttataatggtgaagcttcataatattcacagtgaatatgtaacaccgatcagttcaacaagcatgaaattgtatgttgtcaacctgtcacataaatagagtcatattctggcttgcgataatgttgaactaacattttttcccccagaattgttgagaggttcacaaaaaagtgaggaggtagcatttcctttgggtagataaccagtcaaggctattgtaaagttgatattactgttgatgggttccttttctcccctccctccaaagcactagcttttcttgggtgaatgctaattggctaatctggtgtgtttctgctgtcatctaacggtatcattttcagctagtacttggaggctctttttgggttgtgtatgtgtgagtagctttttttcccctttaaaacttctttttttttctttctattcttgtagtgcaaatcagtgctaattgtcatgaaattctctaactatactctggcaagctttcttgttgccttttcaccccagttaactcttaatgtattaccagagcattaggaaataatgaaagctggacattttattcaaacttagttgagatagagaatcatctaaagagatgcagaaaaaaattattgaaccaaatttgcaccttactaaaaagataaaggacgaatgaaatgtgcttgccggtagctgcggagaaactcagagaccagtttccacagtggctgatatttctgcaccagaggcatggtagaaactgatgcaagtctgttttcacttttgagaaattcttagatgtgttcaaccttcctcatctttcttccaatggcctgaagacaaaaaggcattgcaatctgtattacccgcttaaactgctaacttcaacaccttgagatagtacttcagtttctctaaagcactatgcaatattactggggattattaccaacacttttcttttcatcccatatcacttgggatatggctggtcacatttttttcttttttttttttttttttttttttttttgagacggagtctcgctctgtcgccccggctggagtgcagaggcacaatcttggctcactgcaagctctgcctcctgggttcatgccattcttctgcctcagcctcctgagtgagtagctgggactacaggtgcctgccaccatgactggctaattttttttttgtatttttagtagagacggggtttcaccgtgttagccaggatggtctctatctcctgacctcgtgatccgcccacctcggcctcccgaagtgcgggattacaggtgtgagccactgcacccggcccacattttcttagacaagaaccaattcactggctaaagctctcagtttccaacttttgcaacatcgtcacatttcttcttgcctgtggattttaaaagttcatctctcacttatttacttacccattcatcaaaatataattgtcatccattagcatgcttagtgtctggccattttagggggatacagtggttaaaagtaaacctagtctctggctccatgaaaattttggttagtgatgaagacaggccttttacaaataagataagctgtctgtttgaggaagtagagcagggaatttctccatctgtctgttacccagttatcactagcagataaattctgcccttctcctacttattgtctttagaaatgccttcaccttgaaatggaattctgctggagagcatttctcctagctagaggaatattctattccaaaccaagatctgtcccactgccccaacaaatgcagggcagtgggacagaatatttgaggttggaagacctgaaatttatgatgtcctacacacagtatattaaaataacagtttgctcattggaagtgctgggtggccagggagtgtggagggaaaacaagaggaagccaaccaagggaagagagcaagaccgtcagtggagagttctttaaccagtgtgcaagtctgacctgaccagagtgctgtgcccttggtggggcttctatggatgagaactgtttggtaccattttaggtctgttgacctttctatttgagaatggtatttcagtccagctggaaggactgacacgctttttgcctgtttgagacacttggtgtatgtggcttttctctctctctcttggatccatcatctctaagtgatagctccttgcttcatggggtaatgctattcaggggctatcctgcacccttgggagaggcatgtgcaggaagaatgctaccgatccctttcctcttccctctggaggtaccaggcattacatccctaccaagccttactcaattaggtctctttcagattcctataatactcgagcttaaatcctcttctccacagttctttctgagaaatttatttctgctttgaaacggctcttgtataggggaaaagtgcctctattatagcactgcccttggtttttccatgggctcttggcttaaggacattagcttccctgggtgccatctcatttgctcagatgtgaagttagagcttctgtattccagacatagttctcctgggtgtccagggatccttgccaacccagattctctccagatatgttcccatgtcagaatcctcttgtgtcttgccagcccatacttagcggggacaccctgctctctcctctgagctgcatatctcagcatgcatttttcatttaggcaatgctgtctgataggcaggttcacctcctattcccactggagaagagtctgggcaaatgcctgaaagtttgaacacagcaatgccatataggataagtgacttcttttccttgctggtccccaattccagggctctgcgtgcaacagatttgagagttacattaggtcacaatgccactgtctagctcctttaatcctatcaccggcaatcccagcaatgtagctgaggtggctgcccctgtcctgaaggactttgtgtcagtttctcctgggacaaatctagtctggaccactttgcaacatttgttcaaactgaaaattttgacaaagacattctgttcacaaagagccaacaaatgttctgtgtttcgatacatttggaggttacaaaatgttgcctggtcttggcagataactaagtctggggacccacatagtgcaagccatgccctgtttaatttgtctttcaatggcaaatgtgtttcttctgtgattcagcataagggatgataccctccaataggactgtgtgacctccctgctgcttttgtggtatagaaaagaaaaaaaaaaaaaaacacggataccacttttttcctttagttgctggtttatttttatttccagctacatcttttatagttgaaagagaagatgtatgttccatagatagtacgcatttttatggttatttttataattcatactggaaaacctaatttctgtagccattaaaaatttaggattattaattgtctgaaacataggtgagaagtacactgtttttaaaatgtctctgagaagccaaactagattcagaaaaattccctcagatggagcacattttattcccagatacacttcttcacccctcacttaacgcttgcttccttttgctttacttatgatttaaatgaatccggttgtctaatgttctattcaatatgtgatgttctatgagcacatatgacatttgaagaaatggtttagaaaattcatgaaatggtgacagtaaaaagataatggtgagcagtgacaactgaccaaaagagacaagactacaaactacagaaagttgacaaaccctgaaaatatgacagtctggggccttttagtttgagggaaaataatcctatatttctcaataggtccatacagtcattttgcaataccagacagtgctaccaaaatcaatcctcataatttttaaagtggggaaaatatgtaaatacgtgattcggaaatctttccataaaaaagttttaataaaaagtttggtgcttaagcaagttaagttctttgatttatctgcaccagtgcctatgtggattaaagcctgatcatgtgaggaaataggtgaggcatatatacaaacacaaacacgtagttttagatctaacagattttaatggagtttatatattatcctgtaagtgtttcctgtgtagactttgataataaagaagaaaatgctccatgaaataccgaacttcattttataatctgttagattacatcttcccttaaaaatacagctattgaaattttcttgaataaagagaccactggattctttttccttatcaatagtaaagctttttggctacagggacgttggtcaagacaaatatagctcagtagagttatcgttaagtaagcaatttcccacattactttagaatgaaatcgcctatacttttctccttcatggctttccgtatttatcctacccagtcctcaaataagccaccaccccagcaatgcacaactcacttgtaaatattcatctggagcatacgaaatcgtaatatcactacagagactaactgcccccccgcccaccccgccgtgccattttcctttggagactcttataaataaatgaacaaccttagagctttcaaaacagtcattaagatctgctacttgcctttggataaagaatttcagataatgtacaggactgggcttcctaaatctaatttctgtctaaaaacctagggaatgctgtagctgtatcttctctatccaaactctcttgactgattctggcacctttcacctgagaatgcacagctcaagattctctatacggacccagagccttggtcgggccacgacccttcattaatattcaaactttggcagtttcaaagaatgctgccctcctcgaccactgtgagcagtccagctcccctgctactttctctcatgcttatcctttgtacgaagacatctgtgtctttcctcatgtctctttcaggagtaattcttccccttgttcaattttttcctttctctttatggctgtcgtaatagcccctgatacagccaggcagccatgaccctgtccatcactcacctgcaagctattcttgaaccactggatggtccctgagtgactagattaatggtgccagtggtgagccttttcacctgacctttcatccagtgacatacaagctgattccaggctgtgtgcaaggctggctgccctgccatctctgcaccctccatgaaaccaagcagtggaaaggagagtatccatgcaaattaagtgcagaagcagggataaaataaggtgtgcagttgggagttatcagaaattaaatctgtcttcctttgagtgccattggaaatgagtcttaaggaatgagaactgaaaggaaactttccatagacaccatttccataaacggtattgtcacaatatgctattttaaagactggttgttttggtctgtgtttacattaagcctttaccaggcatgggataaactattaagtcccgaaatttaggaaagtatttgtggccgtctttggcacaaagtgaatttttgttgtcacatgtgcaaaagagcatctttttctttcgttaaggccttcgaattgtggttcagctttctaagtaatagctttttggctaaatctctcaaggtgcattataaactgcatgagggaaagagggacctcatcacctcctcagtccctagcacaaagctgtgcacattaaaactctctctagtttttgttaatggacagatttacaggggctctaccaaattcagaaagagagagagaatataacatgaccttcccagccattcagaccaatcatgctaaaaataagacatatccaagatctgagaacatgttctccaagagatggtttataaacagagccaatagtgacagcagtatgctgtgtgtctgccagagtgtctgtgaacttaccccctaactcagctacaagacttgctgttcagatgaagatatatggagttgggagacatgtggttgtgttaagcgaatgtgcattggcgggtaaaggcgctgctatatgtctactgaagacatagagcatttactcttctctccccgagaagaggaaagggctctgccactcaatgaagagctcaggaacaggtaccttaccggggttccagagcatgaaagtaagtgtgtctctgttcaaggaacccgctgttcccaggaagctcatgcaaatgcatggccacagcttcccaacacgctgttcccagcactgtgcccgtatttcctggctggttttgaccctctcaatggattcagacttaaaatttttgcaactgtttttgtcgttgttgttgttgtagtttcctcgtttacgattgtaatgaaaacagtttacctcttgtggaaaagtgtgcatgattgtacaagtttactgtgccatacttgtatcgcagttgccttatttttggaagaatcaagcttaggggctagaaagaaatcctgggctggggaatgatgggtaatttctcaaggcattcagatctttcagaagttgtgaatgattctgaccttactttcatttatagtctgtgatcattggaaccaggatgcaaaaatagcagagagaggatctccttcaccttaattccctgcccttttctggtatctgtagtacaattgactatatggacatcactgctattttagcaaaagctggtgagttatcttttttagacgggacagtctacccagtccaggattttagtctgactgtcatgttataattcagtatgttcctatgcaggatgctctaatgcagagactgatttcattcattcttaaactgacccatttatcaactattttaaaaagcaacaactacatgctaggcactaatttaagtgcgcataatacaaagatgtattaagtacataatgcctacgacacagaattttcccttcaggagttggttggctagtgagaaagacagacttcggcaactaattataaaataaggggatgcattctgtattaaagtcagaaatgaagtaccatgaagacacacatagaggagtaaaaatgtccgtgaaaagggtgagaagagaggaaatttgataattgttgctagatttttttactcgtgagtcttcaataagtcagaagttaaataccctcttatttatttataaaatttagcaaactgcacttcccacctcttaggaggaagacaagaaaaaggatacacatagtaggttcttaataacatttgaaaataaatttgccttctaacaagtcccgtctacattgcactccgcagttcaatggctcattaggttttaacaaaagcagcgcagcaaaataagaaggattcttgagtcaagcacccccgggcggtatctctgagagcaaatgtgacaaatagaatcagaaatgaattaaatagtcagctacagcaagccaagctaaaaaaaaaagctctgaaatgacccaaaatggaaacgtattacagttatctgcattcacagtaccgaacaagtttggtcgtatttaagataattctctagtgcctgctatttttagctcaagggtaagctcctgtaagagtctttcggcattgcatccctttaacctggcctaacaaactaagccaataagctgtctgattttcctggtccatcagggaggaagagagatagctaaaacaaaccatttgcggggaaaatgttcggcctatcttgtgttaagagcttttttcatatagatttttaaaacatcccaatattaagtgttgcctgtcagagaccaaaatgtcaagctttgctgttttgaaattggaggctcatggttataaaaagaggattttataggcctagtctaatggaaataaacattactccattaccttcagtaaaaccaaatctttacagttcaagctatcattattaatgtctatgagaagaaagaaatgtttctagggctttatttattttttttaggtaaagaaagacaggcgagctgtaccatagcaaatgaaagttttcttaaagctttctcctcagtgactttgcagtgtgtaatttaaaagcagaaagcaaagaaaatgcagttttaaaacactaggctggctattcctggtatctttctttcttacatattcacaactctttgtgagcctattgctctgtcaattcttgtctgtctgtctctatatagtgtatacaaacaacttcatcaactattattcacgaccttctaagtgcacatgtacatgtgtgcgtgtgtgtgtgtgtgtgtaggaataaatgtgggctgtctcagtttaagccatataactgcatgtgtagattacaacacttaacaatatactagtttccactcatttcatcagaaaccatgctgctgatcatcaaagtttaagactgttctcaggttgaccagtttacctacattctgaagcctgcatttgccaatttagtgtgaaatagatttcagccgcagatgctacctgtgaggcaattaatcgccagatatttcttgagttcatattattatgtgcaaggtgttatgccaggtgcggtaagaggtggaaaggtgtctaacacaaggcctcagtcctcaaggagacttgtcactgaactgcagaaatgagatacccatgttgatagaatgccacccaaggaaattttaagacatttatagagtccctactgtgtcccagacaccatgcatgggtcttctctcttaatagatctgattctacctgaattaccagccttctcataaacattttattggggccgtgctaagtgtcaatcactacccttggttatgtgtgatttctgtcttcccacagatgaggaacttaggacttagtatttaaccagaactcagatttcctggttcttactgcttctcctcagtgtcagagaagaaatgggtattttctatcaggaatcctcagaaacgctggccagtcacattgccatgttcaaggatatatttgcttgactgaggtggtccattgatggttgaaggatcaagctgtgactctttcttttcttttggaggcagtctcactctgttgcccacactggagtgcagtggtatgatcttggttcactacaacctccacctcccaggttcaagtgattctcctgcctcagcctcccgagtagctgggattacaggcgagcactaccatgcccagcaaattttttgtgtttttagtggagatggggtctcaccatgttgcccaggctggtctcaaactcctgagctcaggcaattcacccaccttggcctcccaaagtgctagggttacaggcgtgagcaaccgtgcctggccagtggtgcctcttttttgcagagaactgctggttgcaattgcaactgccgtctgctgtcaatgaggtctttggtgctttgcaagcttgctgctgatctttagtcccctttaagacgggctgttaatctttagcacaaggctgactctgcaatacagcacacaccaggttgcctaacttcttgtttatgtgctcccagggatcagaaaccagtttgctgtttccccctaaaaccacaagccttggggtcattgtctctatctgtcctttgttctccatgtacagtctgctgcgaaagactttcctcttgttcttgagtgcatgttcaccatcttcctccatcatttcctttgaaccctcagtaactcatacttaggtgatttagccttcctctcccctgccagggctggttgctgctactcctgaaggtatactaccccacacataccatacttgattgttaaaccaaacattatttttcagcatctgctgtgtacctagaattttgccggaaaccatgataattacagaccaagtatatgggcttgggattcccttcctttggggatgcccagctgtataaggaggcaagacttacccgggtgacacaatcagacaatgggtaaaatgtagatagtaaaatgtggacaaagccctgttctaggcaccatataaataaaagagacaatgaattagcccctgccttcagtgtccttaaaaactaaggaaacatgtgagcattggcctgatattaacaaactactctaagaattttagaggtgggaagagatctgtgaaacctatgagtgaagagggaagctaatgtggtggaggttgcctttgaaatagatcttcaaggctgggtccagtgactcacacctgtaatcccagcactttgggaggctgaggcaggtggatcacctgaggtcaagagttcgagaccagtctggccaacctagagaaaccctgtctgcactaaaaatannnnnnnnnnnnnnnnnnnntgatgctccggctcactctagaggatcccctaaacgatgccctcatattacaaccacaaccctaagaatcttagagcgtcggattacatctgcgaaccctatgagcgactagggaagctaatgtggtggccgttgcctacgaaacccatcttcacggctgggaccagtgactcacacctgtaatcccaccgctttgggaggctgccgcaggaggatcacctgacgtcaagagctcaaaacctgcctggcctacctagacaaaccctgtctgcactaaaaatacaaaaattagccaggcgtgatggcacgcgcccatcatcccagctactctgaaagctgatgcacgagaatcacttgaacctgtgaggcagaggttgcagtgagctgagattgcgccactgcactccagcctgggtgacagagctaaactctgtctcaaaaaacaacaacaaaaaagatacagatcttcaaggtgtagagagatttccatggacggagaggaaacgtgggcattttagacgtcggctttcatctcattattattttaacacatatttatcacctactatgtgcacggatttatgctagatgttggaataaaaaactgaacaggatagagacaatgctatgagcaacacagtagtggtgaggaaagaccaagtgatgactggggactcatctaatagagcagcagagaaagtagatacaagtgaatgggatcttggaattgtactaaattaacatgaggggagatttcatctagcatgctcatttcacaatggagaaactgaggcccaggcatgtgaagtgacttgcataaagaatatcaaggttaagtcaggaggagcagaaaaaaagacaatatggggtttgttagacaccagggactcttaaaagttatctggtggcatcagcgaagaaaggttatcttagagcttgcaaccaggggcctggtgaggaagctgttgaggttttcaggcttgaggtcatagagcttgaattagggggtgatggtaacaatgaaaggaaggaatgcatatggcagacttcccgaaggaaggatcaataaagattgttgtcatattaagtgataggttggatgttgtggtgaaaaaagggaggaaaaatggctgtggtttcaaccttgggtgatttggagaatttgggcttggttaacaaaaatgagagaatgagaagaggacatgtttcagggaaggcgcagagaggaatgtgatgcgcagattgtaaagcaggtggggcggctgctattggaaggaagtccatgaacaatatgcgacgatggagctctggagaagtcatggagtgcttgataaggaggggtgtcttcaagaacattgtttatttggcaaataaactggaggaaagatttaagggatccccttttgccccacatagtaaagatttttctcttgctttgagtttgataattcgccaggcttcttcttgccaataataataatactacagtagctttgggcttgcccagcactggactcaacatcttaagacaatgttaaaaacatagttttacagagtttaattaaaaaaataaaaactagtcttatctaattctcataatcaccatgatgggttgaaagtgttacctcattttacagtttggaaagtgaggcttaaataagtaacttgcccagggccaagttacagaaagtaaccagaagaactaatattacctaactccaacagtcaaattcgtaatcattcccttacactgcttcccaattaatacctctattgccaggcactacgcttctcatcccctcctactcccagcttctttcaaattttccaaatgcctggaattatttctgtcttcttgtttgcaattttctcaaattttaaaatcacaggaacctctcaaattcaggaagtgttccctgattaattccacctctacctaaacatctagcagagacttgacctgactttgtccaagtagattttgtattatttagtggagagatcagcatgaatctgttcagccacagactggtcaacagatcagttcatgccctactgaccacagagctgtagacacttccatttgcagaggcttgtacttaaaagcatatattagaattgtgaaactgggcactgtttgtgacattcttcatcctcactgtgtatgtggttgatactcgttgactgattgactaagatttttgctggcatttggttgagaaggaaggcaattaccaagtattgataatgcatcttaaacctagctttaaagtcttttattgaactcttgggcatgtcttcatactaaattcagtagaatatgcctgttagataagtctcctgagagacaactttagtgaggaatataactctttttaaaatgcaatggaatatatgtatatttccccaaataaacaatttcttacaaattgcacgtagctgtgatcattccccttcctttagtgggcagcaaatcatgttgcatttgtgttatgcattttttcagaaatattttgccttttttttgtttctggaccaaggagtcaaaccatgccccattcatctttttcttatatacaattccttgcacataataggagctcagtaaatatgtaacactgcatggtattctctcacctacattataagcagggataatggcttttatttcttttggttcctgtgttctcctagcaactccctggtttctagttcaacattatgtccataaaaggtactcagtagctggtgaatgaaggaatgaatgaatgacatttaacttgtgatcatctaaaccattactaaaccaaattggaaatatttttaggggactgggaaaattacctgggtaacatgagctgttgagcagcttctgggctgggtctggtgactgtatcaaaatcttcagatacgtcagtaattccacttcagcatgttcattctttgtttcgaataatacaggtttttgtgcattgatgtttaagataaagtggtgcctattttgcatttctagttatgtttacaaaacagtgttttattgctgtctaaacatgagagtgctctcaaccactcccactgcagcacattgagaaagggctgttaggagtctttgcccttagtttgaaatatgttgtacttagaggtcgtagtgttctggtttgggtagcaaattattgatcagggtattatggtaacagctgtactgctgattggatgaagataaatatccaagcatgcaactggtattacctgacattattgtttttcctgggagcctagtcatcccaagggggttttataagaatggtcagaaggtaaatattaccaagagtctagtaggcagagtgcaagccagtggtacccaattctctccattcaccactatttgaattctggcccttgtgttttcctgcattcatcttttgactctttatttagatttccttgactttttagaatttttcttttgttccttgcttctttggcttcttgctgaggtatttattttttgaaggattatcaggaaacaatagcattgcttgtaatctctctgccattgagtttagtggtgcttcctctgctgttatcagagacttattttaaatagcattatttgttactgtatatatttaagatatagaacattatgttttgatttacaaacacatagtgatgattaccgcagccaagcaaatgaacacatccatcacctcacatagttacttttttttgtagtaagagcacctaaaatctactctcagaatccagtacaatattactaaccatagtcctcatgtggtacattagatctctagacatatccatcccacataattgcaatttgtacactttgacctttatctttccataccttcccctccccccacccctggtaaccatcattctactcgtttattttttgtttttaaggtagggtgtctcttgctctgttgcctgggctgggtgcagtgatgtgatcattgcttactgcagcctcaaactcctgggctcaagcagtcctcccatctcagccttccatatagctaggactacaggtgcgtgccaccacacttggctaatttttaaattttttgtaaagacaaggtcttactatgttggccaggctgctgttgaactcctggcctcaatcaatcctcccatgtagagttcccaaagcactgagattgtagggttgagctactatgccccaccttctactcaaagatttcttaattgtctaactcaaaagccctttttcaggtccccattcttcttgaattttctgtgctacttgaatattccttattgaccaggctacatgaaaattctttctcttttttggtgttattttattttattttattttattttattttattttattttattttattttgagacggtgtcttgcactctctcccaggctggagtgcagtggtgccatctcggctcactgcaagctccacctcccaggttcctgccattgtcttgcctcagcctcccgagtagctgggattacaggcgcccgccaccacgctgggctaattttttgtatttttactagaaacgaggtttcactgtgttagccaggatggtctcgatctcctgaccttgtgatccacccacctcgacctcccaaagtactgggattacaggcgtgagccaccgtggtgttacattttaaatattttgaatttttgttaatgttcttctttgcagtctcccaatttccttccctcttctttgaatacatcttctctccttcctttgctggaagaccctaaatgtacctgtaccttccccttacactttcagcattcaggccaactagagataattggacaagccaaagatcatgtctgacatggctcgctagtggctctgtgtctgaatgggttggcatcatctttaagaatcttgtcttggcctaacttgggactgacattttaagcattaaaactcttcactaattaacagaggcaacctaaagaatagtttttgaaatgatgcttgagtgttctcttactacattccctgggaatattccctggaaagcccacagagttgataatgtatttgaatcatgtactggaatgggctagtattaaaagttattacaatactattttaatttatatttataaacttatttatttgtattatataaatttatatttacatactttaatttatgtttatatttaatttattctacaaaatataaatataaatttacactttaaatctatataatttatatttatataagtatatatttatataccttaatttgtatttatatttcaactcagccagtccataaaacttgtagttatttttcctgtctttctaaaaaggctaaaaggcaaatgttctgcagtatggaactgagtctccgagttaagaggtttgccaggtaattgctagcaatgacaaaggtgagatttgactgtcaattttctacctttctgaacattagacagacttccaatattcacatatcatctctatgtggcattttccaggactttcttaggtcttcaaaaaccaaatgagggacatatctctacttcacaatgaggaaaccaggacttaaaggggcttgcccaaattccctgaggtcagcaaccttctcttctctttgtatcccaagaacctaaaggcaatggtagcaagatggttaggagactgggccctgtagtcagacatgcctgcctttcaaatcttagctctaccactgacttgcagtaggaccatgattatcttttttctccttttgtaaaatagtgcctgcctcagggttatttattcattcagcaaacatttactgatcacctatcatgtgtgaaaatgttctaggaatatagtagtgaaccagggagtaaaaaaaatcctgccctcctggagcttatgttctagttggttgttgttaaaattaaatgagacaatgcattgaaaatgtcctgtatagtgcctggaatagagggggtatgcattttgacagaattaagacaaagtctacaaactcctggaagtaatagcttttgcctttccttgaatctataaagatagcaaatgtaatattaataagtcctttacttttccaagaaccatttcattccacggaaagccatagtagtatttagccatagtagttgtttttataatttagccatagtagttgtttttataatttagagttctttggttgcaaacaatggaatagaaaacaaagaatcaactctagcttcctcaagcagaaaggcagaaggatatgtatggctgatggaattgatgagagggtgttgaactaggcttagtacctaaaagacctggagcctgggaactaaactgcaagaggagtctcatcacgattcaaatgtcaataggttttccctattctgtgctagccctggagtggtgagaatagtgtgaggcttttgcttactggctctcggtgtgtatccagtcaaggagggataattctgtgaaaggaaagtgtggtgcatttacaaatctattgggcagtcaagaaacaaccagtgacagttctgaggtcttaaagctggatgagttatactgtcagcacaaagtgtttgacattaagtaaaagaatggggttcttgttcccaactaaacagtgggaattctaccacccagtggctatcctctgaaataaacatgcattgaaaagagtccttatgagtttagttataaagacacatagatgnnnnnnnnnnnnnnnnnnnncgttaccccctggcgcgctctgtgacaacacattcagaattaggccttctaaccaaaataaggcgctgtagacaacctctggccagtttgaccacacctggggggacggcatctttttcgaatcaggggtcgctcatcttggaggcgggggccagcgatcaacgtccacgttgtggtaagtgattccaacattcaggaaccacagcatgtagtatagccgtacaaaccgtgcgggtcttatcacccaggagggggatggactttagaccacccgggatgcatcgtagtaccttgtagtgtcaaggcaatgtgcgtctggcgaaaagctcgtgaggcaggatcacacgttacgaaagcaggagccaccaatgtcagagtctgggcacttgcagggcctggacagcagatagtattttaatattttaccagctggtgctgccatgatggtgcatcacagacgaagatcacccccggtctgatgcttcaagataaagatgtcagaagaaagtgtatggactattttcagagtctggtgcttcgttggttcgaggttattgttcgcacgtactaaatagattttatgaaacttcatccctggctttatttgccaaaggcgagtcctccatcttgtggtttctgcatctctttggcatttgtcactatgcacttgttgccttttatattgtcacaggaatcccagaaacacctatagaacatcagtgatgagcatcttctgtgagtccagtggtgcactggctctgggaatatggagagacctgttacattaccttctataattacatgtatttgctattcctgagaaatcatttgtgtgtctctgccaggaaacattagcctttccattttttaagttttcaaataatatatgtagaaataatataaggaaagtacatagttcaatgcttgcacttaattgatagtcaataaatggcaatttgttgacattccaataccttgaacttcctggatagctctgtaaaacggaaagtgtccttgggaacaaaactgcacaagcatgctggtcaagattcaaattccagggagaaggtgttcaacagcctgcccctgggctctgtgccagcctctcggtgatgaagggagagtccggcttctgttattggctccccagtatgtattcaatgtgtacctttaatcaaaggtaaattccatgagggaggggccatgcctgttttataggccactgtatcttgcatgtagcagtttctagcacatgatatgcacccaagaaacatttgttggagaaatgaccaaattgggattctctctacagaggctaaagggaaatgactaagctacttgctgagtggctatcattagtgcataattttcaaaagcaatcatagaatgggcaagacgtttaatctctgtcatgaaatgtaacctttagagggaagacaagcaatcacaatgtgacttctccgagtgtcctgcagctttgagcatggcccgggcctctctctgatggggctgatgaaagccaacgaacaaaggcattttgtatgttaaaacaaaccacatttagtcaacagtgtttgcaatgactaatccctggtaagaaaacaccaagaagtggcctacacctcaaaaaatataagcacagagaattctttcttggaatactggctgcaaaagttcagcgtttggcatttgcaatgattgctgtttgattttctttatggttgtgttggcacattctggaaagtcaggaagctcaagtatatactgtgggagctctatggggtgggaataggagatatacaagctttgttttgtattataactattgcaacacatttccaaatgtcactttttgtccatggtgggagaacctggggatagttcaatgtcagatggtttcaagtgacataacactagtgcagtaatttatttattcaattattgtttattaagtgtctactatatgttgagtctggtgacactttggtttttctgtgtttaaattttattgtttcattctgatgtagcacatcccttcctgcatctctttgccagcctaattccttataacaatccagacttcccctcctacatcacttctcccaaaccaccaacacctggcaccctaccacagcttaggtgcctctgatgtgggccctgtagaagctttacattctcccaggatttctcaatctgcctgtttcttatttgtcctgtctctcccatgggatgagaagctatttaagggtctgggctatggttgtcactaacccagtatcattacttaactcagtgtctgaaatatagtcggtgcttattaagcatatattaaatgcatgcagaatatggaattaaataaacctgaaattattttttggagtacattatacaatgcacaagagtaggcatttttagaagcatcgagcatagtaggtccttgcttgtcccaagagagcgttcagttagctaagtaatcctcatatatttgacaaatgctttttgaatgccaattatgttccagtttaccatctatttggaagtaaagataagtattttaaaatataactaacattaaaagtcttgagtggtaaaagccagattcaaataagacagtgaagggtcaggggttgcatgggtatattagtccagtctcactctgctgctaaagacatacctgagactgggtgatttacaaagaaaaagaggtttaatggactcacagttccatatggctggggaggcctcacaattgtggcaggaggtgaaaggcacatcctacatggcagcagacaagatagaaaatgagagccaagtgaaaggggtttccccttataaaaccatcgatctcatgagacttactcactaccatgagaacagtatcggggagtgcgcccccacgattcagttatgtcccactgggttcctcctacacacgtgggaattataggagctacaattcaaggtgagatttggatggagacacagccaaatcatatcagtgggtgaggatatcacttaggctggtaaagtatttcaacctagtttatattggaaacaggcctttctttcccttccttcccctttttttctttatagcttctcattcatccatctgggatttacccggtgtctaccatattccaagcatcgtattagatacttggaatataaaaatgaatgacacactccaacctcaggaaatacacagcagtaaaaaaaattttaaaggtgaatcttgcctttgaaccaaacagtttagtacagtgtttattttcagtataaaaactcatatttgtgggacaaggccatcttcatttatatagttcttattccttctctcaaattatgtttcttggccaagtctgtggaactgttggactgtatggcctctcagtcaagccagacacagctgagaggccatcggaaacttgtaggaatttccggtaattggataggaccataatcaaattttatatgaagtctggatgtgctgatgatgtgccttcatttcccaggtcagagggaaaatctggatgccttaatacacccaaaggttaggagaggccttttctgaaattgttttcaaagggatttccatgaccaaaataacataactatgctaaaaattctgtgacctgataagaaatcccttgcctggattcctggcaacattacttaaaactaaaaatgattctctcttctcagaactaacactcagtatcggactgacttatctgacacttgtcatgtacacatggccttgtgtcattagttgtattttcactgctcctgtctcactcccttgactagattataaactctttgaggctaataaaaataatacagacaatagctaatatttattgagggtttctatgtgccaggcagtattctaagcactttatacgtttcatttaatttttacaacaacctgtgaggcaggtattttatcattatcttccctgtgtatggggaactggtcccagacaagttcagtagcttgccctaggtccccaatcctagtaattgacagagctaggattcatgcccaggcagtctgactgtagaacctgtacccttgtttactttattgtttgtcttctctagatgtcttgtgctttactacatgctgacttgcatgtggaagatactccagaaatcaaatcgttgttttatcagatagttttctaaatgtctcataatcctatcaagtttctgtctatccttctgggtaggagatataaggcagttgttattgtcttaatattcttggtgagagtataaaggataagggtttatttcaggtacagcaaagaattttctacagaaatccctcctcattatcaccactgaaaattcacagtgcctaagtgcttatcaggttcaaatatgatggaaacctgtcccatctccaaatttgagattcctcttgtacacatctaggacatttgagtacctcctcaaaatgtgtctcattgatctgaggtaacatagcagatgtaacttaggaagtctttattttcatttctttaacaagtaatagtcctttggaccattgtaatagaacacataaagtataatgaccctaagttaatgttgttttatgctttattttctgtaccatgtttctatcttacatgtctctcacttttccccctttaaaagatgttctagggagtgcctgccactaaaaactaacccctttctgtactttcctttaatcgaactatgaaattttgtgtatttaaaaattttgattgtattttgctttctataatgaaaaccttcttctaatatagaaaaccagtatcctaaatgctaaatgcttaattaaaaaaattcttttacaaatttcttatataaaaaggaaaacctgtgaaaggaaatctctcagctccagaatcaaattaacaaataattttgattggaattatttcatgcagaccatcctgttaacctgcaaaagacaaagtgcattatagtttttttttagggcagtgatgatgtagctggaagttgaaataattggtgtacaaatacatgtgcaaacacgcacacatgcatatgcctgtctgggtcatgtgtcttgtacatatctatttccctaaaggctgataaaaatgtgctcacgaaaagataaaaactaggctttatatggtaagtataaaacatggcatgatgctgtataatactttaaaagagttatgttggtgtgcttaaccaatatttcatgggagaagagaactcgaataggatcttaagctttaggatttctatgaagaaaaaaaaacggagaaaactattttatagtgaagataccaaaatgtggaggtagaaaaatgggggagggtggatttttaaaacgacaatcagaggagagtgactccagtgctcatgggaggtaggcaggaaagagaatgagtgatgtggccttgatggggagcaagtacaatgaagactgccatgaaaattctatgtcagggctgtaggggtggagacagtggaaatctgaggagagcagcctctctgtaaagtgatcagctcctcctcaaatcccagtttctctagatcttcagatttattttttaaaagcagaaatttcagatacaatttgcggttcaataactgttgttaagtaatctaataatgtttaaaaaccttttgtaggcaaaaccatgctcaccaaatgaaacgtatgtctggactggttcctcctgaagacctctagtttgaaacttgagctagaaagaatgaaataattctacattttaattcaaaatgttgtggtctgcctccttagtggggattaattgtaatggaacagaatatttatgccctgcatgatggggacaagtagaaaaatgtgctgaattgatggagaaaactagaacctggcttctgaaactcttggttgtggaccagcttgagcattacctggacgcttgttagagattcagaattttaagctataccctaaacttcctgaattagcatctgcatcttaacaacatcttcaggtgattcatatgcacattaatgttaaagaagcactggatgtagtatacttaatgttcttgttttaaaatagcttctgtaagacacagcatacagcaaaagtttgaagagagagcaaaatctcagagaatctttggtgtaactagtgaaacatgagacaataaaaaggttcactcttactgaagcttgaacagagcagttaatatggtaatgttgatatatttagtaatgcgttcacagtgttaagttttttgcaagaactggtgtgccaagcacaagactcaacacaggttatgcacatatttggtaatcagtaaattaccttagatagtaagtcagttgttgaatcctggacaactgataacatcatttgctttcacgtgttttttcaatattgtgctcagcctcaaatataaattgaatagagtgaccctttgatactctatgaaatcgactgcatttcctaagattctgtggtttcaattaccataaatttttgatattgggtccatagccattgcattgtcccagcataacaatatcttatcatcttatcattggttctgataatacagtctgcatcagcacaacatattgttactaatattgtatgtgtgtgagcatgtgtgtgtgtatgttcccagtcagaacatcatgtcaagtgcaggagcaatctgcagtttacctagattaaatcgaatcactatgtgtattgcaaaatgagaattatttttgttccagtgatgaaattgtgttctaggttgctagctggatcttgagtttgtgagatggataagtccattagtggttcctcactttattagcaacttaattgtcagaatgtaatgaaacttctgaactgcagcaactcattagaagcaatgaaacacatgacattttttctagaatattcagtgagctactttttcccccaaagagatcttgaaaataaaattaacaattaagtttaaatgtatacctataaaggtaaaacagttttgaattctgccctgaaaaatgttctggataagttagggtcactgaaaagaggggaaccagcatttgaattcctactcagacacatgtttaagtaacctttaatgagttacttagcttctttaaacctcagttttctcatacgtaaaaaggtgatttaatagttatttcaaactatcactatgaagataaaaggaagcggcgtgtggaaagggcttgacagtatccctagtgcacagcaagagcgtatcaatgaccgctattgtcactctttaattttcaacctagatattttaattctcctgcctttgccttgaaataagtttgattttatttcttcaaggccaaagatgtaatcattaaagatcatgtatcccactgtattttctactagaaacaaggctagaaagaaggctgtactttactgccatgcttgtactttatagaaattgttggtgtctaccaaagcaggagtttacttttagttccctggtagatcgtggttgttttcacttggcctttatgacaatattactctgagcactgtcacagaagctcaaagaaaattcttgcttctcttcttatgctttattttagcgacagctcccaaagatgatcttggcaatgtataagaagcagtacaagcattgcaagtggtgattaaacctttaacttatatttcaaagatagcattaggttggtgcaaatctaattgcagtttttgccattgaaagtgatgaccaaaaccacaattacttttgcaccaacctaattatttcctgaagcccgtagctcaaacaaacagtgtgatatgaaaagagtatttcatttccatcaaaaagcgaaaataaaattatggataattccattctccttctaactccctgttctgattttttcttttctttctcttcttattttcatttttgtctatttttttccttcattcaacatttaaataattatacgacattacagactaatgactgtaccatgcagcgaggattctgtaaacatcatgaggacaggagcagtgtctgttagggccactgctgtgtcctcacatgcatgaaacacctgccctccaaaaaaaaaaaaaaattctaaatctacaaataaatacaagaaggaataaatgagtaaagccaaatgaaacaagactatgaccttcaaagagcttaaatatgtattatggccccttttctttttaaaaatattatccagaattaaagtaaaatgcttgctatatttactaaaggttctattctctctagtcttatttttatgtaagataaatccattttttcttcccttatcatcttcaaacacaataaacttttctttttcatctgtatcccctgtttatatttgctatgattcagtggtttttgattttttaaatgacagttttgtcctagttcagctattccaaattgaaggcaatatctgtgagcctttttatcagctatgcgatagtcaatttattatgtaagtagaaaggccatgtattcagggctaaagattgtgatatggctcatcttaggtaacagattaagttcacatggcatacggtttcctagcgttccttcttaagttatgttcttttattgccagcataacattttgaaaacaattttaaataacgaacatcattagaggaatagtaggaaatttttatctgatgtattacggtgctctttatgctcagtgtctcatttaatcctcaccacaattctatgaagcagatgtctccatttttttctttgagacggagtctcactctgtcgcccaggctggagtgcagtggggcaatctcggctcactgcaagctctgcctcccgggttcatgccattctcctgcctcagcctcccgagtagctgggagtacaggcgcccgctaccacgcccggctaaattttttgtattttcagtagagatggggtttcaccgtgttagccaggatggtcttgatctcctgacctcgtgatctgcccgcctcggcctcccaaagtgctgggattacagatgtctccatttttacgttgatagtactgggattccagggcccagatgccttcctcaaggacacaggcctgtatatgacagaattgtaacttgaaaccctttttttctaaggctaaatcccataagactttgagtctactactttggaaatattcacaatgggcataatattgataggaacagcagcaaaaaatgagaggtcctgagttaatgtttcaagaatattgaatgctcttccggggacaaattgagcagcaattgacgctgaaatggcactgaattattttgctatcaattgctaaagccttatgttttcatatcgtgtgcagatctattccagggccacctctagctgatagcatcagatctttcacccctgaagagattacagctggctaacattatcctcacaaacagacctggaaagtttgtctacaaccactgatgggagctcaggcaaagaggactctgggagagggttagctcgagggcatcatgatttctcttctgcttctgtggctttgctctagagtctcagaccaatgctgtcattgtttttatgccggttgttatagtctacttgctactgtgaggtgctgtgaggaagaaataaatttaagtcaagtttgtaactatataagcatggtacgaattcagtaaatattgcttgaatgattttatctgagaggcatgaatatttagcactacatttttatataatgctgcttaactcttccttaaagcacataatgatcatgctattttttatgtcctgtaaccttatgggacaactatggcagatttcacttctgcctttttacagatcaaaaaattaaggcccagggaagacaatttgaaagcagggccacaaagttgtgtagacctgggctgactttgattaattatttaatcacactttagctatttctcttcccattttctcatgtatggcatacacaaacacactctggggttctttatttttatatatttttaagaataaaatgctcattacagaaaactggaaaaagacaaattgacttaaagtcatctgaaatctcaccttcttgtaatattttgggattcattcttttaggctttttccagtatccatgcatagatcatggactgaacaagtgctatttgacaactgtcttgattcgtttcataatatttaatggctatgtttcattttaacaaaggtatacctatataattgttttaatgggtatcaagcatttcacagtatgagttccctggttttctttttatctttaaacccaggtactcattgcttacacagcctatggtcagaggtaactctaatgtgatctgtgattctttgtttttaaaggtgttcaatctgatggcagtagtcattgtaataagacttttggctggcgggtgttgccatcatacactaaagagatttcatgacttaagacatttcatggactcacaagtactgaaacagggtatgagtggtaatggaggagagaactgtgactcaggaaagaagactccttcggtcaaggggccagacttggtatgcactggacaaagataaaacatcatgttctgtggcacatgtgagggattctgggcatctcagtatgccacagctggttctcactgatgggcaagccttctccttcagcctacacattagatcataacaaatattctcacctttcctcaaagtttttattatttaatcttttacaggtgtgattcttagtcctggcttctattagaatctcacctgggaagatgttaaaactactaactcccacctccaaagatactgacttaattgctcaagggtgtagggaaggggcaagcatatttttttaaatgcatatgtgattaaatttagagccaacattgagagtcactactttacaagcatctattactctgtaagagtcagaagaaaacctttatcccagtatgaaaccttttctaagaaaaaatatttgtgccctgtttttgtaaataagcctgatttttaaatctattttggctttacataaatacaaatagagttcttattgctttttcctttcatttatttctcacagttgtttattttgtttatagtaatttattttgtctatcatctctcttcccccaacagaataagctccttgaaggcaggaatttttaattattttgttcatcgctatatccccagtgtcaagagtgtccgacacatgctaggtgctcaaaaaattcttgtcaaaatttttgacactaattttgatgcacagatcatgattcctagtcccaggaagcttgtgatctattaaaaacacacagacatgaaaatacaatccagtatttctatggaggttaatgaattgtaatatatttacagtaggttaaacaatgttgagttttaaagaaagcatatggcaaatgtaagagacagagtctttgccacttatttccttttattctcctgataagcaacatggtataatagaaaaactaaggagccaatagttccaaaacagatgtagaattagatcagttaccagaggacattgagaaagtttgtttaaccctttggatgtcaggcttctcatctccaacatcatactgttggaagagttgaccacgcagcttttactattcagtgtttccatgttactacatcctatcgttataggagccacaatgtggcaaggcattaaatggcatgtttttccttttcatcgttctgtaaatcttacatttttatccagatccatttacacctgtcttgtcattttccatgctgttacagggacacgtgcttttttatcctgttatcaaactcacttttaaaatccccctttgaggttattagctgctttgtctaacccaatgtcatatgcttctccactgtgcatgctctccagatatgcatataagtcactgataatcatgaatgagtctgcatttggaattgattcagtgtgaagtatttaaagattcttcacaaggggttcactcagtctggcattaaaagaagctcagtatctaaatcctaggagattgcaaacttgctcagatgctttggaaacctaaacccatgtaaaatacttagatataaagtcattgagaagatgaacttctcatattgtatttgttcggcaagcatttattgacaacccgttgctctgtgcagagcactttagtggaatacgaaagttagtcaaggagtcaaagacccaatcccaagctctaagtggctcctagtttcttggagaaaggagctggaaaggctcagaggattaacatggagcacacttggatctctttcaccctagatggcctcacagaaaggacaccctgcctctgaatagcttccaaccaccttgagacaattttctctcattctaatgccattgccaggatattacagtaatcagatcatttgacgttacctgcatcttagtgtccgcaatcttaatataccatatagatccaagtgtcaggaatctgcagctgcacagtttcacatattatcttgtggtgctaagtctttatgaacaaatagcattgacctctgtgatggtgccgtctaagcacttctttttgtcagcaaatatactatcttatagagaactcacaggttgtaataggaaattattcttccttacataatgtaaaaaacactggttatgcctagggttaatgtagtctgctaatttgtaacagcagagctttgtgaggtattcacagcaggcctccgtgctaaagtcctggtgctgctgttctgattgatcaatgttcttgtgcgatgtttgttaaatattttgcctatcacccccctcctgcttatacctatacgtaaaccatgaaaaagtaatttcttactcattgcaagttccccctcagggcctttggcccttactcttactcttttccctgtctagaacatttctttcttagctattatgctttgctgctccaaatgctacctctttttttctctttctgtatgtatgtgtgtgtgtgtgtatataatatatatcatatattataataatatatatcatatattataataatatatatcatatattataaataatatatatcatatatttattataatatatatcatatattataataatatatatcatatattataataatatatatcatatattataannnnnnnnnnnnnnnnnnnnnnnnnnnnnnnnnnnnnnnnnnnnnnnnnnnnnnnnnnnnnnnnnnnnnnnnnnnnnnnnnnnnnnnnnnnnnnnnnnnnnnnnnnnnnnnnnnnnnnntatattatatattatatgattattatatattaatatagaatatataataaatatattctatattatatataatatatataatatattatatattattatatgataaataatatagattgtcatattataatctataatatattatagattattatattataatatataatatagtttatgattattctactataatataatatgttgtcatgtacacatggccttgtgtcattagttgtattttcactgctcctgtctcactcccttgactagattataaactctctgaggctaataaaaataatttttttgtatgtgtgtttatgttttatatatacacacatatgtatactgtattctcccgatgtataaatataaaatctattattatctgccatcctttcaccaccaaactaaaatgcaagttcctagaaaacaaattatagtacatagtaggcactcaataaatatgtgtaaataaagatatatatataatatttgtaaatacgcacataaatatgcatgtttatatgtatctgtaatatgtatgtgtaaaaatgtatatatgtatacttatgtatatgtatctgtaaatatgatattggtctgcatgtatgttcacaaatgaagggtgtgtcaggtatagatattttaattcagctgagtatggattaaaggtgatcattctgtgtaataactggcaagcagtcagtgatcatgtcaaaccatgcctgttaactctagcatctcaaccttaactagtaactgggagataatgaattttatacaaattgtaggaatttttgagtaatatgtatttagtaattttggtaccatccttacaatttctacattgtgtaggcttattgtacagtgttcttcctttttcactccatttgttcatgtcttatctcttcctcagatttgttttcaacaaatccatattttgtctcacttattttgaattcaatttagtgcatgaaaatgataatgttattgttattagcagtaaagataaatcctcactatataccaggcactgttctatatgatttgcatggattagctcagtcagttctgaaaacagccctgtactgtaggtcttattaaggttaagtaacttgcagaaggtcacacaccttgtaagtgatgtactcaggaccccaaatcaggaaatctaactttggagtctgtattttgcctcactgcctatttcaaataatatagcaatattatacggcctttaaaaaatcttaagttgagaaatgcttaagacctctgtgaaaatatatagaagaaaatccttaagaatcatttagcaggtagactatgtaataaaatagactccagaactgaaatgaactttatgataatggtgatagtcagaagttgttgaagaaagagaatgattggcaatataaagactgagctgccttaggactgccaaaaacaaattcgggaagtgaataaccaatatgctgtaatcaacagggaagggcagaccataaaacaactaggcacattaatgtaagatattgggaaaaatagttcacattgaataaataaaaatgtgttaataataactattaagatctagaatcacatgtgttagagagaataaatctagcatagatggaatcatacatttcaacttgatttacacactactcaacagccacaaaacagcaaattacccaaacttgcctgattatcagaatcgcctgggttgcttatcaaaattacagaatcctaggctctacctcccagggcagttgttctcaactgagggcaattttgcctcccagaaacatttggcatatctggagacattttggtagtcataactggaggtgtgctactggcatctagtgagtagaggccagggatgctgttaagcattctaaaacacacaggacagcccccaaaacaaaggattatctggcttaatatgtcaacagtgctgcagcccagaaactcatatctagagattttgattcagtggtctgtgatgaggctttgaaatctgcatttctgtctatggatccaagtttttctgataaaagattggaaacttggtgctatcaatagagttggacttgttgaaaaacatcccatggaagggaatgcttaaggtaggctttgagtagggatagaatagaaacaaaagatgtaaagagggaagaacattcaaatagaagagcaaatcacacccagtaggataaaaaaaggctgtgaaccaacactgggccagccagcaataaatagtgagaatcatttgcaaagcaacctcctctttctgcatggaaggccaactgtgcctcatggcatgtaacttgcatctcccaccttagattttagctgacaataaatgcatgctatgtcattctaactcacttcttagtccccaatatgaagataaaatagcccacgcccactcatttttctaataatatcttccataaaatcccaaaatataaagaaagggagtgagaatgatatttcatcagatatatctggtttaatatccaactctgtctttcattagccatgtgagtttggacataataatagggttaaatgggtggtttccattaaataatgcatgtagagaaattaactcaacatcaggaatatagaaaatagtaaagatcagctgctatttactattattattatttattaaagtaatatttatctaagagaactatggcattatttaaatgaacagaaaaagtacaagttgggatttaagatgatggcaggttcttatcatcaatcacagcaactgattattttgtgctttgttttgtttgaaggggattgagaaaatcctgcttcatagaaatgagtattttaaaatggctccaggtttgaaactattcaccctcagttctcaaggtttttaaaaatctgaatacaatacaaaacgattcaatttggctgcttaatttggtcatggtttccactgtgtttctgtatttatgataagaaagttaacacacgtgagtgtgttttctaaaaaaaaaaatgacttcttttggctatgaattaaggtatataaatacataaaatatacactataatatttataataaatccttataccagctattctagtgtccagagttctatgaaacatagtttaaaaacttctggataagattaatatatattcccagcttgaagatgagtgtgttatatggtatggaatgaagaaggtcaccactctagttcagatagattacatcaatggttttctcttgactagagagtcaatactcctgcatggtcagagagtaggtttgtctggcatgattatctcttcacgaaagcatcttgactctttcaagatgtttgcaaattgattgcttgatgatgtgtcccagtatccttccagacaacagatttgggtaaatttctgcgttttcaagacccatttaaacttcctcttttacaaaagatgatcattacatttacttctatagattcactgcctaggagttcatttcagaattaggccctctatagctgtagctgttcatattctttcttccccactaagaatatatcacttgcttgcctggcctgtcagctggtatatgtgaaatgaatgtgagataattttgaatcatagcctaagctaaacattattaagaagacaaattgtccgaggataggaggaggtgaggattacaaagaaaataacaacaacaacaacaaaagaagaatgaaaatccatatattcttatattatcaggatggattagactctttagttaccattctaactcattttagttaagcctctcctatatactaagtatctcaataataatcaaataggtctcacagacctccccttttagatagttcatgaagaagataaatcactaaaacatatgttgagtcagggagatgaatgccaaagggaaaaataagatagggaaaatgtgtagaatgtgtccagagtagttgggaaatgttgcactgagaaggtgacacttgagtaaatgaggggacaaaggggcaatccatgtggccctctggcagaagaaccttctaggaagagaaaacagcaagtgcaaaggcctgaggacaggagaatgcttggcatttttgtggagtagtgaggagatcagactgattgggaaggattcagataggtgaatgaggggttgccagagtcagatgaagttggccaagtgtagggccaccatacattccagttagcctggtgtagtctgggttcatccctgagtagctgattatgtgcactatccgctctccctctcaaaaaaggttctgcttggatgataaattatatggcgatccttggttagtaaggcactcttaagatttagcttttagtcttagagacatgagaagccacggagggtttggtcagaagaggggtttcacatgacttaggttgcatcaggatcacttcgtcttctgtgttgagaataaaatattgagatgggttggcaaatgggaagccagttaggaaccgatatggtttggctctgtgtccccacccaaatctcatcttgtagcttccataattcccatgtgttgtgggagggacctcgggggagatgactgaattatgagagcgggtctttcctgtgctgttgtcgtgatagtgaatgggtcgcacgagatctaatggttttaaaaacgggactttccctgcacaaacttttctttttttttctgcctgacaccatccacgtaagatgtgacttgttcccctttccttccacggtgattgtaaggcctcccacccacgtggaactgtgagtctaactaaacatctttctcttgtaaattgcccagtctcaggtatgtctttatcagcagcgtgaaaacagactgatagcagaaacctatgggattttcattcgagactatgcaatgcagccagagagttgagttgtttcacttgaggacatgtagctagctggtggtggaaatggatctaggattaattctcctgacttccagtctggacttcttcccacagtgcccagtttctctttcagtttaaacttgagaacaaatagaatgccttgctcgctcttttcaggcctattaagtctccagtttgatggcacaactcagttccttcctcttcccattgtgagaaataggcatgacccccacaacctccccgaacctttttcccctttctcctgaaatagctcattttgcatatattaaccaggaatttttaggactttctgttgaacttctgtatttatacttctggctcttataacctctacagaatactgaatttcacgtgtacagtacatatttattaactcatgaatgtgtgatagaagcaaatcaataaggatggagtctaagtacagatgtgaatatatgttttatgcctgtttaaataggaatatgtgtattaattggaattaaatggattcccatgggtctaattatgtctgtgaattcttcaattttgtttatattttatttccacttgattcttattttatttttacaggaattagccctggtttttgatcgttgctttcctcagttagagtggctgagaggagcaatgtatgtacagattatacattttttttatagtcaactacaattgaatatcagagaatgcactcaaggcattgagatatatatgtgcattagattctgttttaaatatgtgtgcttgagatataaacttgtgggtgtgatatggacagacatatttacacacgtggtatttcaagtagcctgtatgcccatggggagttactcagacagtgaaattaaaatttatgttatttctaccggcccacaaattccagcaaatttggcatccaacagggcaaaatagattgtcatataatgtgcttatctctcatgggaataaaataagaataagctaactctcagggcatatgtaagaaatgagtggacaaaaagcattttataatgtgttacgaaatgtaaggtggtatttattgtcttgatttttttattgcacacatatgcttgagatttcttttctttttccccaccgtctagtgcccataccttattctcagccctgtatttcatatgacaaacaaaaagtaattgggttattttaaggactcctcctttgagtgaggtaggagctaggaacctctcagtcattacatgtgggagtccgcccacttttggttgggtgtgtgagaaaggggcacagatatactgtcagtgcccacacttgggtataaaagaagcaaaaacaaaacccacagtggattgcagagattttagaggagaaagataacgaagagggaaaaaaaatcaattgtttgaatgtgggtattcaaaatacttaacaacctataagcaaaggctcagagcactttaagtagacacatgcagtgaagtggtgtctgttctgattagaatgggttaaagaaaaaagctaaaaacctcaaatcctattccagtagtcaactctggattgttatttttaaattttattgcaggaaaaaaacttagttttctttaaattttgactttactttcttataaatattgaatcaaactttatgcatcagaaccaaaatctgtacatttctgcaaatattttttgctgatccatgcatgaaacaggtacaaggttttatctatggagattcaagaaagggacacacctctgacccactgtatttcttatttgaactcctgaatctattataaaagttgctttcccatgtagttatttgaagtcctggtggggcctagcggaaccaataatccaaagtagtggataatccaagaatgtcatttatatttggctttggaatacattaccagatgttactctagcagatttcctttcctaattaggcctcacttaaagtaggagttaattttgtcttcattagctgtttccaagtcagcaggatggggcaaggaggaagcctggggcatgctgggtatttggggggagttggcccagtgctaaacgtctgtggtagatcctgttcaaagaacaaaattcaaacacagataatcaagttgatgggaatatacactggaaatgtttatgaacaccttcttgaagaattctcaggcctttgtcaactctttttttttttttctattaatcatgagtgcaaaaaaattccgtaataggaattaggcaaataatcacattaaattttgtacagaaaaaaaattagaggctcagagaggttaagtcacctctcacacagattgatctctaagtacacagtacctaagatactgaaactgattaatgaatgataagaagaccccactgtttccttcttattgatgatttgaataatgaggaagcgagaattcttctggcctaattcacattaagagagccaagataatgaagctgtgattaaatggctattaaactatttttatcaaacagagatcaagcgagtgtgagaatctggggacacagagtgtaattgcaatcctacaggatccagaaaaaattactaacataagcagggcatggtcctttcataatagctcgcatttagaagtctttgggataccgcatgcagtattcactctgcatttctcccttcaggtggcagttagcatctcagagtccctcctctcctccttaatttagtggatttattgaccctctgtgtgcagttgggtgagttgaatgcactgtctgccacaccatgtataaccagttggaagatccttttgccaactgtgcacaaaggaagaagacccaaatattacaaactgggttcagaattttaatgtagaggtgcccctggctacctgaagggccagaacctatcttctttcaactatgccttttaaatgatgtcagactagtacaggtcatagagggactcagctgtcccaaagagcagagataaaccttctcattttgttgactgttctaaactatcatttattaacgacacggtaacacttaggaattgttgcagattctaaattttgggttgttagtataaatgcatgtgtatcatctgtcactggaaattctttacaccatgagtgagtttttgttgatgtgccttctttcttcctagagcgcccttagagaataaggtgttacagtcacacagacctttatttaggtcggaagaattgcattgtgtaaggagaacccaaggttgacacccaccatgggaaatgctgtttgatagccacagagctcaactgtggaaatgcccgttggcctgttttctacctttccttccgcctctgctgccagctccaaggctgagcttagtttgtgcagctgtagatcactgtctaattggtgacctgctctttcttcctccctactctgcattttcttttcttttttccccaactcggatggagctaagacatatattttttgtaaaatagtattttcaaacaattagaaagcagtatcagagccgagtctttgaaaggttatcttgcaatgtcagtgcagtgactaatgtgtttctataccctgtcacctgtgaacagacatgtgtgagtaggccagtgtgcttcatctgcggtgactttgatttatttgctctgtaaattgggaccaaagcaataatgggaagtgacattaattgtttaacagagtcctctttgtcacatccattgccttctccggggtgtttgattgttgaaactcatgctaaactaattgaaattgccacagtgaggggcaatatccactcaacattatataaacacaaagtgtcatcagcaaatagcaagttttcttcccagttttctatgattaaagaaaacacagacaatttgaaacaataactttttccttccttaattcactaaaaaatttactaaaataaatggtcttggagcacctctgtgagtcacccacatacagagataacaataatatcgaataatcatttgtaatggatacagaccgtaaataatcattacagccctatggtagatactggttgaatagtagcccttactacccacatactccaacacacacacacacacacacacacacacacacacacacacaagccgccatgctaatctcccatcttacaaatcctccctctcattgtgtttccagtagagaggggaattaaaatagttggtggtttaatcagatcttataaattaattatgacattatcaagctccaatatttttgccattgtatttgttatacattctcccagacttattaaagaaattggagaaaactggttgatttaagtgttctttgtcgttttaacttgattggaattatcatagtttgtttacactagggatagagctaaggcgccattgtattatgtgattgaaagcaaataacggcttgtagtattgctggaaagccaaacacaaaatttacatcatagtaaacaaaattatccatttattggtaaatattcttaactctttttcttgaactgtttttgaacatcaatgaaataagcctttttgaaaaatggaatacttggaaaaatgcccaatttactgaaagtgtgtatatgtgtctgtgtgtgcatgtgtatttgatgtattttctaaaattattagataatatggagatagttataatggtgtaaatctcatgactttgagatgattttttaaatacatgtatttcatttaaatataattgtattcagaacagttaaataacctcaatttaatttttgtatgtgggggaatcaaagaagggagttattgaaatctttggataccagattatgatcctgggcagaaaataaggaatatcatttcagcctatttaatattagaattacatatacagggtcctttcaaaggcatattgaaagaaggtagattgaagaatctacctgagggcctgagggtattcaataagcttcagttattgacttgtgcaatttggatttttacaattggtcagtttatggaagtaggtggcaccattttgaagttaacagttaccccttctgattaggatttgcctcctaaactagaggtttggttgttttttttttttgagacagagtctccctctgtcacccatactggagtgcagtggcgtgatcttggctcactgcaacctcagcctcctgggttcaagcaattttcttgcctcagcctcctgagtagctgagattacaggtatgtgctaccacacccagctaatttatatatatgtgtgtgtgtatatatatatgttttttttgagacagagtctcgctgtgtcgcccaggctggagtgcagtggcaagatcttgactcactgcaagctccaccccccgggttcacaccattctcctgcctcagcctcccgtgtagctgggactacaggcgtccgccaccacgcctggctaatttttttgtatttttagtagagacagggtttcaccatgttagccaggatggtcttgatctcctgaccaagtgatccgcctgcctcaacctaccaaagtgctgggattataggcgtgaaccaccgtgcccagccaatttttatatttttaatagagacgaggtttcaccacattggccaggctggccttgaactcttggcctcaagtgatcttcctgccttggcctcccaaagtgctaggattacaggcatgagccaccgtgccctgcaagtgcattaaagttttaaacttcagacacaccatgttgcacccaaactcaaatccagggacgtgagagggatgcattatgcaaattaaaaaacgtcaattaaagtccctggggagtacaaatggctctttttggcctcttgaatccaaaagaagtccttagttttactgctggatggagggtgatcaggaattaaggaaaacaatttttatgtgaaaatagaatgtatacgtgataaaggcctgcctaatttctctagtaatacaatttgattttctgattagctatcttattctgtgattcttgtaattttgtcaggtcaattaactggagttcagtgctagagagaaaggaagtgtgggtactgctagcttcattagatgtcagcagctaggtgcattttataataaaatctgtgtgggataatttagcccatattgttaatgtcatagcatacagaactttcaaaagaagattttggaagcaggtcagattgaacaaacaatgtgaagtgctaaaagaaggaaaagaaaatggtccagaagatattgttggcaataaatgcagatcaatgaattatttagcaagtaatcattgattagctatgccatgtgcccagtgttggtactgtttgtccacgtgcatagaatatcacacactgccttgttaacaaggtacatgtttggaagtccttgaacattttttacagagtactgaaataaatattatattttataatgaattgtttacaggttcttcccttccacagtagtgttattagagggacagattttgtcttgtttctttttgtatctcccacacttcagatgtccctggcacagagtagatgttcaaaaatgtttgttaagtgaatgattgaagattagctttctatgagtgtgttggtgggaatgaatcaaaaacaaggtagaatatatttgcaggagccactattagaaataatagtgcactggggccgggcgcagtagctcacgccggtaatcccagcactttgggaggccgaggtgggtggatcacgaggtcaggagatcgagaccatcctggctaacatggtgaaaccccatcttcactaaaaatacaaaaaaattagccgggcgtggtggcggacacctgtagtcccagctactcgggaggctgaggcaggagaatggcttgaacccaggaggcggagcttgcagtgagccgagatcgcgccactgcactccagtctgggcgatagagcaagaccctgtctcaaaaaaaaaaaaaaagaaaaagaaaaagaaaaagaaataatagtgcactggaatagtaccccagccacaagaaataagtgcatttaacaaacattacaaagtaagactttattcagtgactgatcacagaaagaagagtaaaaatacgtccagagtttgggtatgaagaattgttacccaaactaaagaagtcaaaagaaatagcagttttgttgtgaaaggtatagagtttgggttttggggatgagggagctattatgaagtagaagtgtccagtaggcagttcgagatttatgactaaagttgggagagatgtcagggagcaaaataaataaatgattttggagtgttcagtgatgagattataattgaaaccatgaaagtgtatagttgctttcagtatagttccactttctggtgttgttcaaataaagagctgtctagacagtttggggggtatgctgtataggagattcaaacactatatctgaaaatgaaattgatggttaaaattctctcaaggtccaagattctctaaatcttttcttttactcagggaaagaaagaaaacatgagcaagtggaaaacacttctgtaaccaagaagaattgcatacagcagttttagcactgacataacaaatcgataaattaggcagctcaaccatcagagattagtagagtagaggtattcattaattgtgtcatttggaccaaaacatgaatttggagtttgagaaagacatgatctttgtgttctggaatgggcattctagatttcacgtatggttcactcatttggtcaaacatgttgatgcatagtgttacctgcctcccagggtcaactcacatcttctgtttttttctctttctgcagaagatagatgaagagaatgaggcaaacttgctagcagtcctcacagagacactagacagtctccctgtggatgaagacggattgccctcatttgatgcgctgacagatggagacgtgaccactgacaatgaggctagtccttcctccatgcctgacggcacccctccaccccaggaggcagaagagccgtctctagtaagaacccttcctactgtttagcaggaattggagttgcctctggctacccgctgcatgggtatgatgtagtcacaataaggtttggattttttcatttagaatgatgccaaagcaatccccaagcacactcagagttgcaaattgtgtgattctctgtttaaaagtgttgataatacacgtcttcgtgtagtcttattgcagttttttttactatcttttgctgttatgtgtgtgtatttttctatcttagtgttatttatgttcatgatgaaaacttagaaaatgttggcaactaaaaggaaaagactaaaaatttcacctgtgatttcaaataacctctcatataaaaatgattgcaatatcctttcaagatatatcatgagcatatgggttcaaatttaaatacatgcataatttttaatggttgcatagtattttattgtatggaaatattctaatttattttgcaatcttttatgggtggatatttagttttttcttctatttttcactatttcaaattgtataataattaacatattagcatttttattcttatacatacaatcctagaaagaattggtagatcaacgaatgtgcaatgttttaagactttggatccatatttcttatgaagattgaaaaactatagcacgtttgccacccaagttacttaaatttatggtagacaatgaagactgaatttgttggaaatgaagagagaattttctgttcaatgcagtgcttgaccagagttttattagttctaagacacagtttaccttctcatctatgatagccatttgtcatttgctaaaaatcagacataaggacatgctgtgtaaattatgggatgccatgatcctccagactctaatatcgtgtttggcatgccatttagaggttgttactctcctatcactaagtttttgaatgttaaaaatactctatgcaaatatatggaggccctactttgagtccattggattttgaggtttctcatatggagaatatctcataagtaattgttatttattctccaatttctccatttgttagtgtcattggctttgctccctagtaccctgatttctttccattgatatcagattgttttcatctattcaatttgttcatttgggaagagcagttgactcagagacatactgtatgtcagaacagggaagtccttgagggtcatccagtgaaatgaagaaacagaggtcaggagacagcaaatactttgcctgtgtcagaacccacatctcctgatccacaggccaggactctacttacaaatcctttttttcttttctaaaatcagtgatagtcattcttttatccaaacattctttgaatcagtaatttcatacaccaggttatgaaacacggttcaaagcatcacaaaatctttcatttgttgccacttgacttatttggatttttagaaagaaaatgtgtatctattctcccccaccccccacactccactcccatgtcttcatttagcaaggcagcttttctcacctagtagtgatttggaaattattttagaaagatgttttttgctttatttgttcaaaaaaaatatgtagacaacaccaagtccaatttatgcagtaatcccttatggctggaaattttgagattttccttctacttttcactattatttcttgtataataattggcacatttgcatttttgttcttatgcatacgattctagaaattgaattggaaggaaaggaaatattttcatagttggtagtgtaatgccaaacttttttctactctttaaatatcatatttcctgtagcactattgcgctaaggtgtgacataaataaaatgatagaattaacttttataattataataaattacatttaaaatttcaataacttattccaatgcttaaaagatgcataactttacttgcttttccctttccctgataatgtttctagcttaagaagctcttactggcaccagccaacactcagctaagttataatgaatgcagtggtctcagtacccagaaccatgcaaatcacaatcacaggatcagaacaaaccctgcaattgttaaggtacaaatgtaaattttttaatacaggggggatgtaccaaaggattttggcttgaagcagtaaaacaaataagtttgtaggtattaattcagctgggaccccgaagctgcctcataatgatgaaatagattatgaatgggattccgtaaacagcgcttgagctactttaaactaggcagagttcatttacgcatcgtctttgggtgtttggaatggaagtgccactgtctgttagttcttgcccactttattgttacctgcagcattgtgggccacggtaaaatttgctgataagctggtattatctatgagtggctttaagatgcagaattgctgttttgctagctgtctaacctgagaaagattgcttttggaatcaccacaaaacatctatctctgccattaattggatggaatgctggcaatgccataattcagctagtgggctgtattaaacaatgtttgtcttgctattcactgtgagtgaaaacggagcattaaggggtacttaagagagttgtgagtactgggcgtcagcaatcagtggcaaattaaggtttaagccagccgattttttttattcacaataaaggcgctgtagggtcttgttagttacatgttgctgagtaggaacattgaaatgtaggagaaataaaataaaaagctgcataaatgtcatttaggaattttaaatgtaattttctttccttgttctgcaaacagttattcacagctcatagatctagtacacttagactgaacacttcattgaaaaatcccatctctccagaaaacctatatccattctgataaggttcagttcactaattttagctttctttatgccttgtttttaagactgagaattcatggagcaataaagcgaagagtatttgtcaacagcaaaagccacaaagacgtccctgctcggagcttctcaaatatctgaccacaaacgatgaccctcctcacaccaaacccacagagaacagaaacagcagcagagacaaatgcacctccaaaaagaagtcccacacacagtcgcagtcacaacacttacaaggtaggctggggaccaaaacgagctgttggtgagggcactggaagcaaagaaagcacatgcaaagtctgagaacacaccaacttcttgcttccgtcccatcagcgtcactctgtggaaagagaattcagcacttattacagagcgggggaagaaacctttctttggacacaggttaaacatattctattcagctgataggcagtctaattcacaagcaccaaaagactcctgaaatgttagccaggtggtgaggaattgcaacatcacatgatgtttatatgaatctcagaatagctgagataattgaggttatgaacaagctgggctaaccaattcattatagagcttttattttttcccttccagtaatggaaaaaatgaggcaccagtgatttgttatatacaccttaagaagtagtaaatagtgtttatgcagcctctcttgattactaagtacattccttttctaattcttcttgttctttcttcttctttctccctctccttctttctccttctcctccttcacctcctgctttctccccttcctcttcttcttcctcttccactccttcttccccttctcctccttttctacaaccacatgctatgctcacagattttattctgtaaataaagatttgaaaaatcctgattgttttctttctatttaagaaagtgcctagattaaactaaacatctgggttgatttttattatcaccatatattgctggagaaggctgatggttctgaggcagatcctggtgatttggggaaaacctctcttggcagagatacaattttctatcttttaggctcctccttctcaaaatgtcgtggtcttagaagcccaaagaccccttgaaatgggcagttgatttaaaacatgccagcttctactttaaccttgtggtggaagtaggcatattataacacaccaattataaacatatacctctttttttttttcactttcattttcccaacttttccttttaactgcagagtgggagccagtgatttctgctttgaaccatgattaattcgtgtaggtatgctgttattgctgctgattcaatacgctttttttccccagtgttctgaattttcttccctcttcactacctcagtattagcccaggattttcagaagccttcctgtaatattttaaaatggctttccattaggttttccctggtagatatctcaaatccactgcccatcactttctgtcagtttgggaaaatataattagtgaaatggaccgcattctcattgctccagctggatcttcctcataagcactagaacagtttttcctggagtagaaccactctgccataggccttgttggtcatgaaggcctcaggtgaggggaagcagatgagctcgctctagtgagtgaacaaatgaattcaccgggctactcctcaccctgtgctggtcatgcatgcattttctggggccaaatttaaagtccttgtaatatgtgacccagcccggcagcacaggttttaaagttgttttttttttcttttagtaaacttttacaaatcatgacaatgaagaattaaataggcctttggaggaaattttctttagatgagactggctgtatttggtatatatctgtggcaaggtacaaaacgctcaccccagaacaaaacctgttgacaaacagacaaaattctttagttatgaaaggcttaaaagaaatgaaacatggctgacaagtaagaactaataaatgctcaacttcagtgattatttgaattattattcaaaatcaaaatgcggaaaatacatgaacaattagagataactaggaggatcgattgaaattacctttcttaaggtgttgtaatttttttctcactgaacatcacgtatgatctccataaaacgttttggagtcaggttcttttccttaggatgattgtctagccatggttgtgtgttgatgtctcatttatttgttcatttattcatgcattcacccaaataccacaatctacatgaaaaagacacattcctgactttaaggatcctactagtctctggtctaccagtcactggaacagggtggattaaactctcaataaaccaaatcaatactcctctaatggtggaattagagagtctgggtttattcagggatcggattctgtatgtggtttggggactgtccccttcttatggctctcatttcctgtttgcctttggtctcattaactatgactgttgccatctcctctcctttcattgactttgaccttacctgtacccaacaatcagaattcgagagtcttcctttgagcatttcaaatagcctaccctacctcttgaaaaccagaatttcagtgactgattttcaatgtacatttattgtgtcacatagcatatagttaatatctggttatattttctatggaagttgtatgaattatcctaattattagttgagtatcataaaacttggtaaagtttcttcataaatggattctttttgaaaaacttgttatattagacatactcaaaaattaatgtaaaatcagctcatttatctgtgtaaatgaaaaactgaatcaatgtatctaatttgttgaagatatgagcttcatatttctggatgtatgatataccattcaactgtgtagatctaaatctataaatatgcaaatactatttatccaagtaaagtgtctaatttcaggttaatttggacatgaataatattttcacatttcaaaaaaattgattgctggggttgattaaattactttaaagtcgttgaatgcaatttcttttgacaataggataaaggaaacagaatcttggccaactctgtgagtaactattttatggccctgaaaatatcacttagtatcattgggtctcagtttcttcaaccataagataagaaactttattctaaagacctttttggttttgacactatgattttcattacataaataactaccacttgaccttttgaaagtaattattttaatgagaaaaaattgacataaacctacatacacataaacatatgcttatagataagcatagatatacataatacatgaatgtatagcccaagtatgcctctcatcatattttcccctccttctgttcaaaatacaagattgccacagagaagcaattgaaattttgggtgagaagattcttaatccacccttcattattgggaaatgcctcctgtaggaggtaagattcagaaaagcacaaaaggcagtagttagcctctttgcaagtctacacacctttcaactgattaacatggtgttttactttagttgtctatcagatttggggatctgaaccccttctaaaccatctggatcaatgcccacaatttgccatcatctctcaattaattttcagtgagtggaatagttactgcatgagctttggcctcatagaaataactattatcagggctagatataaaattatacgttttaggagtaaaatcaactgaatattcataatgttctgtcgccttatagttgctctgctgttttcttgtctaaacaaaccgtgtactgtattccaaattaaaacagaaaacattatttctctctgatggtatgatgcaaattttgtatctgtaacagggagggttcatttttggaaaaattctattttcatatgtgttttcgaatggtagtttactgatgcaaacgctgtttggaatttgttttagcataatggacttttgtctgactttgattcaatattcagagaattccttagtttagtctttgagttttctggttgtttttccaacttgactgttgtggagagaaaagaaatctaaaagacactcaatattacataattagtttcttttttttttctttagccaaaccaacaactttatctcttcctctgaccccagagtcaccaaagtaagtattaagaaatgtaaccattttctgaaagggaagggggttctaatacatttggctacagcaactccatttcagtttgtttttataaatgtgccatatcttccagtgaccccaagggttccccatttgagaacaagactattgaacgcaccttaagtgtggaactctctggaactgcaggtaagccttatatttcacttagaacttgtgtgtgtctgtctgtatatgtgtgtgtgtgtaataagataacagagtgtactgtctatgtggttaatgaaattaacaaagaatacaaaattggataagaagttatctgcaaatatttccagttgtttatttaaaaaaaaaaacctaataaaaaatattgaagcgcttaaaaaacttagactaactgaagagctcttaggcaaacttctgagttggttgcaaatggtgcccttgcactaagtgctttaagtttaggtacttgaaccccaccaaaaagtgagtcgtgggatgtctaaacaagaaattccttggctctggccattgctgataaggttaaaggaacagtacattaaacaagatgctttgaaccagaactatggtgcctacctgcaccgtggtcattgttgctagtttaatttcacactttgtgtttgctaaattaccttcttatgaaaggtctaatgcatgattgcatgacttggtcaagcagtagagtagttaatttcatggtgtagatatatagtgtatgtgtgtgcagactcacacatatgtacatatatacatatttttataggcatgcacacatagacacaaatctttacttataagcatatacttaacatcatttcttaaatacataacactatttcttaaatacattataacttacatatatgtttaggagtagcttttgtgtgtatatatgatatgcagtagaggccttcttatctgaccagtgaggaccagcaattggtgggtttattaaaaaagttgattcaagcttatactgttttattttacctttgcttaaaacacaaaaatatacattcaaatattacagttttggtagaagatggagatctttaccttaagcttattttttactatttgggggtctattgattcatctttcttgtataaaccacactaatatattattatataatacatattatagatggtagccactttttattgcttgctccttgaaggaaaagattagagacattggtatggtagtctgaattcttctagatttttataatttttcaaatattttccaattccacccatccacaactaatttgataacacttcttttagcaatgaccttttttgagttttttttttacaggaatatttttccacactcacatttcattcatttacaggagattttaccatcttacataatttcaatcaccagtacaatgcacatgaactgtttagtctattggggtactgagacacattgataagtagcatgaaagcaaatattatttactggatatgttccaccaccttctaacaaaggtaggcccagaaagcagtttttagtttgttgagtgtgattgtaatagctgtacagatataaattggggaagctgaagtaaagcccaattgcatttatgtaacagaagtgatttagagctttggaaagcaaggagatgaggacttgaaagatgctgaatgaggctagaaggtaaagtttggaaccttcctggagaataacataaagaggagattgagggagatttgttttttctctagagatattctgggcttgaaatgcagtgcaacatataatgtctacaattgtcatctcctctaaaaatcttcagcaaaattggtcgcttagtagtgtttgaagattgtgacaaacactaattgtacctagaaagaatcacaaagggagaaaaagagttatcaaagggaaaacactgcagcatagttcaagtttaaagacattgattggccaaaagagttttttaaaatgataaaggcagttaaaggactgacagaaatatttaggcaatactatcatcctagtgaatgacagaggtgattcatggaaaggaatgtggaggaaattaagctctccataggctaacctgacttggagagccttcagggaaaacaaacaaacaaaaaaaatgcacagattttgaagcgtaggggtggaatggagagaagatgt

SEQ ID NO: 162 - DNA, 28253 bp, Human
accaaccaccacccaccaccactaccacccctcaccacccaccaccaccgccacccaccacccaccaccatcacccaccaccaccaccatccaccaccaccacccaaccaccaccacccaccacccaccaccatcacccaccacccaccaccacccaccacccaccacccaccaccatcacccaccacctaccacccaccacccaccaccaccaccacccaccaccacccaccacccaccaccaccaccacccaccaccacccaccaccactaccacccctcaccacccaccaccaccgccacccaccacccaccaccatcacgcactaccaaatatgtgatcatcaaaggtagaagcttacaacttgtggaaagacagataccactctctggcctggggtgggaggacagagtatgactcgtcctcaggcaggttggcttcctggatgatcagagaagtagaatctagggtgaaatgaaacaaaagtagatggagaaatctcaacaggaccaagtagagagggagaatttaggaatttagttagactgcagcaaaagaattcactgggtctctggccctaggctaaaaactatagaactccaaacctttaatgggagggggtacttcatggggcatgtctaagaggagtgaggaatgaggttaatgtgattctacggaattagacagaagtctgtatggctgaatgtactgggtttaacagcaacgttttagttagtttttgatattattgcaatgatgcactccagcaggagacaaatcctggcaggatgcatggttcaaagaaataccaatctttcaagagtatgtttaaacaaatttcactataaaagactatatctctgggaatgtcaagcaattggttactttagcagaaaaaaaaaaactagccatgtgacaacatggggataaaggaaaataaacacagtggacatgttattttttctgaaagtaaaatcgagccattttctttcataatctagtacagtcatgtgagaaattctgcttcatggtgatctcaagcaacagtttattggtggtgtggtacccaatagattgtgggtatggttgtaaatatactaaaaaacattaaattgtatgcctttagtgggtaaattttatggcatgtaaattatatctcaataaagctgtttaaaaaagaaaaagtaggaaacaaaataaaccaaataaaagtactaaaatcacccataattaattccaccatacagagataactgttaacatttgtttaaggttttcttgtttgctttttctaatttgtaaaagtcatatacgttcattaggggaaaaagaccacttagaaatgtttgcttgggccgggcgcggtggctcatgcctgtaatcccagcactttgggaggccaaggcggggggatcacgaagtcaggagatcgagaccatggtgaaacccagtctctactaaaaaatacaaaaaagtagccaggcgtggtggagggcgcctgtagtcccagctactctggaggctgaggcaggagaatggcgtgaacccgggaggcagagcttgcagtgagccgagatcacgccactgcactccagcctgggcgacagagcgagactccatctcaaaaaaaaaaaaaagaaatgtttgcttgaagaagaaagtgaaagataattataatctcaccactgacagacaaacattttaacagcttgctgtgtatctttccagacttttaaaagacatagatttatatataaaccagttttgacaaaaatgggctaatactatgcatactgctttgtaacctttaaaagtacattgtgaatatattataaacattctttcacataaatgtttatgatagaaatataaatatattttaagtgaatgctttgctctcaagtcaaagatcaatattcctaactttaccggaacccactagaattatttgctgttgggtcagttggatgaaccctaagtatctttggctgcttttcaggttggctctgacacgttttattccttcaagtacgaaatcaaggagggggattgtcctgttcaaagtggcaaaacctggcaggactgtgagtacaaggatgctgcaaaagcagtaagtgtattggccattcttgggccttctgttttctccgttgaccctgccagatttttttactgatgcagaaatgatggctactggtgagcctgtttatgagaaatgcaaataaacattccaatgtgtagaaaagtcagatgctttatatctgtgttcttgtatagacagaaaaatcatggagaagccagcagttaaacatggagaaagcctttccatgagaagggggctctagtgtccagccagaacatgtggctcagactccagagagataacaaattgacatttgggccaagccaaagagctggcgaggggagggggtgggtgcttccattgcacaatgttaagtgcaaatcttgactctgccttccattagctgtgtgatagcaggggagctgtgacctctcagaactggcactttctgctgtatatgggagataatattgacctcatcaggttgttggaggatgaaatcagatgaattatgcaaataactttgataacaatggctatcttaaccaaatgcctaacatataggcctggcacaccgtagctggttgttttgcttttttttttttttttttttttttttttgagccagagtctcgctctgtcgctcaggctggagtgcagtggcgcgatctcagctcactgcaagctctgccttccaggttcacgccattgtcctgcctcagcctcctgagtagctgggactacaggcacccaccaccacgcctggctaattttttgtgtttttagtagagaccgggtttcaccgtgttagccaggatggtctcaatctcctgacctggtgatctgcctgcctcagcctctcaaagtgctgggattacaggcgtgagccaccacgcccagccatggttgttttgctttaattaagaaagatttcagacagtatctgcctcagaagcaagcctctcttttcatggattgattcccttcttttatgtcagaacataaaagatgactgccagtcatctgccattaccaaagagtactgaactccaagtcaggagtctaggattttgcagtgctggttctcccttctcagtcatctcatctgtaaggtggggataagtagctgctgtgctctgtactgcctgcttctaggggctgtgtggacaaagggaggtgtgctttatcctgatggaatagtatctgtcacttagaatccaatggatatgactgaagaatgaaaagacaaaacaaaacaaaaacactgttcaacaataacaattaaacagctgcctattattaagtgcctgctgtgtggcgggcctctagtaggcattttgtgtgtgtttgcacacatactgttcacaacaactctaagagatagatgtatcccatctcctacaagacgggtaaactgagactccaagagtcaaggggacatgacagagttaacagctagcaagtgacaaggctggaactgaataacattttgatgccaaggtccttgccctttctattaagttaaactgaagtttatgtgaacagtattaactcactgaagttgagtggtagataagaggagtgtttagcaggctggttctagacctctgcgtccatcttggttagaaagaaatagctccagggctcagccaggtgcagtggctcacacctgtaatcgtaacactttgggaggccgaggtgattggatcatttgaggtcaggagtttgagaccagcctgaccaacgtcgtgaaaccctgtctctaccaaaaatacaaaattagctgggtgtggtggcacgtgcatgtaatcccagctacttgggaggctgaggcagcagaatcacttgaatctgggaggcagagattgcagtgaaccgagagatcgcactgttgcactccagcctgggtaacaaaagcaacactctgtctcaaaaaaaaaaaaaaaaaaataggaaacaaaagaaaaaagaaataccctccagggctcaaaacaaagactcaagctttaaaacctcatcatttacactgtctttcctccagcatctcatgaatatcagtggcttatataaagtaatcattaggctattaaaaaaatttattctcatgtctcaaaactcttttggtaaaatcttcacaagttttgttttgttttgctttttaaggaaagccacatttagcaacagtattaggtagactttcccatctgaaagattaagataaatgatctctttcttttctttttaggccactggagaatgcacggcaaccgtggggaagaggagcagtacgaaattctccgtggctacccagacctgccagattactccaggtggctggtttatcctctggcactgccctggtgggaaattaaccatttctgtgagccaggaacacaatcttgaccaggctctgcttgctcccagagggtggcagtagtaaagccatttgcagagttagggagcattgggtggagcggcagagcccggaggttgagccaggctcgtgaccatcatccccttaggactatcccaactcttcccgtgtgctgcattgtacccagtgtgtgcaagggctcaacagaaggaccagaagacataagacctgccctccattgcaggcagcatcccagattgaggagcgcataggctttgagggcagacctggcctggaatctttcagagctccttgccttcttgcctctccttttccttgtctagaaaagggaggtaagagtacttcccacttcacaggactgttgtgaggctgaaatgagatgatatgcctggaggtacaatcataataacatactaacatattaatcataataacatattagcaacaatcaggataaaagtaatagctaagatatattgagtccttatgtcccagccatgactcaaagcaccttacatgtattatcttctttttctttttttcttttactgatacataatattttacatatttatgaggtacatgtgagtgttttttacatgcattgaacgtgtaatgattaagtcagggtatttggggtatccatcacctggaatagttatcatttctatgaattggtaatatttcaagtcctctcttttagctactttgaaatatacaatatattgttgctaactatagacactctagtctgctatgtaacattagaacgtatttcttctatctaactataattcagtacctattcaccaacctcttcatttcccccttctacccgcttaccccgctcagcctctggtatctgtcattctcttcccttctctatctccatgtgatggttttagcttccacatgtgagtgagaacaatgtgaagtttgtctttctgtgcttgagttgtttcacttaacgacctctagttctgtccatgtggctttaaatgatatgatttcaattctttgtttacggccaaatactatttcattgtgagtatataccacaatttctttctttttttttttcattttgagacagagtctcgcactgtcgcccaggctggggtgcagtggcacgatctaggctcactgcaacctcccgggttcaagcaattctccagcctcagcctcagcctcctgaatagctgggattatgggcatcgccaccacgcccggataatttttgtgtttttagtagagatggggtttcaccatgttggccaggctggtctcgaactcctgacctcaggtgatccacccgcctcggcctcccaaagtgctgggattacaggtgtgagccactgtgcctggtcccccacattttctttattcattcaccttttgatggacatttaagttgatttcatatctttgctattgtgaatactgctgcgacaaacctgggagtggaagtacccctttgataggctgatttactttcctctgggtagatgcccagtagctggactactggatatatggtatttggtgttttcattttttgaggaatctccgcactattttccatagtggttgcactaatttacattcttaccaacagtgcattagagttctcttttctccatttcctcctggctgtgtttaccgcttacatggcaggcagcgagagctctgtggtgaagaagtccaggctcccagggggtccctccaggtgtgccactcactctgcagctacgttccctttttatggactttgcctctattgaccagtaggttagggctatctgttatgaacattacttgataatttaatacaaattctttttaataatagccattctaactggggtaagatgatatctcatctcataatggttttgatttgcatttccctaatgcttagtgatattgggcattttttcacatacctgttggccatttgtatgtcgtcttttgagaaatgcctactgagatcatttgcccactttttaatgggattacttggtttttttattggtgagttgattgaattccttgtatatgctggatgttagtcccttgtgggatgcatggtttgcaaatattgtttttctttctttttttttttcttttgagacacagtcttgctctgtcgcccaggctggagtgcagtcgcatgatctcggctcactgcaacctccgtctcctgagttcaagtgattctcctgcctcagcctcagcctcccgagtagctgggactatcacattcagctaatttttgtattttaaattttgtaattttgtatttttaggagagatggggtttcaccatgttggccaggctggtctcgaactcctgacctcaggcgatctgcccccctcagcctcccaaagtgctgggtttacaggcatgagccaccacgcccagcctcttctttgtttagggcagtgtatgcgaatgctcattgcgatcattaatgctgtgtttttgtctgctctttgttaagccgagggccctgtggtgacagcccagtacgactgcctcggctgtgtgcatcctatatcaacgcagagcccagacctggagcccattctgagacacggcattcagtactttaacaacaacactcaacattcctccctcttcacgcttaatgaagtaaaacgggcccaaagacaggtttgttctttaattctctaagtagcacagtattactaaaatttgttagatctttacatttaaaatgtatgattgcatggctggtggtgttttcatgtgactagcacaggaagcgaagagctttctccttagtcaaagtgagtcggatagtgcaatatgtaaagtgagaaaagatgtcgaatcagacccccttcctttgatgtttgattttaacaaatgggtaatcgtcattacaggctcttcctagagacagtgaaaaggaaaagtcataccggccttaggatttttttttttttttttttgagacagagtctctctctgtcgcccaggctggagtgcagtggcgcgatctcggctcactgcaagctccgcctcctgggttcatgccattctcctgcctcagcctcctgagtagctgggactacaggcgcccgccacccacactggctaatttttttattattattatttttagtagaggcggggtttcaccatgttagccaggatggtctcaatctcctggccttaggattttaagaaaactatattatcacctagccatcatgagttaaacacagctccaaaatattaaattgtgtctaaaatggtcggcatggctttctgggtacccactaattacagttcccatatcatcagaaaaaaaaaagtatatatccgtaattttttttttttgacagtctcgctgtgttgcctaggctggagcagtggcgcgatcttggctcactgcaacctctgcctcccaggttcaagcaattctcctgcctcagcctcccaaggaactgggattacaggcgctcatcaccatgtcttgctaatttttgtatttttagtagagacgaggtttcaccatggtggccaagcgggtggtctcaaactcccaacctcaagtcatcctcccacctcggcctcgcaaagtgctgggattacaggcctgagccactgcactcagctacaaatcttcttaatgattcagtacacccagacttttcttcttttttttttttttttttttgttttttgaggaagagtcttgttctgttgcccaggctggaggctggagtgcagtggtgccatcttggttcactgcaacttccacctcccaagtttaagagatctcctgcctcagtatcccaagtaactgggattacaggcacccaccaccacgcccggctaatttttgtatttttggtagagacaaggtttccccatgtcggccaggctggtcttaaattcctgacctcaggtgttcctcccgtctcggcctcccaaagtgctgggattacaggcatgagccaccacgcccgcccctcccagacttttctgatagttgactgggtctcttgtatttcagcctcttattatgagtgattccctttggttagtaacattctctgcatttaataaaccttacaacttgctttcatgcgagcatgctttactcaattatgtccgtatagtgctatcagggtgggagaggcccagaataaagtagaagaaatcttactacttggtaacctgggagcctgaggacccaacagtaaagaccactcccctctaaagttttctttatccgtctagaagggcattattattttatgaaattcagtaaacatttctctctgcagcctggcagaggaaatattgttaggattcacttaaggaaatccatgttccaaaactggctgaaaaatagaaaaatatatatattgcttgtcattttcagatggctagcggtgtatgtgtgtgtgtgtgtgtgtgtgtttgtgtgagagatatgagactcttaaggtgctcaatgtttattcagcatttttttgcctagtaataataatattttatatttcttgggcacttattatattgccacactgttttctaaactcctcataacattcatatcccacagcgaataatgtttaaactgccctttaaatattcaatctgaaattgtttcaggtggtggctggattgaactttcgaattacctactcaattgtgcaaacgaattgttccaaagagaattttctgttcttaactccagactgcaagtccctttggaatggtgtaagtaggcaaaaatttaatgataaagttcttagcattttgtttacattttgtggtaactatcaagctgggtgggaagactgtcacgaaaagtttagatgacattcagcaattcatattcacatttacttgggaagactaaagctcacgtcactggtcaagctgccttacctaactggccaaagaatctgcacagctagcaataagtatttttttataactttattttattttatttattttttgagacaggatctcaatctgttccccaggctggagcacagtggtgtgatctcatctcactgcagcctccacctcgcatgttcaagctattctcctgcctcagcctcccaagtagctaggactacaggcgccaaccaccacgcatggctaatttttgtatttatagtagagacagggttttaccgtgttagccagagtggtctcgaactcctgacctcaggtgatccgcccaccttggcctcctaaagtgctggtattacaggcatgagccaccgtgcctggccagcaataagtatttacagagcataaccagggactacgaatagataaaatgcttgaacggtcaactgtatctttgttatgtctccacactttcccatttccttttcttccccaggtgctcaatgcccatatggtgttcccttgctctacccagggttattcttcatgtcaaacttttctctgtttgttttctcatcttcccttccctacctttatctttaataaacagaccctgagtctctagcccttagtggtccttcttagcatcgtatcttgttatctgaaccaaaattatattaaaatggtatatctcaaggtagtagtagctagcgaatgttaagatggcgaagacatgatatgtgcccagggatgtttgcatttgagcagaagactgtgctttagccaaggaaatgctgcaagtcctttgatctagtaattctgcttctaattcatttatatgggaaatccagaccataagatgttaatgtcagttgttttttaatagaaaaatattgtaaacaaatagtttatgcaacattacagaatggttaagtaaattacagtatatccatacagtagaatatgatacagctatcaaaaatttttagtttttagtgacatagtaaaacggttacaatgttaagtaaaaaacaaaaaaagtgggatacaaaactatacatacggatttatttaaatatgtaaaataaatgtaaatacaaaaagtgatggaaaacaaattatgacaaaatatagaatgtagttaactttcagttggaattgtgggtgctttttcttttttgagaagaggtcttgctctgtcaccttggctggagtgcagtggtgcgatctcggctcactgcaacctctgcctcccaggtttaagcaattctcatgcctcagcctccctgagtagctgggattacaggcgcccgctgcaacgccaggctaatttttgtattttgggtacagatgggggttttgccacgttggccaggctgttttcgaattcttgatctcaggtgatccacccaccttggccttccaaagtgctggtattacaggtgtaagccactgcatccggccgctttttctgattctttatattttttggaagtttttgatatttcccgagttttctaattgagcatgcatttattttataattggagaaaaaagtaaaaaggacactatcaagagagtaaaaatacaacccacagaatgagagaaaatatttgcaaatcatgtatctgataagagtttaacatgcagaatatataaagaacctctttttgttcataaaataacaagtattagaaagggcatggagaaattagaacttttgtacattgctggtaggactgtaaaatgctgcagccattatagaaaatcatttggcaatttctgaaaaacttaactatagaattactatgtgacccagaagttgcactcttaggtatatgcccaaaagaactggaaatgcatattcaaacacgtgtttatacatgaatttctatagcagcaaaattcataatagccagaaagtcaaaacaacccaagtgtctatcaataggtgaatggataaacaaaatgtgctattatatatacacaatgaaacactgttcaccctttaaaaagaatgaaattctgatacatgctacaatgtggatgaagcttgaaaatattatgttaagtgaaataagccagacacacacaaaaaatattgtatgattccacttatataaaacacctagaataggcaaattcagtcagagactattggagttgctagaaatgtaatgtaggcttttcttttttttttttgagactgagttttggtcttgttgcccaggctggagtgcaatagcgcaatcttggctcactgcaacctccgcctcccgggttcaagtgattctcctgcctcagcttcccgagtagctgggattacaggcatgtgccaccacggccggctagttttgtatttttagtagagatgaggtttctccatgttggtcaggctggtctcgaactcccaacctcaggtgatccgcctgcctcagcctcccaaagtgacttatcacacagcacctggctatgtttgtttattattcttttttcccctcacttctggagacctaggcataggtctttctatttgtttgttctatttgtttgttctatttgtttttctccctctgtttttaaattatgaaatcatgtcgagtcaaaaattaacttagaatgctgttctaataacattatatggaattctcatttttgttattttgtttttttttccttatccaagaaagaccctaactttattggcaagcatgtttatatttccaagtatattgtttttgtttgtttaaacatgttatgaatttttagagattattttttctttttggtgctgaggtgaaagaacataccctgtattgtttctgctttgtaaaatgtattggatctttttgtgacctggtgtaaaaacaattaaaaatatttgtatgatactggccgggcacggtagctcatgcctgtaatcccagcattttggtgggtggatcacttgagatcaggagttcgagaccagcctggccaacatggcaaaacctcatctctactaaaaatacaaaaaaattagccgggtgtggtggcagacgcctgtaatcccagacacttgggaggctgaggcaggagaatcacttgaatccaggaggcagaggttgcagtgagctgagattgcgccactgcactccagccttggtgacaaagagagactccatcacaaaaaaaaaaaaaaatatatatatatatatatacacacatatatatatacacatatatatatacacacacacaaatacatacaaattagtatgatacttataaagtatcatttaaaatcatatgtagcatatgaaaataccatttaaataaatctttaatatgttattcaaatcttctatgttcttgtttattttttattcacttgccctgtcttagatttgtaattgcatactaaattttcccaccatattatttctatccatttctattcacgtgtaattttttctactttaggtattttgattccatgccttctggtctatgcttttgaaaaataaaatgatcatttttactacctttaggaatgagtgttttgttctcgtgaattttactttgtccaatattactaatactgtagttcctgctacgtttatatttgtctcacgtagctttgttcatctgttatttttaagctttatacattgtttttattataagatgattcttgaaactgtaatacattgatttggtgttttaacagtgtgaaagtcttaccttatttttttagaaatttacctttttacttacatggctgttatttctgtactagatcttcctgctttccacgtgctcatgtatatgcatgtatttgttgatgctattgatactattaccttagtatctcttttgcagtaaggctatgttttgcttctttcttttttttctatgcaatgatttggaaagtacacgtcctattcttcaattttactagttgtttacttttaagactctaaaaaatgtttttaactgagcacttatatgctttttaaaaaccaggataccggtgaatgtacagataatgcatacatcgatattcagctacgaattgcttccttctcacagaactgtgacatttatccaggtaaggaataacacatgttggcaccgcaatagaggaatagtggtcccagacaactggctgagtcttttcctataagttgggttttggttcccgtgatatactccaaagtctgtgtaacctgcagacacagatgcaccccttgatgagaacactgtaccccttccctgcccagttgtgctgcagctcagactgttcttgtcagaatggtttatgaagacagaagggaaatgtatgacccctgggcaaagttggcctttgggtacaatgccatctggtctctcttctctgtaagttgtccttaagtcagatgttgtaagttgaagagacctgtattttatttctaagcactcagaacaaaaccctttcaattaaggtggttttttcctgcatgttataatgggaagaaatggagatagtgtgagtttgtggtcaggtcagtgtttcttataacaagggtgtgcttttttcatacttggaaaacgtttgtatgcgttccacgagtagtctgaagctgcctgttcatcagaaccatagcacttaaacttttctcatgagagtcactcctttaaattaagcattgctttttacagtttccatcaaaaatgcaaaaattcaggaaaagtgtagcgttttgttggagttactcgcaccttcctattgaaaatgtttccctaagtacactgtgctctgaggaggagaaaagaagagaggcaggaagtgaaagtcagacagacaaccttcccccactcactactgggcctgggctcccatgtagccccttatacatgtggatgctggttcttgtgcaggagggatgctaggccaggctgctacttcagtgtacatgttgacttaaaacctgatcctttcagggaaggattttgtacaaccacctaccaagatttgcgtgggctgccccagagatatacccaccaacagcccagagctggaggagacactgactcacaccatcacaaagcttaatgcagagaataacgcaactttctatttcaagattgacaatgtgaaaaaagcaagagtacaggtgtgtaaactatactacaaaagcagtaacactatagtctatgtgcaaattgctgactaattttgccactgatcttggctctggattgggaaaccatacatttgataatgtgatttggtgcattagatttggtaaattaagtgccaatctccctgtatgcttcatcccggacaagtattttacaacattctctctgttttctatatgtaaaggactgaggtgaggatcaaataagttaatatatgtcaaatcactttttcaaactctaaaatgctatataaatacaatagcagctgggcgcggtggctcacacctgcaataccagcactttgggaggccaaggcgggtggatcacaaggtcaagagatcaagaccatcctggccaacatggtgaaaccctgtctctactaaaaatacaaaaattagccgggcgtggtggtgcacacctgtagtcccagctactccagaggctgaggcaggagaatcgcttgaacctgggaggcagaggttgcagtgagccgagattgcgccactgcactccagcctggcaacagagcgagactctgtctaaataaataaataaataaataaataaatacaatagcaaccatgatataattaataaaattcagggctagggccaggaagacttacgctatgtctttctggactcatctctcattataacatcacataatgtcttgggctcagccatatcagtcaatccatcattgccaaggctccacgctttcttgcctccatgtctttcacccactgttctctctgcctgggatcccgctctcctgcaaatgtaccctctggggattcatctctcctttcatgccctatcaatagaagactgacaggagtgtcttctgggagtcaggagactcagttccaccatagcatctgccgctcacatcccagatcactctgggtggtcattcaaacgttctaagcctttgtggccccgtctgtaaaatgagtgactgtattagaagagcctacattttgccgggcagagtgcctcatgcctataatcccagcactttgggaggctgaggcaggcagatcacctgaggtcaggagttcgagaccagcctgaccaacatagagaaacctcatctctactaaaaatacaaaactagccaggtatggtggtacatgcctgtaatcccagctactcggaaggctgaggcaggagaatcacttgaacccgggaggcggaggttgcaatgagccgagaccgtgtcattgcactccagcctgggcaacaagagcaaaactccttctcaaaaaaagagaagagcctacatgtctagcaactccaatagtctctgactgatgtcattatggacagacccctattttagagactaaaaattggcttccctaaatacaagctaaataaaaataatcaaaatagagccaaattgttacagcaagccaacataatcctcataatctggtgaaaaaattctcactaaaaagttcatacttttggctcagaattgaatttctaggaatctaaagtaggagtctttatatacaatgatattcactgcagttttaagtataacagcaaaaatagtaaactgtcaaaatgattaatatgagaatgattagatcatgtctggcatatcctcagaatagagtgttaagcagcaacttaaaagcatctttgtgcggagctcttgatatggggaatgtcttgtgttataatattcagtgaaaaaaaggaggcataaaattgaatatacatgatgttatcagttgtgttattttaaagtacagaaaataatgtgggaaaaaaaagtggctcacgcctgtaatcccagcactttgggaggccgaagtgggtggattgcttgaggtcaggagtttgagaccagcctgggcaacatggtgaaaccccatctataatattaggtttggtgcaaaagtagttgtgggttttgccaaagtaatggcaaaatcacaattacttttgcagcaacctaataaaaattccaaaattagcagggtgtggtggtgcacacctgcaatcccagctactcaggaggctaaggcacaagaatggcttggacccgggaggcggaggttgcagtgagccgagattgtgccactgcacttcagcctgggcgacagagtcagactccacctggaaacaaacaaaaaaacgaatgcctcatagtcatagtggtgatttttaggtgatggaataacactactttaatctttctaattttctgtgttacttttgtaactgaaaaaaagtaaacaaactagattaaagtaaatcaaaactgatactttgatctctctgctacttgagcacttgtttctatcccagacacgaccaccctctctctctgatttcattgccatatgaccacgttaggtttacttgaaagggacgccagtctatgctattcatgcttttttcagctttaacttctcactttatatttctgctttcttgtgaaattattttattcttttttcgttgttgttttttaagagagacgggggccagacatggtagctcatgcctgtgatcccagtactttgggaggcagagacaggaggatcacttgagccccggagcgagaccagctggagcaacatagcaagaccctgtctctacaaaaaaagaattaaaggccaggcgtggtggctcatgcctgtaatcccagcactttgggaggccgaggcaggtggatcacctgaggtcaggagttcgagaccagcctgaccaacatggtgaaaaaccatctctactaaaaatacaaaaatcagctgggtgtggtggtgggtgcctataatcccagctactcgggaggctgaggcaggagaatcacttaaactcgggaggcggaggttgcagtgagcaaagatcatgccattgcactccagcctgggtgacaagagtgaaactccatctcaaaaaataattaaaaaaaaaaagaattaaaaaattagctgggtatggtggtatgtgcttgtagtcccaactactttgggaagctgaagtaggaggattgcttgagactgggaggtcgagactgcagtgagctgtgatcgtgccactgcactctagcctaggtgatagaacaagaccctttgggcaacagagcaaacaaaaagagagagagatgggggtctcactatgatgcccaggctggactcgaactcctgggagcaagcaatgtgcccatctcaacctcccaagtagctgggattacaggcgcacaccaatgcacccagctcccttattctttattctgaatgttgtaggaataggccaccatgtattgtatgtcagaggtttgccatcaaaaacagaaccactcattctcaagcatgaatatctagtcttcttagtagttacagttttctctgtggattaatgaatcaacattctagtatgcatatgtgtctacattaaggatgtcagggggacacaaagaggtaacccatcagatagctgccaagtcaatctgaatattgcaagaatttcaaacttactttagagagataaatctttactaatttttgcatttaaagagagcaatttggttgcttggacatagtcacccaaggcagccttgatggaagcagccaatttactggaaatcaattaaacatatgatgaatttgctaaaagctagtctccaaaatgaccaatttgccaaattgctaaatatttatagttttaatcttgccttgggtttgcacatttagtcctgtttggatgcatgttgattccacgttgggttcatatttcagatatgaaacacttcctgaatcttccattttcacacattagtgattacagtttcatataagttttattttgccctaccaccactgctgctgtccccaaggctgttgatgctcctgtctgcctctgctgagatgaataaacttccaagatctgtgtgtgcacatgcagaaatttttcctttgacaaagtcctaggaatgtcaaataatatgtagatatataagacttgatgcaaattgccagaatcaccaaatatttgcaatgatgccaatttacattcacatcacctgggtataagacaccagttgaggccaggcgtggtagctcatgcctgtaatcccagcactttggggggccgaggcgggcggatcacctgaggtcaggagtttgggaccagcccagccaacatggtgaaacctcatctctacaaaaaacacaaaaattagccaggtgtggtgacacttgcccgtaatctcagctacttgggggcgctgaggcaggagaatcacttgaatttaggaggcggaggttgcagtgtgtgtcactgcactccagcctgggtgacagagtgagactccgtctcaaaaaataaaagaaaaaagacaccagttgaggatcttaatttgaattctcttcctaccagcagtgactgaggctgcttgattcctatgcctggccaatgccacgtatcatcaatttttgttttcatctttgcctgcatggaaggctaacaatgatgtctcattgcttttttaatgtgcatgtttttgtttattaatgaagttaaacttttttttaggcttaatgaccgttttaacttctctgaaatacctgctcatggcttttgtccatttttagtgttgggctttatattcatacagacattgattctatatcatagttttcccagcttgcctttctactttgcttattgtgatttttcagaagcagttttcatttttctctagtcaagttttagtattttccccttccttcagatttctttcctctgcttttcacctaagaaaggccttcctcatcctgggttttggtgaatatttatttatttgtttagttgttttttgtttgtttgtttttgttttgttttgtttcccgaaacagagtctcactctgtcacccaggcttgagtgtagtggcgtgatcttggctcactgtaacctctgccacccaggttcaagcgattctcctgcctcagcctcccaagtagccgggattagagatgcttgcaaccatgtccggctaatttttagtatttttaatagagacagggattcattatatgttagccaggacggtctcgaacccctgacctcaggtgatctgcccgcctcaggcccccaaagtgctggaattacaggcaggagccactattcccggccaacacatttaaatactatgatttaatactaaataatttggttgagaaattgggccacaaaatatttaatggaagatagtgttgagtagtgattaaaactgttgctagagattaaaataatttttttttctttttgagacagagtctcactctgtcacccaggctggagtgcagtggcatgacctcagctcactgcaacctccgcctcctgggttcaggtaactcccctgcctcagcctgtcaaatagctgtcaaattacaggtgtgcatcacaaagcccatctaatttttatatttttagtagaggtggggtttcaccacgttggtcagattggtcttgaacagctggccttaagtgatccacccgcctcagcctcccaaagtgctggaattgcaggcatgaaccaccacgcccagcctaaaataatttcttaatattaaaaatagtaagagaacaataaaaaccccaaataatttttctaattacaaaatttaatccacataatttctatagtagtactaactcagtatttcaccaattcaagatttggcaggacaataaggcatatttaaaaacattttaagtttttcttcctattcctgttagattattagatattacaacttgagcccttgaattactagtgaatttaacagctgttggacaataaaactcaaataaatacataaataaataaaaattataggccaggcatggtggctcatgcctgtaatcccagcactttgggaggccgaggcaggtggatcacctgaggtcgggagttcgagaccagcctgaccaacatggagaaaccccatctctactaaaaatataaaattagccaggcgtggaggtgggcaactgtaatcccagctactcaggaggctgaggcaggagaattgcttgaatccaggaggcggaggttgtggtgagccgagatcgtgccactgcactccagcctgggcaacaagagcgaaactccatctcaaaaaaaaaaaataaagaaaattatagcttgcttatttcttcccccacttagaaaaggaaatgggaccaaccgatagccaaatattttaaatatgcatgccaagctttaatgccaaacgtgtacttttttgtatgtaactctctaagttggtcaattaaaatttcaagattctcccttaacatttcttaaagataaatgatttattatgcaaatatttttaagcgtttactttgtactaattaatttttcaggtggtggctggcaagaaatattttattgacttcgtggccagggaaaccacatgttccaaggaaagtaatgaagagttgaccgaaagctgtgagaccaaaaaacttggcgtgagtagtcatgcacctgtctactttttcactggaagcctatttgatgtttttagaatcatttgtttaaatgtctcgtgaataacactgtctctctttcgacttctgttttcatggatagcaaagcctagattgcaacgctgaagtttatgtggtaccctgggagaaaaaaatttaccctactgtcaactgtcaaccactgggaatggtatgattctaattacagtcagcgtggggtcagttctgctcattctgaaaatccatatttgggggctgaaaatgaaccattactgaaatgaattggggagctatcttttttaaatggggagtaactctcacacttctgtgctgatctctgtttaatggctagaaagaagagtaacaatcctcctgatcacttctcacacattgtcagtgtctcagtgaagcttctatagactctctcctagtgcactgcagtcctgctgtgggggagcaacattggctatgccaggtgtacctgaggccagatacagcactccactgcattctgctgacatgcaaggaccatgtgaaaaatgcatggctgggcgcggtggctcacgcctgttatcccagcactttgggaggctgaagcaggcagatcacctgaggtcaggagtttgagactagcctggccaacatggtgaaaccctgtctctactgaaaatacaacaattagctgggtgtggtggcgcctgtaatcccagctactcagggggctgaggcaggagaatcccttgaacccaggaggtggaggttgcagtgagccgagatcctgccactgcactccagcctgggcaacaaagagcgaaactttgtctcaaaaaaaaaaaaagaaaagaaaaattcagactcgcaaaccccacttcacagctaccgaattttaaccagatccccaggggattcatatgcatgaatcaagtttgaaaagcattcgttgatgtcatctttcttttttaagtcttaaaagaactctgggaggtagtaacactttccctattgtcaaggatgagacactaaaaattagaaagactctgaggtcctgagtgaataatgacattatcaaatgcttcctctgtcccaggcactatactgaaggtttcacccacattttcgagtcctccttataactctgtgaggcaggtgctgttattatttctattttacagaaaggaaaagtgaagctgatggcacttggattcaaatcttggtcaattcagagtctaccctttccatcacgatgctgattaccagtagggtctggccggactccaatgaccatgttctttgcatcaccagacactgcttccaattaacacattctcacaggtagcaaaagtgtaggtagaattaatccacagatcgacatatttgaagcaggttacctcttttccctcttttctgatttggtcttttgtcatgtgtaggtatgtagatggtgtaacacaaacattgtcctcaggttgcatttcaagcttgcgaatatgtcctaatgtgcttcagcacaacaaagtgatcatggatacatgctccctatatattcagttcataaagccacttagggccttttaggataaaagcagtgatggtggtaataacagtagtatcaataattaaatactgtgctcagtaaaaacataggctcagaagctaccctagagattagctagttcaaccatccagatgaagcaaaaacactccagcttattttacagttttttttgttgttgtttggctgggtttttttgttttttttttgttgttgttgttgtttgttttttgttttttttgacagagtcactgtcgcctaggctggagtgcagtggcgccatctcagctcactgcaacctccacgtcctgggttcaagcaattctcctgcctcagcctcctgagtagctgggattacaggcatgtgccaccatgcccagctaatttttgtatttttagtagagatggggtttcagcatgttggccaggctggtctcaaactcctgacctcaagtgatctgctcgccttggtctcccaaagtgctgagattacaggtgtgagccaccatgcctggctattttatggtattattaacaacaataattaatgtccacaaattttaagatcaatcaaaagacaaaaaaaattattcatcctttctggaatgttaatatagcatttaaaatctggcaaacacctcccccattgtaaactaagatagcattgccagatctcagtgtttttttctatcatcaatagcatgatttttgcagtaatacattcatcttaatattttctgtttagatctcactgatgaaaaggcctccaggtttttcacctttccgatcatcacgaataggggaaataaaagaagaaacaactgtaagtccaccccacacttccatggcacctgcacaagatgaagagcgggattcaggaaaagaacaagggcatactcgtagacatgactggggccatgaaaaacaaagaaaacataatcttggccatggccataaacatgaacgtgaccaagggcatgggcaccaaagaggacatggccttggccatggacacgaacaacagcatggtcttggtcatggacataagttcaaacttgatgatgatcttgaacaccaagggggccatgtccttgaccatggacataagcataagcatggtcatggccacggaaaacataaaaataaaggcaaaaagaatggaaagcacaatggttggaaaacagagcatttggcaagctcttctgaagacagtactacaccttctgcacagacacaagagaagacagaagggccaacacccatcccttccctagccaagccaggtgtaacagttaccttttctgactttcaggactctgatctcattgcaactatgatgcctcctatatcaccagctcccatacagagtgatgacgattggatccctgatatccagatagacccaaatggcctttcatttaacccaatatcagattttccagacacgacctccccaaaatgtcctggacgcccctggaagtcagttagtgaaattaatccaaccacacaaatgaaagaatcttattatttcgatctcactgatggcctttcttaatttaagtggctatgggtatttctttcatactttattaaagtatcaatatccctctctccattgtccagatgaaaatatcctgatataatgcaccaaaaaccatgcagcttcggaacagtctaaagagaagtggtgagactcccagtggagacaccatcagtctccacggactgcataaaattgtgtgccacaattctaactcttttctgaatcttcttcccaagttttctaaactagcacagtaaacagacaaactaatgtgccgtatggcctgctgcaattggcttctctgataacaaatatgtaccttacaacatatgtcatgaatttgcatacaaagattcttgtcattcttaataaactgtggcacttggtatttgaatgtgtgtgaaaataagggaagtcaagagattaaatgctgaacttattaatggaatagaaataataaggaggctgaggctggagaattgcttgaacccgggaggcggaggttgcagtgagccgagatcgtgccactgcgctccagcctgggcatcagagcaagattctgtctcagaaaaaaagaaaaaaaaagaaataataagaaaaacttccagatttcaaagtaacaagaaagaagacaggttggccaaagggaggaaaggggggacataaattaattgactttctattcccaaaatgggctagttatatcaaataaatactcccactgccctttctgagtgagagtgtttctcataagtcaaaaatttctgtttactcattaactactctttgcaacaggctttcatatagaagtattctgtttatttttgctgagcctagattgagtaattcttagtttacagaagctccgagcttaatgataaggatgaaaagcagagggagcaatatagaagcaggcttgctaataaaactttttaaataattgacaagggaatattatggaatgtgatgcaaagtttgttccgaaattttatgaggaaattactctctagtctcactttatagtctttttgctatgactttgaagaccattgatttttgagaagcagaataataggattgcctttcattgccctatagtgcaaagaaggtatatgctttataaccaatgttgtacttttgcctagaaaaacaagatatggctttaaatagctacaatcatctttggatgtatatgtcactgctgcttcaagttattggatgcatttgaacctctgagtttgtctttcattttaaatattgtctgttcttttaaataaacaaccacagatgtcaggaaaaagtcttaccttgtcaactggttgctccactttttaaaaatgattgaatgataacatcatattaactgcgttttactatacttacagagtcacctaaggtcctgcgagtacaagggtcgacccccaaaggcaggggcagagccagcatctgagagggaggtctcttgaccaatgggcagaatcttcactccaggcacatagccccaaccacctctgccagcaaccttgagaggaaggacaagaagaaagatgggatagaatttaaatagagaagaatgccattttatcactctgcctctgggtgaaataaagatcagtcttgatgttctaactctaattcacagtggtctcctttcagccctacccattctgcagcaaattccagctggtcagagagtcagtgctgtggctctgccatggaggctcataacccaacactggaacattccctagccaaggcagaagtccttaggcgggacttccttaccaccacgggtgctaaaagaagagttagtaggtcatgcttctaccagtaatctaaggactctctccttctcttcttcctctttctccagatttccaagccttagctaagagtaatttggcttgtttagtattgttttcttatggtccagttaattaccaaaaatatttttaaaatcatctctgttaatagaatgtctaccaacttctcactatcagaaaatactcaacctccaaacaatttgaaattatctttctgatccaggtaaagaagcaaattgaaaatcaataaagtaaaaagtgacggagattttaaattttctgtaataaaaacacttattgggttgggcatggtggctcacgcctgtaatcccagcactttgggaggccgaggtgggtggatgacctggcgtcaggagttcgagaccagcctggccacatgtcgaaactccatgtctaataaaaatacaaaattagccgggcgtggtggcacgcacctgtaatcccagctactccagaggctgaggcaggagaatcacttgagcctgagaggtggaggttgcagtgagctgagattgcaccactgcattccaggctgggtgacaaaatgaaattcagtctcaaaagaaaaaaaacatttatcgaacacctattacagccatttgctatgctagataatttacttttggcatataacttaatcctcacaaccactctaaggcccccatgaacatcattcttttacaaggaaactgtagttcacagtgccctgcccagggtcatatagttaataagtggcagggctggcattcagacttagaccttttgaactccattacaccatgtcatctgaaggctttattattaatgttgtcattacaaaagacacaccaagtcactgactacagtcacagagacccaataaattaaaaaaaaaaaaggcatgccaagataatgtctgactctgagaggatccttgtctcaatccaaaatatccttattaaatacctaattgtggctggtgctgttctgtgtattggtcaggataaactgagttaagcagcagtcactaactatttaccatatgcttcgcatgaggtcctgagaggaaaagaaagaaattttaaaagacataaatcctttccctcaaagatcttgcaatcccattggcaagtcaagatgaaagcatacggaacaaagatttgatccaggctgcagtcttttgtgcaacagtgagtgaatgcaaccaatgtgactggaagaagttgactaggtagagggatcagctgtgaaaggtagtatgaagcccagctgggagtctaggctgaaatatgcagtagagttccttctacagtctttgccatactcagagggagtttgagatagatgattctgaaggttctgggtagggtggatcagaatgggaagagaatggagtcagggttctgttctgggtatttcctgacaatcatgttttagcagaaaaataagggctgatatataaagcctatacctctcagcttactcaacaacatgaagtatttccacttcaggcctttgttaggtaacataaacatgagtttcccgtgacccagaaactaactttcttattttttaaatatctataccagccgggcgcagtggcttcacgtctgtaatcccagcactttgggaggccaaggcaggcggatcacttgaggtcaggagtgcgagaccagcctggccaacatggcgaaaccccgtctctactaaaaaataattaaaaaaaaaattagcttggtgtggcggtgggagcctgtaatcccagctactggggaggctgagacacgagaatcgcttgaacccgggaggtggagattgcagggagccgagatcatgccactgcactccagcctgggcaacagagtaagactctgcctcaaataaaaaaaaaaaaaaaaaaaaaaagacctaactaccaagccaaagtcacaccccaagtgtctggccctggctctggggccacacagctacatcgctccgtgcttctcttcagggcaggcatttcctgtcgtcgagtccaacccacattcctcacattgtctacgcctagttcctcaaacaggaggcccctattggctttttactccactctccacttcctgcttctaagcctggttccaagggagttaactcacagaaagacacatgcttttcggcctcaccccagtctgtccggcgcccatgctccccttctgctcatactctgtacattcacctcgcgggaaagcccagactcccaaggctcctctgagaagatttgagaggat

SEQ ID NO: 163 - DNA, 28253 bp, Human; identical to SEQ ID NO: 162

SEQ ID NO: 164 - DNA, 119313 bp, Human
  misc_feature (1)...(119313): n = A,T,C or G
tggtttcttggcaggggggtttgatgggttcccagacctaggagttcttggcgcctcgtcttccagtgaccccaccagggctgctctttctcctccattgctgaaactagttcagggttggggaggagggcacgtgggggggcctggtggttggttttgtgctgagtcattgccttggtgcactgtggaaggaagctctgggaggtggacggctccttctgtgagggagtgcttctgtcgtcaagggagtactgcatagggtgaataacacagttatgtagatatatatggtggtcttacccccagggcctccacaactcctggatgggcctagcctaagcaattctgatttaacttattgcccctccttttagcaatactgttgagttaaataacagtttttgcattgaaaataaaaaaattttatttttgtagagatggggatcttggtatgttgcccaggctggcctgaaactgctggcttcaagtgatcctctggccttcgcctcccaaagtgctgggatacaggcacgagccactggccaggtctttattttttgcattttgcaaggacattttaagtcactttcttccttttctgtttttactcctgctgaggagatgatccccattttacaaaatggacaaaacattctccccagggaagggaagagtagacatttgagaataattgttttcacagaaccgggaaaccacctattttgtcccaagtatactgattgatgcattagcaataactcactatctgctttgccagaggtttgaacaatgagtgttaatgcttggtgtagtgaattttgtgtgatttcgaatctgatagctgactcattgcacagctctgtcttgcgagttcagatctgaactgtagctctaagaggtaaaagcagaagtggagctgcctttcatgccatagctagttttttaataaaatagagttaaaaaatcctttggcttttcagcattttggtgtgattggaaaggctattactatcttatattcagcatgagtcttgagcaattactgattaatatggtttggctgtgtctccacccaaatctcagcttgtagttcccataatccccatgtgttgtgggagggacctggtgggaggcaattgaatcatgggggcggttacccttatgctgttctcgtggtcatgagtgagttctcacgagatctgatggttttataaggggctttttccccttttgctccgcacttctccttgctgaaaaagaatgtgtttgcttccccttctgtcacgattgtaagtttcttgaggcctccctagccatgcttaactatgagtcaattaaacctctttcctttataaattacccagtcttgagtatgtctttattagcagtgtgagaacagactaatacactgatctgagttgatattcttaaattaatggtaagatatttcttttttttttttctttggagacagagtctcgcactgttgaccgagctggagtgcagtggcacgatctcggctcactgcaacctccgtctcccaggttgaagcagttctcctgcctcaccctcctaggtagctgtaattataggcgtgtgccaccacgcccagctaatttttgtatttttagtagagatggggtttcattatgttggccaggctggtcttgaacgcctgacctcgtgatccacccacctcggcctcccaaagtgctgggattacagacgtgagccaccatgcccagccagatacttctattttgataatctttgagtcctgaggtagcttcagaatggattgaaccacagacagatggtgttagtagtttctgccctggcttctttgcaacttaacatacttgactttttagtgtttttggctaaggaaagtgtattttctagtttgtggcagttttaagcaaatgtggcttgaataaaactagagagaagtttaatttttgataaatcagtgacattgacaagttgtttttcttcctttccagttatacatgggaagctgttgataccaaaaataatgtactttataaaatcaacatctgtggaagtgtggatattgtccagtgcgggccatcaagtgctgtttgtatgcacgacttgaagacacgcacttatcattcagtgggtaagtagaactacctgaaattactggattggcaatatgattccccaattttgcaaaaatgactgtgtatagctatacgtatatagcgatacaaaaattttgaatgtttagaaatcataagtgtttataatacataatacacatttgttagtagttaaaaatgctaacggtttgaatgtctagtatgagctaaaactaggttggttctgtctagtggatactatacagacagctgttatgaagaattatgtagatgtgtatttgatattgaaagctgtctcctagatggctctcccttctcacccacacttttcttaaaccctgtttttacattctcccccagcccacatttccttttagtgctcccccgactcccattcctttgtaccttccagctttggctgtagttcccagacagtgtttctgctgtcaaagatggtcactggagttaggcttacattaaaggttaaataaatagtcctgaggattggcagtctcagagaaagaggtgcagccccttctttcctagggttcgtttcattccccaaatgtatgccttttgggtcaggatcgctatccttctgtgaagaatatgaatccaagtggattaatatatcagcaccaggttacatagagtggagtcagggcagatgcctgaaggaagggaggcagggcagacagaaaagcagaatgcattgcccttggatttggcaacatggatgtccgtggtgacctttcactaaggcagttagaataatgaggtttgaccacaatggatgctcgtgacatagagatggtatatgactagggactgtctgataactagaagaagatgctaggtgggcttttggatttgggagagaagcttactgtggtagctctgtcattttcttttgtgttttaaacattttaatatttttatagatttggcagttcaagtgcagtttgttacatggatatattgcatagttgtaaatctgggtttttaatacccgtcacccgaatagtgtacattatacccagtagataatttctaattcctcaccccccaacctttctgagtctccagtgtctgttattccactgtccgtgtccatgtgtacctattatttagtttctacttataagtgagaacatgtggtatttggtgttctctttctgagttattttacttaggataatgtgctattgttcaattcatgttgctgcaaaacatgtgatttcattcttttttatggccaacatgtggaatttgtccatagaaaagaatgaaatcacacacacacacacacacacacacacacacacaaacacacaccacattttttgttatccagtcatccattgatggacacttaggtttattccatatctttgcaattatggatagtgctgtgataaacatatgagtgcaggtgtctttctgatgatttttttccttcaagtatatattcagtagtgggattgctggatggaatggtagttctatttttagttccttgatagatctctatactgttttccatagaggacatcctaatttacattcccaccagtgtatgtaagcattcccgtttttctacgttcttgccaacatcttttgctttttgactttttaataattgccattccagtgggtataagatggtgtctcatggttttaatttgcctttctctgatgattagggatgtggaacatttttacatatgcttgttggccatttgtatgtctttagagaaatgtctgttcatgtcctttgccctctttttaaaggggttctttttttctttttgaattgtttgagttccttgtagattctggatgttagtcctttgtcagatgcacagtttgcaaatattttcacccattctgtaggttttctgtttactctgctgtgcagaagctttttagtttaattaaatcttacttggctatttttgttttgttgcatttgcttttgaggttttagttatgaaatctttgtctaggccaatgtccaggagagtgtttcctgggttttgttctagaatattcatagtttcagatcttacatttaagtctccaacttttgtatatggtgagagatagggttctagtttcattcttctgcatgtggctgtccagttttcccagcaccgtttattgaatagggtgtcccttcgccagtgttatgtttttgtcaactttgtcaaagatcagttggttttaagtatgtggccctgactctgggttctctattctgttccattgatctgtgtgcctatttttatatcagtaccatgctgtttgattactatagccttcaggtataatttgaagtcaggtaacatgatgcctccagctttgttctttttgtttaggattgcttttgctattcaggctttggctactcatatggttccatatgaattttaggattgtttttctaattctgtgaaaaatgacattggtactttgataagaattgcactgaatctgcagattgctttgggcattatggtcatgttaacaatactaattcttctaggccatgatttttgcatctgtgttcattagggatattggcctatagttttccttttttgttgtgtccttgccttgctttggtgttagggtgttactggcttcatagaacaagttagggaggattccctccaacttgatttttttttttttttttttttttttcagggagtagtctcagtgggattggtaccagttctttgtacctttggtagaatttggctctcaatctgtctggtcctgtgctttttcttgggagatttttaaagtactgattcaatctcactcctttttactggtcttttcaggatttctgtttcttccgattcaatcttgggaggttgtatgtttccaggaatgtatccatttcctctaggttttctagtttttgagtgtagagatgtttatagtagcctctgatgatcttttgtctttccatagtatcaatgtctactttttcatttctgattgtgcttatttgaattgtgtctcttctttttttggttaatttgagtagtagtccattgattatgttcatcttttcaaagaaccaactttgttttgttgatcctttgcattttttggggggggtctcaatttcgtttagttctgctctgatttttgttatttcttctgttaggtttcaatttggtttgttcttttttttttctagtgccatgagggttacattaggtcattaatttgtgatctttatttttgatgtaggcatttagtgctataaacttccctcttaccgctgctttgctgtatcccagaggttttggtccattgtgtctctatttatattcatttcaaaaaatttttacatttcatcctaactttgtcattgacccaaaggttattcaggagcaggttgtttaatgttcatgtatttgtgtagttttgagagttctcctcttggaattgatttctagttttattccgctgtgatctggaaagatagttgatatgatttcagtttttaaaaatgtactgagactgttctgtggcctaacatatggtctaccctggagactgttccatgtgctaagaggaatgtatgtcctgtggttgttgggtagaatgatctttaaatgtcttttaggtccatttaatcctgagtccaatttaagttcagtgttttattgttgattttctgtgtcgatgatctttctagtgcttgtagtgaggtgttgaagtctctcattattattacattgctgtctgtctcctcttaggtctagtggtaatgattttatgaatctgagtgctttggtgtggggtgcatttgtatttaggatggttatatcttgttgaattgatcccgttatcattatttaatggtcttttttttttcttttttaactattattgacttaaaagtctcttttatctaaatgttgcttctcccgctcacttttggtttctatttgcatggaatatcttttcctacctatttaccttgagtctttgtttttaccagttaggtggttttctgtaagcaacatatggttggatcatttttttttttaaatctagttcaccaatctatatcttttatgtaaaggatttaattcatttatgttcagagttaatattgatatgtgaggttttgttcctgtcatagtgttaattgttaactagttgctttttagtgtcaattgtataattattttataagatgtgagttttataccttttgtctgactgggttaattcaaacctgtctttaagctattagattctcttttctgctggtctagtctgctgttcaagctttcaactgtattttgtaattcctacaatgaatttttcatttctggaatttctgtctggttttctaaaaaatagctttctctagtaaaattttaatttagatcctatatttttccgatttctttgtgttggttttttgactttctcttggatcttattgcgcttctttaaaatcaatattttgaattccttagctggtatttcaaggatttcattttctttagggtccactgctggagagttagtgtgagtctttggggatgttgcagcgctcttttttttttttttttttttaatacttctagagttgttactctgtttcattctcatctggataaactatctcttctttatttttgaatttactttggcaggatttttttttttcccttgagaatgtgaatataacgtatgttgtatatagttgtttgacttcagttctgggtactttcagtgacagagactctgagtttcttggttatagttggcctttttgtggtagctttctcaaatgctagtgatagtaatgatgtgcttgggtgtgtgagcagcatcctcaccgtctcccgcggggcctggaaggcagagttctcaggaagttattttgttctcccttgctttgcactttggcagcagaatttatattgggttgtgcaggccagcaggtggtatttatgggtaaaaaccagctgcagtggaatccgatgggtgggtctatgagtctctgtgcttgacctttgtttaatgggggaagctctgttgcttcaggcagtggagtggtctgtggaatgcacagtggcctgagctacctgctcagcccctgagtgggggacaaagctggacagaactgaactgccagttcttctcttggatactccagtggctcaagcaccagccctaacaggggtagcaggggtagctgtgtagaaggtgccaaggtgtctgcggggaggtgtgggggttgctccagctccatggcctgggcaggtgggagcacaatctgcctccctgtcacaccccgtcctggcgctgggaatattcagaacatgagaatatcgctgtctgtctcaggctgcagtgtagtgagtgctacgagagacacctgtccatggcttaccaccaatgtgtcttctgtagtgagcctcctccctcaacccaaagcacacacatttgtagctctcctgctctttgccgcaggaatgctgtgggtccgtgtagagagggtgaggccccacctttcgtgcaagtcctggctcagtggaagtcgtgcaagtccactgccagtggaaatgcagcttcccctaacagccacagaatggccactgtcctgtgtgcctgtgccaacctgtgggagcagccatgactgtgcccacagcagtgggtagagggtgggggaggagaagtcctactacccacatccgtgcccaagcactgagaccacctggctcctgggctggaagcatactcctcccttgcagggctgagtacagcacccctgtctccactgcatgtggcacaggccacaagccatgctcctgggcacaggaaagtgcatgctcctttgtcccaaggagtgcccccttggcatgctgtactctttcttcccttaggagcagcactccctgagggtagatctctgggaaccctgcagctcccctgggtccagccagccctgtgtggctgctgcagtctcagcaggtgccaagaaaggtctgcagggcctctggtgatacggagacatcagtgctgagcttccccaggcagtcctcccactgctgccgccactgccacccaggtccagtggagggtgagcaacctggcataagtggtagtctgatgtaatgccctcaggaagtccccaaattgctgcccgcaccagtgtttgggtttgtgagggcagaaaagctctcccacagttcgggtaccagcagtcgaccacagaggtgaggggcagcaacagcattcccgccacccctttcaaaggaataccaagtccctcagggctcctagccgctctctgcccctctcgtttcctgctttttattttttgccctcgtttcatcccaggggttctccaccaggctccagtgctctccacttgatactccattctggcgacggttgctcacctgtaacttgggttcttctgagaaccggcctctggcaactctgttcagctgtcttgaaacaaaagaaacccccacttgtcattttgcatggaaattgctaaacacagttaaaagagctttgtagaaagcagtgtttagagtacgaagataagggagtgcgaggtctgctgattgaggcccagctcctgtttgatttccctctctctctacaaagagaccatccagactgaaaaacctggtgagagggatttgaggcctgggattgagatctgagaaagcactagattgttgtgaattcttgggtctgacattatccttggtgatatacttaggaaacttacaggtgagatggccagtttactcattgtgctcttttgagaactcacagagaaaggccacaagtaattctgttggccagtgttatgtaggtgttcagaaagaaggaaaagtagctttcttcttgattttattataatacttcaatatttttggctaatgaaagtatgtcttgagtttatggtagtatagtatggtatggtatagtgtaataccacatagactgatgccagatggaggcaacttacttgaaggataatttgtgagcttggcctcactggacaaagtttgagtttgaccaagttctgtggaccttgaaagccagggaggagaagagttgttatttttttgtagggagtggatccattacagatcttttgtgatggtaacggggaggtgatgtgatggaaggtgtttttaggaagctggccccgtggaataggaaacgatgcctacaggggagataccaaagataactagatgactaaaaagtaacttacaggttaagatgatgatgatactattataaaccagcagtttccaatctcattttttcccccagatatgtgtgacagatccctttcccagagcttgaaacttcccagagggagtcatcatatatactttcaggactctcagtaacggctccctttcttcaactggagagagcagtttgtatgagtcaatgagagtgacattcacagtagcatagggataatcccgaatcaaatctaatttgcatatacaataaaaatacctaannnnnnnnnnnnnnnnnnnnnnnnnnnnnnnnnnnnnnnnnnnnnnnnnnnnnnnnnnnnnnnnnnnnnnnnnnnnnaagcgcaaaatggatctgtgttctacagtgggcaggtctgtgcaaatctgcccccgaagtccaaggaagttgagaggctgaagaaggaggctgacacccagtttctcagaaagaaacatttaatacggacttatgaatagaagccacatctcaagaagtcacgagatgggatggatccctctgccatcacccactccagacccagggatcatacaccatagggaaggggtggttcagaaggaatgtgtaggacaattgaagtaggttttttgacctaaggggaggattcgtgataattacctgctcttacacaaggaacagtagataaactggaaatcttggaggccttcctggaactggggttaatcggaagtcagcagggctgtttggcctccagaatggcgttactttagcctccacaatgagcaccttgctggaggtggtgtggttatggatttgaatgtggacagccggctccagagcctgtgtactcactcagggctgtgcttttgtgtgagtcatggggtcacatcagacagattggagctgaaatggagaccaggatgggagatctgaatgtgtggctctgagaggacatctgagaacgaacttcttttgatcttgttagaaaggaaaaaatgtgaaccttcaaaacaaccacaagaactggagctccccgcagatcagaggaacagaagagctagcatagaaatagatccaaatatgtatgggaacttaagataacttacaaccaaaaaattgggtgtaagtagctattgtctcttacgaaacaaagttcaatccctcctttagatcacatactgaaattacagctcagttaagatttgaaagtaaaaagacaatagaacattggaaaaaaaattagtaacatatagatataatctagaagagccttccttaaggaatcctggaagccatacaggagaagaggaacatttcttattacataccttttaatgactaaaaggtgttctaaagacaaaagacatacactagactgggaaaaacatttccagcatgtttgccaatgtactattaggatgagagcttttcttaaaaattggtaagaaagacagacacccaggagaaaaatggcaaagtcaaagaacaggtaattcacaaaagaagaaatccagatgctcaatacaacttcactaataagccaggtggattagtcctttctcacattgctgtaaagaactacctgatacttggtaatttatgaaggagagaggttggattcacagttctgaaggctgtgtaggaagcatggctggggaggcctcaggaaacttaaaatcatggcagcaggtgaaggggaagcaggcagcttcttcacatggtgacaggagaggagtggggcggtgctacacactttcaaacaagcacatctagtgagaactcttatcacgagacagcacttggggatggtgctacaccattggaaaccagccccgtgatccagttacctcccaccaggccccacctccaacactcgggatcacaattcatcatgagatttgggtggcgagacagagctaagccgcatcaccaggtataaatgcaaatcagagcaattatgagatctcatttttctttgagaagttggcagaaatttaaatggttgaatcatagagtgctggcaaggagcctggaaatgggcacatttatttatacgttgctgtaggaagacggttgtctctaaatccttttgggaagataatagttggtgtgaggttgtttttttttttttttttttttttttgagacagaatcttgctctgttgcccaggccggagtgcagtggcgccatcttggctcactgcatcctccgccccctgggtttaagcgattctcctgcttcagcctcctgagtagcttggattacgggcaccaccatgtccggctaattttttttttgtatttttagtagagatggggtttcaccatgttggccaggctggtcttgaactcctgacctcaagtgatccacccgccttggccccccaaagtgctgggattacaggtgtgagccaccacgcctggcctggtatgagttttaaagtgccctgaagcaggggtcctcaacccccgggccacagactggtagcggtttgtagcctgttaggagctgggctgcacagcaggaggtgagtggtgggtgacagagtgaagcttcgtctgtatttacagccgctccccattgcttgcactactgcctgagctctgcatcctgttagataagtggcagcagtagatgcttataggagcgcgaaccctattgtgaactgcacatgcaagggatctaggttgtgaccccttatgagaatctagtgcctgatgatttgtcagtgtctcccatcacccccagatgggaccatctagttgcatgaaaacaagctcggggcttccactgattctgcactgtggtgtgttgtataattatttcaattacatattacaatgtaataataatagaaataaagggtacaataaatgtaatatgcttgaatcatcccgaaaccatcccacccccagtccaagtccatggaaaaactgtctttcatgaaaccagtctctggtgccaacaaggttgggggctgctgccctaaaattttttatagtgagaaacaaatattaagacctcaatgctggtttaaacaatattacattattttaaattgaggaatcatacattatccacacatccaaggagctcagaagaaattaaaaaaatcatacattagtttttccttaggcaaacaatattacatatgtgaatcttagcaaatgttagccatcattttcatagggcctgtgaacaatatttggtcccatttgcaacctaattattttcacattttaaagtggtttatacattttatatgcatttgacccttgaacaacgctagagttaggggcaccaaccccctgcacagttgaaaatccacatttaacatttcactccctctaaccttagctgctaatagcctgctgttgatgggaagctttaccagaaacataaatagtcgatcaacacatattttgcatgttatatgtattaagtactatattcttacaataaagtaagctaaaggaaagaaaatattaagaaaatcaggccgggtgtggtggctcacacctgtaatcacagcactttgggaggctgaggtgggaggatcacttgagcccagaagtttgagaccagcttggacaacatagtggaaccccatctctgcaaaaaataaaaaaattagccaggcatggtggtgcatgcctgtagtcccaactacttgggaggctgaggcaggaggattgcttgagcccaggaggtggaggcctcaatgagctgtaatcaggccactgtactcctgcctaggtaagagagtagtgagagcttgtctcaggaaaaaacaaatgataaggaagagaaaattatgtttattattcattgagcggcagtggatcatcatataaagatcttcgtccttattgtcttcatgttgcgtaggctgagtaggaggaggaagaggagggactggtcttgttgttctggggttaccgaggtgaaagaaaatctgtgtataagtggacctgggaagttcagacctttgcagttcaactgcatttgatttccttttcaagtacctcagatgtctggcttaacagttaaaatttcagtgtaacaataattataaatttatgagtattattatttaataattcttatatatttactagttatgctaaaattctaaaatttctaattctaaaattctcttaaatgttctaatactgtgtcgtaagtctgaattaattgctgagttataaactttggattggagttatattaaacattgcagtaaaaataccaaatacattcacatttttttctaacacatcaaatattaatattatgattttaattaatcttctgaggattacagctctatatccatttcaggaagcctgttaccagcccatttaacttgaggtaatgtactcactaaggaacagtgttaattgaggttacctctggagcctggaattctgtttggcttcttgttggtgacctggtaggacacagtgagtccgactgtagttgccgtcccaggtgattcatttactttaaagagcctggcccctgacttccagtgatttgatagtgtctgattcttgtatgcactcacagaaatctacagcaggcactggattgatcattggattgtatctttcatctctttgactcataagatgtgaaaatgccttttcctcttaagtcttttattttcttaaaacctagaattctgttggatatttaagatgatacctggttgagttttggatacaactcatgtttttatctgatttatggtctctcctgatagtctggcaatacctgttaacattttaaaacgtatattcacataatcttttgtgactcaaacggatagaagaagtagtactatatgtagatatttgtacaaaaggtttttggtagcattgtttattgtggcaaatatgctggaacaatctactgtgtgggtatggttcaataatttatagtgtattttcttcttatttacttggttaaatcatctaaaattatatgtgtacattatattaaaacatagccaacagttaatgtttatttataataactatttgactatcagtcatatgtaggcaccggtttaggtactggaattgaatcagtcactacaacaggcaagaatctctttttttcatggagcttacattttagtagggtgggagacagatgaaaaaagcaatggctaagtagtatgttaaactgtgatgactgctacagaaaaggaaaggaagggtaatcaggagtactgggggctcgggtgtgtgtgtgaggatattaaatagggtaagtgtcactgagaatgtgacacgtaagtaaagaccttgagttgagggagtgagctgtgtgtctctctgggggaacagccagttcaggggacaagaagggtagccaaggagtgtgttggtggtagcaagaaaataaaaatcttttaaaaagagtatccatataaatagagaagctggaggttaaaaaattggatgagtatttttttttttaatttggcaaaatagcgtgaatagtatatgttgaaggaaacgctaagtgggtggtgcaggggagagaggaagacttgcttgagcacatcgggaagtaggacaggaagggttctctgtttgccttgtaggttctaattgccatggcaataatataattgctgtggccgctgcggtaggcaggagggctgcctgtgaagtcaggatcaccaggctttgtggcttcaaggaggccaaatcaccatgggcttgcttgggcttggaggtgcgacctggtgggcctgcagaatgcgacttggtggcctgactgagcagcacgtgagggcctggtgcagcctggcatggtggtacccttgagagcgtggcctagagggctccgaggtgcagcctggccagtgtggtctggaggggtctggcaagcgctatctggagcactcagaggtgtggcctgtttttccgggtgggtctagtgagtgtagcttggagtgctgggtggtgtggcctggctggcaccgaggtccctgcggattctggagaacctcaaggtgcggccccgggggtgtggccaagtgtggtgtgtggagggcccttgtgtgcagcctggtggttcctgtgagcatggtttggagggcctggtgaatgtgtcctggtaggcctggtgagtgtgtgagcatggcctagagtgtcaccaaaccaaagtggacccgcctgcctgtgcaccagggaaagccaaacaccaaagcgcagggtttttgctggagagagtggactgcactgcgacgagacaggaggaaaggtcaaacctgtctccccaagctggcggctgggtcgggttttataagcataagcttattaccataaggtaatgaggtgtgttctgattggatcttgcaattagatgacaccagggctctatctgattggatcctggatcttgccatgtggtgtgcgcttcttatttcagtcccgctcctcagtccagcgcttaggttcctcccgtgttgcaagcttggttcatctgtgcaggctccggtgacatgatgtcgaactgggagccatggcagctgaaaaacaacgaacagctttgtacataaaagatgatacagcttggtctaatgtggttctaaggaggctctgccggcgagtcttaggggttccggcgggcagccgcgtgaacctggagcttggggtctgcagtgctgggaggccgaggcctggcatgttggggacaggtcttgggagctgactgggggcctggcgtggtggcggcagcccgcagtccctgcctggcccttgtctgggaggccgcggttctctgcggcctctcgccggtgtcgcccttggccactgggctgcgaggaagccggcgaggagtgggtgtgcgccccgcccggctctaccggcgagggatgcagtggccgccagcgtggccgtgcggctgggtcactcccttcccgcttccagggcctttttctgcctccttttcaggacgtgacccgcacattatgagggacccgtaggggctcttgacacagaggggtcaccctatgtgtgaacaggttacgaggttgggggcttggcttctgaacttgccaggaaacaccgcatcccttttcctgcagcggccgccccccatcccccacccgccccattctctcccctccccaactgcagccttccgcgcctccttggcccctcgagcctccctgggtcccctgcacctccccatgtcccccacgactcctaggcctctcgcgcttccccaggaccccgcgcatcctgggcctcttgcgcctccccggtcctcagcgcctcctcggccgccgtgcctccccgcaccttttgcgcctcatggggctcccggtgccttctgcccgccgcctcgccgcgcccctcgcctcctcatgcccctccgcgccccatacctccccacccctgtgcctctctgcctatcccctgtaccacccggcatcctccgtgccccatgcgcctcacccctcacgcctccctgtaccctgcatgccccgtgtgcctgctgtgccccacgcgcctcccccctcgcgcctccctgtaccctgcatgccctgtgcgcctgctgcgccccacgcgcctcccccctcgcgcctccccccttcgcgcctccctgtaccctgcataccccgtgagcctgctgcgccccatgcgccttccgcgtctccagccctcatgcgcctccagctgcgcatctccctaggcgggtacctcagcaccgctgagcccacccccgcccctgctcagtgcctcccagacacgcccactgcgggcgggacagtgggagctgtccaggcgcggagctgtccaggcgcgggagctgtccaggcgcgggagctgtccacgaggcactgaccttggtttcagagcctctgcagggcttctgtgtccttttggctgagccgactgggcaaaagttttagaaaagaccctgggtgttgcagatggagaaggatgatcgtggctgacttttgcttgcaggcagaacaaccacggggccatcagcctggtgctgtgggggcgcgctgactcgtggtccgcccctgccccaagacttcaggtgtatatgggattggatcagctatcatcccgagctcatggcacgtacagtgagccatgtgttaatccatagactaacctttttccttttaaaaaattagttgttttgtataatgtagcgagcactgtttccaacaaaaatctaggatcttggcagtaaccactacctgttttactctttcctctttcacttttcgctaggagtaatcattagctcccatcttgtattaatttttttttttttttactgtatctaatttccaaaaaaaaaaaatctgtgtgtttgcaactaagttatcttcctatgtgtaactttttgggacttaagtgataacagtaatattactaaaaatcaaccgtattgttgtttttcactgtggtttattccttctgactgctgtgatattttgtgtggatctgctgaagttaatttatccactcttctgttgatgggcctttggtcatttccaggtttttgctcttctgaagagcatgagatattctttcacattttctgctgtgcatgttccatatgtgcatggttttctcttttatatagacctgagtggagtaactaggtcatagggcacacgaatgttcaattttaggacataatgtcctgctgacttacatagttgttgaaccagttaacatttcactagcaatacaggagagctctgagccacctcatggctgacacttggtatttaatttttgccagagggatggttgtaaatggtataccattttggtcttgatttgaaattccttgatcaccagtaacattgaacatgtcttaacatatttattgatgtacatttttctttgatttgcttgatcatgtcttgttcattttatattgggttattgtgtgtgacctagattagaattttttcttttcattggatattaagatccaccattgtgtggctaggagtgggtttttccttctctctcctttccagcatggtgtgtgctttctcagtcagaggtaattcatcgtcctttatttcctggaattatacagacattcttttcttgtttgtttgcatgtgaatgtgtatgtagagattcttgatgctggttctttgccagttctgtgtttttcctagtttataacttacttccgttttctttaagctgttttttgatgagtataaactcttaaattgaataggtcaacctcattaatctttttgagtcttaagaaatctttctctatcttaagatttctgccaagttttgaagtttggattttgatgtttacatctttaatccatttagacaggggtgtccaatcttttggcttccctaggccacattggaagaataattatctttggccacctaaaatacactaatactcatgatacttaatgatctaaaaaaaatcacaaaaaagatctcataatgttttaagaaagtttacaagtttgtgttgggctgcattcaaagccattctgggctgtatgtggcccatgggccacgggttggacaagcttgtgtttagagttgatttttgtacccagtactgggtagggatccaattttgtctttttccatatggaaaactattttgtttccagttccgtttttatttccagttctgtttattgaacagcctcctcttttccctgacctattacttctgtcataatcaaagtttaattcacatttgtgtctctgtgctctctcttctagtcgattggtctctattctagtcttttgatcagtttattcctatgccaacccccatcatgttgatttttacatagactttttattctggactgttacagtaatgtcctggacaagcagagatgtggtcattctacttgtgggcctttctagagaatgttgattttgtagcatatgtgatgggaagtattgaaacatttcagtggctgagttatatatcctgatttgtatttttgaagatcacactggtgcaagatggatgaggaagtggggctggcgagggatgagactagtgtggaggcagggggagcagttaggtggccattgctggagcgcaggtagtggttttagcgggagtagaggtggagaaatgtggacagatttgagatgggcgtatagctgtggacctttctgatgtatagaatgcagcagacaaggtaaagatggcacttaatgtaatgtaatggggatgccactctgagatggaaaattctgggaaaggacagttttataaatttataagctatcagatacattataatgctacttttaatttgcttttccttggaaatagctgtttggttatgtatgttttatagcctgttcactctcttttctctccaaataggtgactctgttttgagaagtgcaaccagatctctcctggaattcaacacaacagtgagctgtgaccagcaaggcacaaatcacagagtccagagcagcattgccttcctgtgtgggaaaaccctggtgagtccacacaggcacttgatgtatttctttaaaaaaaaaaaggtctgccccttggtgttctggctgtagaggtattccaggaagaatcagtgagcaaacttagaaacacaaataagaaaaaccctaccaaatgaccatcatcatcaagaaccaataagtaaacaaattctaaacttgttacaacttttaagtaaaacatagaccatgtcttttgtaaaactacaattcaaagtgattactgtgttaaaaatcagtgcactgtttaatgtttaagttataggcatactttttttttctctaaaacctcttcttctagcatttcattttgataggttttagggcagcatatttagttttttaaaaaatatttttctttcctcatttatattaaattagagatacccacatctatttaggagaagccttggcccgtgggtatggggttctcaagttttttggatattacctggtgtttaaaggggacataattgtgtaaattattatgattgttcttattatgggcatattgtatgtaatttgttgattttaatctttagtttttggaaaggaacttgcagtaaataattgttttagctcttgggagaaggaattggtatacaaattctatgaatgttcttgaatcccagtaagaacccaatctttaggaaagtcaggttgagtgaaactctgtggctactaaattgctttaaaatatcattttagaatttgggactgtgactattgcatcttcaggtccacagtgtcttatctgaagaactttgaaaataaaactaatattgttaattttggatccgcatataaattgcatcgttgtgcatattgagacccaaaaaagaatctgttcgcagcagcattaaatgagatttatattacagaataaaatatatagctcctgttttaacttcagctaatttcctttatgaattctgtgttcaccataccagaaatagaactgtgaaggataactccctagacttgcacgtgggagtgaagaggccagttcctgctgtgcttgtgtcatcctgcgatgctggggttgacctgtttgtagtccactctggttgcggttaacaggaggggctgccttggagggttggcgtctggtgggtgtactaacttggtcagatgcagatgggctcctcatgggagccttttcacgggaagcatgaggtcacgttttctggctttcgtttgctggcatttgcttaagagaacatttggagtttgagaggagaatgactgaggatttcttcccatgaactcactcaatgtacttgcacagctggggcggtagaattcctttggattagttacacaaaatcccaacatgattttatgaagctttggtctcagaatttgcagatttgggaacctcttgatgaccccgtttaactaaagcggttgcatcccctgcccttcttgctgctgctttctttattttagtagcctttactgcattctcattttaaagaagaatctttacaatgtgtggtatggtaacattataattactatttttttttaatagggaactcctgaatttgtaactgcaacagaatgtgtgcactactttgagtggaggaccactgcagcctgcaagaaagacatatttaaagcaaataaggaggtaacatgggaacttcaaattacatgcttatgaagtatactctggggaactttatctttcaaatactgattctaacctttccgggtgaaaatcttttttagcttccaaattgcatttgagcagagataccatgtgatttaatttttaaaacttttctgagtggttcttatttttaggacagggcatttaaaatatcacaggatgtgatttttggtccagattggaaatagaatggctcatccatatagggcaagttagttcttggtttctggtgctgtgcaactcagtaaactaagtgacgtgtttgggcttgggcttagagtattcactctacctgcaggagccatctgtttctgacgctgcctgcttcatcttcctttgcacctggctttccacctgtgttgtaccccgcttttgataagtctcctttacctgtttgcattgttaaatctctctgtccctctcctcagccttgggatgacttctggctgcaatgtgagtccaggtcaggtatcccttaaattcttttccagctcacctcagagactagattactaggttactgttactattacgtccaccccttattatttgaacccagcattccttggtcaagacattcttcttgggtgcatgtatgtatatatatctatatacatacacactgacctatatgtattatgtgcaacatgatattttgaaatatgtatacattgaggaatggctacattgagctaattacatatgtgttacctcacatatttcgtttttttttttttttttgtgaggactcttaaaatctactctcttagtgatacgcaagaataaattacattgttattaactgtggttgtggtggtgtttaatggatctcttgggcaggtcattcttgttgactaatggaatgtccccttccccagcctggattccctcatgttgcactgctacttgattctccctggtcctggggaagagcagactgtgttccttctgccgcttctccatgcccaccaccccagatcctaaagggaatttcctgttctcaccttgataacaatcttaattaattgattatctcacttttctctcctactttctgtttttaagaactttcaaaggttgtaaggattcaggaactaatgaatggtcataatcagtaatttttactagtggcctaataccatgcagtttaataagacaaaaagaaatgtttatttaaaaacattaattcagattaaattatgaacaataaatcactgatattttcagatatggtcatctatgaagggaaagacagtgtcatatggaagtggaagtggtaaaatactgcccaggaaagccataaggagcattcaatgaaaaaaaaaaagtttaaagtggaaagaattaaggctgatatttaggagacagtgtcaaatgtaagcttcatttaaaaacttaggtgaagctgttagatgacatactgttagcggtgggaaaagcatctcaaagcagacatctgtttggggtttgggggtgagggtgggagcacagtgtgttcattctcgcagtgctataaagaaacacctgagactgggtaatttataaagaaaagaggtataattagctcacagttccgcaggttgtaaaggaagaatggcagcatctgcatctggagaagcctcaggaaacttacagtcatggcagaaggcaacagagtatcgagcacctcacgtggccagagcctgaggaagagagtgggagggggaggtgccgcccactttgaaatgaccagatctcacaagaactcactcactatcatgataatagcaagaagggggtgatggaatctgccctcatgatccagtcacctccccaggccccgcctccaatgttgaggattacaatttgacacaagatttgagtggggacacacagtcatcctgggattacaggcatgagccaccatgcccggctaatttatatatatatatatatatatttttttttgtttgtttgtttgtttgtttatttgtttgttttgtagagacggggtttctctatgttggccaggctggccttgaactcctgacctcaggtgatccgcctgcctcggcctcccaaagtgctgggattacaggagtgagcccctgcgcctggccccacacacagtcatcctcaagtgtccagttggccggatctgagttgcttcctgtgggaggtggaggctgcggtgacagtggtgccctctgctctcctgttagaccccagacctctcagtcccacagatactctcctgggctctgattttccaacctgatcatgataccctttttgttttgttttgtttttgttttatctgagtgtacctcttatgtcacgttgctgaattgacagttgtgtcttctaccacctaggaaaaaattgctttccaaaataaaatgaatagcaacttgttttcaatgggtcagaaatcaccaactacagcccatggttcaaagcctgccctggcctgtttttgtacaaccccaggactaagaatggttttcacatttttacaggattgttacaaaacaaagaggaatatgccacagagacctatgtgacctgcaaaacccaaaatgtagataccacatggttctttgtaaaaaaaaaaaaaaaaaaaaaaggtgctgatctgtgttctaaatagtttttggggtgggaatggggaggtatagtctgtgtttttctcaaaacaatgacatttaatttctcttagaagcagattgaagatgcatgagaaacatttgtactttgtactctcttacctcttcaggtgtaattggcagctggggctttattcattgagttttcatttattgagagcctattgtgagctaagcagtaggaattttgttaaattttggaatgctttcagggagcctatagactaatggtgtgaaggacatatccatattcattaactcatttttttttgtcttatggatagattaaatggaaagaactgaaaagcataatgactgctaaaaatgtagtgctgtcactgttagcaaatcttaataaagcgtatgcccttttttctgctttcagtttgatttgattacaccttacaggcttggtatgataagtttaaaacatattgaaggtttatgtacttataaaaacctcatcattccctaaagaaaaaaaatctcaatttggtttagtgtcattgtagtcttgctttctacatcttactaatgtctcatttatttattcattttgctctgtcacatttagaatgattttgatgggcaaaaatcatggtagttacaaacagccctttaaaactattgttatactttgttcagtggattctggtagaggctttaaggtaattatttctttaaagcattgtgtaaatatacctcctactgtagtgcccttgggaacaggcaaaattcagaactggcctgctagcagtcttaccagggttataaaagtaagattattatatataaaacagcattaactcaatgcgtggtgtgttgcagctggcaaacaacctcgctccccaggctgctaaattcgtggtcttatgaatgtctccattgctgtgtttgctgtagcaggaagtgggagggtgttccccagtagccttgactgtttaccaatgcacactccagttctgtggagtgctgtgtgaggcatgtcttctcttccctcctggagtagggagacagccagtagttgctacctgccccgagcagggtgcttgcagatcttgcctatgtggaatcctctaagtgtcttggtgaaatgcagctgttttcagaatgaagagttctttcattttcccttcttgccatatgccatcttgctcccttttccatcataggcttttattttgctggttagagaattgcatcttgtcttgcatcctacccagtccactgactcactcccctcttgggttaatgttttcatatgatcttgctgtgggatgacaagctttagatttgcaggataatgggcacttgtggctttttactgtaacccaattatagtctgtggcaataattttcttttagttgcctttctgcatgaatctggtggtaggcttaagctccatgtgctggtaccctctgagcactagaggttctaacttcctccattattagtagaaacacttaggtgtctgagaagtattttaggcgacaggcaactttgctttgaggatatggtcaaaatgagttcaagtgcctttgaggctgtgagtaggtgtaggtcgtttgattcactctattagctctccatgaatctctgacagcaggactggggaaaaaggttagtgggttagagcattcctgcagatttgatagcctatttctaagagaaatttgaaagctaaatattaagcagtcaacttttgtaaatagacctgtctgtgaattgcttcagtctaaaagataaaattttgggaaacttatccacagaaaataataaaactatctactttgaaatgatttcagagaacatgaagttttagaatattctttggaagaggtaattaaaatgatgccagtgtattattttggaaataaaacttacaggaatgtttcacatagtcatggttcacttggtgaccagggccttttttactctgggggggattcctttctgggcttgagttcttgctgtgatgcggaagttgggtgcccctacttcatgaaactgtaccgcaaagatgtgggtgcccctacttcatgaaactgtaccgcaaagatgtgggtgctcctacttcatgaaactgtaccgcaaagatgcgggtgcccctacttcatgaaactgtactgcaaagatgtggcctcagagccatggtttctgtcctgggcagggagtcttgcagcctggggcagtttcaccatctgagcacagaccctgatatagtttggattttgtccctccccaaatctcacattgaatttgaatccctaatgctggaggtggggcctggtggaaggtgattaaatcatgggggtccctcatgaatggtctagcaccatccccttggtgctgtcctcatgacagtgagtgaattctcatgagatctggttgtttcaaagtttctggttgtttcactctcaccgtcttgctcctgcttttgctgtgagatatgcttgctcccacttcaccttctgccgtgagtgaaagctttttgaggcctccccagaagccgagctatgcttcctgtacaacctgcagaactgtgagccagttaaacttcttttctttataaattacccagtctcaggtatttatagcagtgcaaaaacaacctaatacagactgcttgggactgggctggcttttttggcctgctgccagcgatgggccacaggtgggagactcactgagttaagggcattagaacttggtgggtcctgctattgcctgctatgctgtggagctcaggctgcacctctttttaccatgtgggctctttgatgtggtagaggcgcctctgtccctccccagaatgttgccctggaggcccgctgatcaccgttggggccagtgcttgtctcagctgttggagagcctgaatatgtgcttgcctgacccagctccacccagctttccttcctcaatctgccttgctggcagaacacaagacagtgatgcttaggtgtcccatggccccacccattgtctgggacatgggagtagcctcctcgttaacaaaagccaagcataaatcctgttgccaccactgcagctgcctctttcctgcaagtaccacttcctggccaggagatgaacttgcgtagcccatctgctgagacaagtgcacaattgcacagtgctacggcaggagacaagctttccatgacctcagttaccatcatccctcaccacaccctggctactcagaaggccctgagcctgctcaccagcctggtatattactactacaactgatgtttgagaaagtcaccacacaaagcctatctataaccaaggaattcatacagtctttgacgctgaaagcgtccagaagcaaagccaaataaaactatgcaacatacattatagtcacattctcagggcggggggaaccctctagtcaaagcaaaagtaaattcaaaccaaaaagtgacagtttctctagatgagaaggaagcagggtaacaattctggaaatatgaaaaagcagggtgttatagcaccctgaaggatcatattaatcttccagaaacagatcctaaccaaagtgaaatgcttgaaatactagttaaagaattcaaaatattaattttaaagaagcttaatgagatacatgagaaagttgaaaaccaatacaaagagatcagaatatcaatccaggatataaatgagaaatttaccaaagagatgttttaaaaaaatcaagtagaatttctagaaatgaaaaatttattataggaattataaaattgagttgaaagtttcaaccatagactagacgaagcagaaggaagaatctcagaacttgaagacaggtcttttggattaatccaatcaggcaaaaacaaagattcaaaggaaatgaacgaagtgtttgagaaacgtgggactacatgaaacatccaaacctataaagcatagatattactaagggagaagaacaaacaaaatctggaaaatgtatttgaggacataattgatgtaaacttctttagtttagcaggagatctagacctccaaatataggaagctcaaaaaattctaaggaaatatgttgcaaggaggacttcaccacaacatatagccatgagactgtatgaggtcaacatgaaggaaaaaatcctatccacgagaaaagtatctaatcacctataaagaaaatcccatcaaactaataggggacttctcaggagaaacttaagagccagagagattgggtttctgttttcaaggtgcttaaggaaaaaaaatctgtcaaccctgaattttgtatcctgccagaataagtttcatgtatgaaggaaaaataaagtctttctcagacatgcaaatgctgagggaatttgtcagtactagatggaccatacaattaatgcccaaaggaggtctatacagggaaacaaaagtttgatacttgctatcataaaaacacacaaaagtataaacactcttataaaacaattattcaaacaagaccacaaagcaactaggaaacagttagcattatgacaggaataaaacctcacatattaatattaactttgaatgtgcatggattaaatgctccacataaaagatacagattgggagaatggatttaaaaaataaaagacagaatccacccatatgctgcttacaagaaagccagaactaattggtaaagacatacactgaagctaaagggatggaaaaagatattccaggcaaatggaaatcaaaagcaagcaggaagacccacctatacttagataaaactgactttaaatcaacaacagtaaaaaaaaaggaaaaagatggtcattatatgataaaaagattattcaacaagatgtaacaatcttaaatatgtatgcatgcaactctagagcacaagattcataaaacaactgctggtagacttcagaaaagaaatggacagcaatgcaataatagaattcaatcactgagaaagaaaatcaacaaacacggcacataaattggattcaggaccacgtagacctaacagatatttatagaacattctccccacagccgcagaacatatattcttctcatcagtgcatggaacgtttttcgagatggactatatgtcataccaaaaaacaagtctcaataaattgaaaaaaaccaaaatgataccaagtatcttctcagaccacagtggaatgaaactagaaatcaattcacagagaaactctcataactatacaaataattggaaattaaatagcctgcttctgaatgaattttgagtcaacaatgtagttaagatggaaattaaaaaaaaattgaaacaaatgaaagtggatacacagcataaaacctgcgggatacagcaaaagcagggctaagtgggaagtttatagtgttaaatgcctacatcaaaaatagagatcacaaattaacaacctaatatcacacttcaaggaactagaaaaaaaagaaaaaaccaaattgaaacctagcagaacagaagtaacaaataccagagcagaactaaatgaaatggagaccaaaaaatgcagtacaaaggataaaaaaaatgagaagttggttctttggaaagataatattcatagactgttggtcagattaaccagaagagagaggattcaatcagaaataagaaagtagacattacagctgataccacaaaaaagatcataagagacttctgtgaacatctgtgtactcacaactgagaaaatttagaggaaatgtgtacatttctggaaacattcaagttcctgagattcaaccaggaagaaatagaaattccaaaaagaccaataacaagtattgggattgaatcagtaatttaagaaaaacaaaacaaacaaaacaaaacaaaacaaaaacctcccaacaaaaaaagctcaggaccagacagattgacagctgaattctcccagaggcacagggaagaactagcacaaatcctactgaaactgttaccaaaaatcagaggagggaatcctccctaactcattatttgaagccaatattatcctgataaccaaagccaaacaagcacacaacaaagaaagaaaactagaggccaatatctatgataaacagattcaaaaatctcaacaaaatactagcaaactgaatgtaacagcacttcagaaaaataatacatcacgatcaagtgggttttattccagggttgcaaggatggttcagtgtatgcaaatcaataaatgtgattcaccatttaaacaatttaaaaaaaagtctgaccatctcaggagatacagaaaaagcatttgatgaaattcaacatcccttaatgaaaagacaacactcaaaaaatattagaagggacatacctcagaataataaaaggcatatacgacagaaccacagccagcatcgtactgaacagggaaaagttgaaagcatttcccctaagaagtggaacaagacaatgatgcccactttttcatctctcctattcaacatagtactggaagtcctacctggggcagtcaggcaagagaaagaaaacgcatccagatcagaaaagagacagtcaacgtgtctctgtgtgctgatgatatgatcttatacctagaaaactctaaagtttcctccaaaagtctcttagatttgatacgtgaattcagtagtttcaggatacagagtcattgtacaagaatcaataacatttctacacaccagtaatgatcaagctgagaatcaaatcaagaagtcaatcccatttataatcactaaaaaaaaaaaacccactagaaatacatttagccaaggaggtgaaaaatctctacaaggaaaactgtaaaacactgatgaaagaaattgtagatagcagaagtgggaaaacatcccatgttcatgaattggaagaatcaatatcattaaaatgattatattgcccgaaacaatccacagattcaatgcaattcctatcaaaatgccaacgtcattttttatggaattagaaaaagtcctaaaattcatgtggtcccccaaaaaatcttaatagccaaaccaatcttaaggaaaatgaacaaagctagaggcatcacaatacccacctacagattttactggagggctatagtaatcaaaacagctagtactgatagaaaaatagacacacagattaatggaacagaatagaaaacccagagtcaaagctgcatacttacaaccaactgatctttgacacagttgacaaaaacatacactggggaaaggacaccctatttagtaaatggttctgggaaaactggacagccatatgcggaagaatgaaactggacccctatctcttaccacatataaaaattaactcaggtcggattagcgacttgaatgtaaggcctgcctgaaactataaaattcccagaagaaaacccaggaaaagctctctcggatcttcgcctaggcaaagaattcatgactaagacttcaaaagcaaatgcaacaaaaataaaaatagagaaatgggactttattaaacttaaaaacttctgcacagcaaaatacatagtcagcagagtgaacagacaacatacaaaatggccaaaagtgtttttaaactctacattcaacaaaggattgatattcagaatctacaaagaatgcagacaactcaacaagaaaaaccacaatccctttaagaagtgagcaaaggacgtgaacaaacatttctctaaagaagacatacaaatggccaagaatctcctaaacatactccacatcactaatcatcagagaaatatacaaattattataaaaccacatggaatactatgcagccataaaaatgatgagttcatgtcctttgtagggacatgaatgaaactggaaaccatcattctcagcaaactgtcgcaaggataaaaaaccaaacatcgtatgttctcactcataggtgggaattgaacaatgagaacacatggacacaggaaggggaacatcacacacctgggactgttgtggggtggggggcggggggagggatagcattaggagatatacctaatgctaaatgacgagttaatgggttcagcacaccaacatggcacatgtatacatatgtaacaaacctgcacgttgtgcacatgtaccctaaaacttaaagtgtaataataataaaattaaaaaaaaaagtttaggaaaaaaaaaataaactgcatatatggaacgtaataaaaaaaaaccccacaatgagataccatcttataccagtcaaaaatggcaattattaaaaagtcaaaaaacaacagatgttggcagagttgcagaaaaaaaagagaacacttatacaccattggtgggaatgtaaattagaatgacctttatggaaaatagtatggaaattaatcaaagaactaaaaatagaactaccatttgacccagcaatctcactactgggtatctacacaaagtaaaagaaatctgtctgtcaaagagatacgtgcactcgtctgtttattgtggcactattcacagtagcaaagatacggaataaacgttaagtgcccaccaacggatgactaggtaaagaacacacacacacacacacacacacacacgtctatcatggaataccactcagccgtaaggcagaatgaaatcctatgttttggagtaatattggtggaacttgaggccattatcttgagtgaaataacttagtcagacaccacatattctcacttataagtgggaactaaataatacatacacatggacatagagactggaataataaatattggagcttcagaaaggtgagagggtgggagggcagtgagggttgagaaatgagaaatttcctaatgggtacaatgtacagtattccagtgctggttacactaaaagcacagacctcaccactgtgcaatatccatgtaatacaactgcactcggtcctcctaaatctaaataaaacaaacaaagaggcacccccttaaagctcagggtcttgccaactctaacagtggggtttcttgatgttttttaaaataaaaagaccattagttcataggtatgagagactgtcataaattaaaaccaagtaaggatggattgaaatacccacaggaggaactcatcttcacagtttatggaacaaatatagaacaaatatttactgagctcccactatgttgtaggcatcatctttagcctgcagtgacaaacccttgacctcaaggagcccctattatagtggggggaaaatgacaaaagtcaacagatggcagtacctagtatcatacatcacagtgctgtgaacaaaagtgaggctgagtatgggagacagagagaggtagagagtgctgttttaggtaaaggtgtcagaagaggccttactaagggcgatgtttcatcagagacctgaatgaagtgagggaaagagccatgtgtatatttgggtaagcacatctcaggtagagaggacttttgagtttcaggagggtagaattgcatcaagaggtgagtgtggctgcgttgagtgaggagagtggtgggttagggcggtgtcatgaaggagttggaatttccttctcagtgtaatgggaagctgctttgaacagggagaggtgtggcctgatttaattctgaagtgctaatcctgtgcttgtggagacatgggctgaggtagtagggcactgaagctggaattggggggccagttaagatactattgcaggcaagagattatggtggcttggacagggtggcgatggtggaggtgataagtagggagtggatccagggtttagtctgaagggagagctggcaggacttgccgatggttggatgtagacgtgagagaacttggcggtggggcagggggaccttaaggttttggctcaagcaactggttgaatgatggtgccatttgttgagatgaggaacactggggtaacagtaggttttgggggagaaatcaaaggctcattttaaatttaaatacatgaaatttgagatggttttgtgtatccaagtgatgatgataaacaacagcaataaataacacttatgccaacctgccaggagctgtaccccaagcttcacatacattagttcactcaggccttacagcagccccatgaaggaataactgtcattattccagtatggcacgtggggaagctgaggcatggaggttaacttcattcatggtcatgcaaagtgttcatgccagaggttgaaccccaagtgttctgcttcgagtctgtgcttataaacgtagcttctgctattgttggctgtgtaagcctgcagttctgtggaaaggtcaaggctagagacatgaatttgggagtctttggcagacatttataaccatgcacgaggtcaccaagggattgggtgtagacaggaaagagggctgctcagtaagctgtggcacacctctggattgagagtcagttagagggaaggtgagaagtgtttccaggaggctgaaaaagagctggaagtggggcagaagaaaaccaggagcctgtggatgcaagccacaggagaaggggtttcatgaggtggagaatgatcagtagcatccagtgccacaagagaccatgtaacgggaaggctaggacacgagcactggatgtgtcagcagagatgttgtgggtgagctggtaagcggggttttgctggagtgggaggcagcaagctgatgggactgtgttcaagagagaatggaaggcaggaagaggagaagacgtgtagggacaattgaagaaattttgctctaagttgcagagacatgagatgatagctaggggaatgtagggaccaggaaggacgtttgtgaggtggtagatctcatggcatgctgacggaaacgatccagtggagagggaaaacctggtgatgtaaagtgagaggagatgattgcacaacagtcctcatgtaagagagaagagataccgaaaagaacgcagaggagccaagacgtttattgacctttgcctgagttcgttattaggggacaccatagcatgatagtccctaaggaatggagagcagtgttgtgtgacattggtcataagcttttctgattgaccaagatgtatactgaagactcacttttttcttcctcccttccaggtgccatgctatgtgtttgatgaagagttgaggaagcatgatctcaatcctctgatcaagcttagtggtgcctacttggtggatgactccgatccggacacttctctattcatcaatgtttgtagagacataggtatgaatctttgtggggctgagggggtggtggtgagggatttcttctatggcttcaatatctttgcctttctacctttatttctgttttcacatccatgtttctgattaggccctctaataaagcttttgtccccaaaaatgttctatttgcacaacccacctcttctcccccagtagattccatgcctcctccccaacccctgtagattccatcctaactgttgatccattccatgtgggtgttctctcggccagacaccttgggtttcgggattctacagaagtgagggtcggtcttgttctctgtgtgtgcctgaatcccttggctctgagttacgggctgggtgaaaaagaaaaagggatgatcaaggacttgggtacttggtcgggatgcatatttggcccaagctgacttgttcctttctctgtacttgccaaaactggtgtgagaagctttagcttaagctttagaatctttgataaattaactaaagaccgtaaataaatggtctttatctaaaaagggccatgaaaagttttactaagcctttgactagccttcagctggttttactaagccaagtttctaaaacccagcttgatgttcccctcagggctatgaattgttagtcctgtaggccaggactgtctttctgcagtgctagccatgagtaaattctgctggtgattaactaatctaaaggtcatttttagtgttcttctttgttttttatttctcaaatagtacataatgctttgcccttagaaaagtttggagaaaattttaaaaaataaactcaatacatggaagtattgctggatagtagatgagtattaatttatgattattctttaaattgtatatatacattatgtactatcttgtttatgtattatttctaaacagttaaaaacagtaaatataccccattcagggctcaccaaaagtaaccaatgataactaggtttttttgtgtgtgttagagtattacatctttcttttgttctccaaggataacctttattgattttttggaaaaagactaatacagtctttgtcttaaatgggtctgtaactcaagtttggttatagagttgatgagttgtagattattgaattctggaataatacgctattttgatttggaaaacatttaggtttctggtctcttaacattttacagatcatctgaatttgctgagtattttcttacaagttttttctttccaatttattggcaatttgagtagagcttgaatgactttgattcacagtaggggtgccctagtttttactcagacattctccattcccaggaaattgccctaagtctcaaaccaagattgaatgtgaccctcaaaacctcttggatagtttcggacttgccatcatgtgcttacctccttgcatcctcagggcgcttgctgtgtattctgcctttggtataccaagtggattgtcttacactgagtccccatgagggcaaggagcctatggcacagcagatactataggtggaacaaagcagtccatttgtgaaatttcataattccacataatttcataattgtttggaaggcttgagagttaaaggtttgcttacctcttcactagctggtgcaaaggtagataaccctctccatctttgattaataaggcaggtaaaacttaagggaggtaagattattcactcactcattcgtgggagaagggttgtttgaatcccttctgtgtgctaggcactaatctaggcactggattatagcactgaactcaccacagttcctgttttcctggaactttagttagataggagaaaagatagatagtaaacaaataaatcccaaagtatactgtgtaaggtattgagtcatggtcatagaaatgaatggtaaagagcaacctagctgtaatcatagctgttgctatactggcaatctgtaaagcctgcgggatgttctggacatattctgggtatgttttcatctttaatcctccaccaaacctgtgcagtagcacactggcaattggatagttttgtagttagaccaacgttatcgacatagtaagtggtcgatttaggatttgaacccagagctgtgggttctttccctaatctcctaattgttccagtcatctgtggagtgcctgcattttctagtctctgtagcttgaaaggggatagtgctaatgttgttgtacctcaagcagaggatgggtacatttcttgattacaaataacatcataacctgtttcctgtgcacctcttatataccagtgcagagccagtactttacagtccttcatcctgagctttgtttgcagagggttaatggcttgcccaaggtttcagaatagttacttagggagacttttaggaattcaataatgtatttaaagggaccctgggtctaagggtacgtgtgattatcactcctaacacctaatctgatttaatgtaatacatgattttcagacacactacgagacccaggttcacagctgcgggcctgtccccccggcactgccgcctgcctggtaagaggacaccaggcgtttgatgttggccagccccgggacggactgaagctggtgcgcaaggacaggtcagtcaaggcctccgatgctgttggcgtttttaatctccagcaaggacctgactttcagggagctgcaggaacatcctttttcagcaaggcttgggatagtccctgcagcattgctgcttcacatgtacttgtaagattgttggtcattgctgtgagtcacatagtctagtgtgcttgtctactttttaatcatttgtctcttacagcagtaaaaatacatctcatgatccagtccatagtacatacctgtatttgcctcatgaaataatgcctatcttaaggtgccatctgatatttttcattctgtggcacccgtgaaattgattttgtgtccattgtgttctcatcttgggagggcaagagacaggagggacagtttgctggtgaccttcactgggatgtgacagggaccttggttcccagtggggaatggtgttccttataatgtgttgtgccgtgtacatatgctcttgtactgcctttgtatcttgccttggcagacatacgcatttctctagtgtgttgcacatgaccatatcctgaacttcgatcaaggattcacattttctccccattcagaggcctttggtagacaccttgttgtgcttgctctagtctggagctcgtggcatgtctgggtggttgtagggagcatgtgcaattataatggcactctgtccaaagaaaaaacttgagcgtaacctgaggggaaaagtgtttggaattttctatgtgtgtgtctgtattagtttgctcaggctgccataagaaaatacgataggctgggtagcttaaaccacagaaatgtatttcctacacagtctaaaggctgcatgtctgaagaaggcgtcaccggggctggtttgttctgaggcctctctccttggctcgttagatggccgttttctttctgtgtcttcacgtggccttccctctgcgggggtctgtgtccgaatctcctcttctgataaggacaccagtgattttttggattaaggcccactcacatgatctcctttttccttgttcacctctttaaaggccctgtctccaaatatagtcacatgctgagctatggcttaggccttcaacatacaaattttgaggggaaacagttcagtccataacagagtctttaagtgacacattggtaattcttaatatgaatgagtttgtgtgacgatttagtaacatgtgggacactgagcaagtgtgagcttctcttgtgggaaaaggcaggtcatctgtgatcagctattctctagcaggcagccaggggcactgggccctttccacactgagtgcagtaaaccctggtggtgggggccatgttggatggtggtttgggtggtggaagagaaccccagttcagtaactgctgtaactgctgggcaggtgctgtggggttaagacaaaacaaaacttttggctggcacttagaatttgttgtataaagaggaaatgattgactagccttgtgggcaaaaatgcacctggcctgcttgtctgcctttttttttttttaattttgttatctcatttacaaccgttttttgcttgttttagtcaaatggtgtttcttcctttttttaaaaaaaataatttttttgttccttttctctttccttattctaggacatgaagcagatcaaacaggttttgtttttgtttttgcttttgtttttgagatgggtcttgctgtgtcacgtaggctggagtgcagtggtgtgattttggttcactgcaacctccgcctccctgttcaagtgattctcctgcctcagcctcctcagtagctgggactagaggcgcactaccatgcccagctaatttttgtagttttagtagagatggaggttcgctgtgttggccagggtagtctggaactcctgacctcaggtgatccaccaccttggtctcccagaatgctgggattacaggcgtgagccatcgcacccagccaggttttcttaatatatcaaatttatgtgctggtcactttagatatttgattttttaacaaaataacactcactggagtttacttaaaacttttttttttttcaaatggaaataaagtcattttataccatatctacttttatattttaatatttcttctgttaccctctcctcccccccaagtgaatgtgctgaatgctcagggcaacatatgaatttggatgtactttatacttttgtaatactcttttctcaatgtggctctcccaggcttgtcctgagttacgtgagggaagaggcaggaaagctagacttttgtgatggtcacagccctgcggtgactattacatttgtttgcccgtcggagcggagagaggtaagtgactcgtctcctgatcactaatgtggcgcacagtagcctgggttgcccatgcgaacgcgtttctgggcttggggcagggtgggcctggatgcaggaagctgggagccatgacagaggcactggtgggttctcaggagaagacaagcttcctgggatagcttctgtcacatgcagctcactcagggagagctgtttgcattttgccttttgcttttttacagcaatccggaggggcctccacatataatgggatggtgttttgttctagtctctgtgagattattttaagtagttcacggacagatttttttttggtagttgggttgttttagtgaatagtggaaaaacgaagtagaatttcaagcctgtgatttcttatgagaagcctttccctccctctctcttcccagtctgcccctaaacccccatccatgccttctcccctctttctcatcacaggccagtttattgctgtgccctctgctgttgatgaaatctccagcgcagctgtaaactcttcgagtgtggctgctgagacttacttgtccttgagtgcccagcgcctgcaagtgttttaaccaggggcaggtgctgatggaaaggaggcgtcccccagggagggaggggtagggcagggctttcctttagtttctttctgccttcttagtaatagggtgaagtagggaggggctgaattcttttgccagagaaccacactccccttcccccaagcaaatgtggaatttgctctgacgtcaggctggcagctggcctggtgtgtgtgggatatggagacagtgcagggctcagctttccactttctgtccccagacttccacatcaagtgctgtcagctgaatgaaggccggagtgtctgatgtttgttctgaatgtgaatggggaggaatatttattcacacttttcatttgtacctacagatgtgagttgaaatcttttaagcccagtgagatgttctcaggcggtagtggttttagtgttttccctttttatttgttctacatttggtaagaatcattttacactgtgagaaccaagagaattgggagttttcctcctttttcttcgaaggggtatgaggcatttcttggtgttagaagaagaggctgatttgttattagtggagcaagaagttccctctgttttttttttttttttttaaagacagtgtcttgctctgtcgccccggccggagtgcagtgccacgatctcacttcactacaatctccgcctccctagttcaagcaatcctcccacttcaagcaatcctcccacttcagccttctgagtagctgggactacaggcatgtgccaccacgcctggctaatttttgtatttttagtagagacagggctttgctatgttgcccaggctggtcttgaactcccaggctcaagtgatctgtccacctcggcctcccacagtgctgggattacaggtgtgagccaccgcaccggccaggtttcttttcaagcttaactgttcactgggcagaccttgtgtgacatgtgcttggacactgtaatacttgggaggtttgtttaagcatttacatttgctcattgaatgattttaggagctggtatttagtaaacactcaccttgtcatatagatcattttaaaaatgctttatttaatttatttattgggtttacatactgtaaagttcagttttttttaagtacaattcagtggttattagtatttttttttagaactgtgcaaccatcatcacaatctaattttgcatttccatcaccccaaaaagaaacctcctgcccattagcagtctcttcccattcataccccaagccctggcaactgtccaccttcttcctgtctctgtggattggccttttttggatgttttatgtcaggagaatcctacactgtgtggctttctgtgcctggtttctcttacggagccctggggtctgcatcaccatgtgtcagactgcactgagccacgtgggcagaagcatcgattatgagtcaaacagaagagggttgggcctgcagctctgcaacttactaattgtgtgcgacctgtttgtaaacctggcacctagtgcctggcgtgtagcaggtgctcagtgagtatttacggaatgaatggtgctgggaagcagcacggctatgcccggtgctaagcccagtaagtcgtgtctcctaagggtgattaaaaagctggcagtgacattcctggtgagcagggaccccatcagcccccttcatggctcacatcaaagacgaatggtggagctcctgctctgtagaagcaacacaatggcagaatcgggtttgtgtctgggtggtgccctggcttcacccaggagcaggtgtgggtacagatatggtggtgcccaggatcccaaaggggttgtggaccgtgtctctggttgtgcacgcatgtgataatgttcactcagtgtcagggttgcaccactccagttgagcacctcgtggaaagcggtgaatggaccatgcaccctgcacggcctgttagcgcttgccgatgtcctagtgattgccacgtgccactgagtccaggtgcttgctggccgaagcttgagtgtctctctgaaggtgactagactagaaagggaatagagtgtaaagaggaaatggaggtgttacgagtcaaatggaaaaaaaataacagtttagaaaaaaattaaaagtaactttactgagttgttataagtcaaataatcttaatgtgttagaggcaattatgattcaaaaaacagaaacagcaaaatgtagaaacctaacaacctgtctttgagcttttcataagtgtggaaaatctgcattaagctgcatgaaacattttttattttgcttctttcacattgttcctgatagggcaccattcccaaactcacagctaaatccaactgccgctatgaaattgagtggattactgagtatgcctgccacagagattacctggaaagtaaaacttgttctctgagcggcgagcagcaggatgtctccatagacctcacaccacttgcccagagcggaggtaagcaggtgctttctgcctcctggcgctgcttaggaagaaggggatcgagagagggaacgggacagtaggggccaagtcagtccatgcatgcttctgggttggagagagctgtagtttgggctggtgtttcagaaataggattcaggtttgactaagtaagactgtaatcttctaatacctattcatataaaacaagcctcttcttgttaatttccctgtttttaggttcatcctatatttcagatggaaaagaatatttgttttatttgaatgtctgtggagaaactgaaatacagttctgtaataaaaaacaagctgcagtttgccaagtgaaaaagagcgatacctctcaagtcaaagcagcaggaagataccacaatcagaccctccggtacgtcaacaacctctgtgcgattttcctttttctttgtatttcttgagatagggttgcactctggcgcccaggctagactgcagtggtgcaatctcggtgcattgcagccttgacttccctgcctcaagtaattctcccacctcagcctcccgagtagctgggactacaggcaggcaccaccatgcctagctggtttctgtagtttttgtagacatggagttttgccatgttgcccacgctgatcttgaagtccttgcctcggtgatcctcccacattggcctcccaaagtgcgtggattagaggcgtgtgccttgggactggcctgcataattttcaagtgcgttgtgtgtattcttgtgaaacataactccctctccttttcttcctctttccattttccgtaaggtacgggagaatcagttactccagcattccttcctagtagacttcggcaagttgccgtttgtcactaaacaatcaaatgtttttcctggctttagagtaagaatgcttctgttagaactgttcactttataaacttgctgtttgtacggaacctactgtaggaaaagtatttaatgagtttacagttgatagggttttttattttaaaattcgtttttaaggagttttgatttttctctggcagtttgagaatctgaagcaccatcaacataacagaaaattttaaacaactaaaaaaatgcattcagcacatttcttttgacccttaacttggtagttgaccttcataaaagcaggatgaaaatgcagttttctgaaaatgtgttaggggcagttacgattcaaaaattaggaacagaaaactgcaaaaaccccagaactggtctttgagctttttaaaagcatggaatatctgccgagaagctgcattttaaacattttatttttgcttctttcaaattgttcaggatcagtatagtccaaggcccctcaggcacggctgtgttcatggcggctgttaagaaggctgtctaattcttgggcgttatttattttgtacgaaatctaaaagtgagaacaagagaagtcttcatgctcacagcaaaaccttcggcactttcttccagccagttactactttgaagcgagaggatgtcaagtccatacatttggaactcatttcctgtagatatttttccctagctggctagagagcttgctgttttagatccgtagtgatttgttgatgctacgcaaaaggcttaatgtagacatttaaaaagattcaagtttttttcttggttctcccaaacacatttgtctgtgtattcacaaaaatctagatattcggatggagacctcaccttgatatattttggaggtgatgaatgcagctcagggtttcagcggatgagcgtcataaactttgagtgcaataaaaccgcaggtaagtgtgcgctggagttcagcccctcctctttgcattcatgggcatgtgcttgtgtgtgtgcacaggcgtgttcttggaagtgaacactgaatggaggagtcagatgccctcctttggactggccagctctagcccccagactgggttttttctgttggagtaacactttccccacccccactgccccagtggacacacacacatcctgtttgtgttttcctcggttttctctgtttgttttgggaatgggcccagcaatgagcttgttgggaaagttttcatcttgaattttggtgcacactaaactacagcaaggacagattcggcaggggcgggatggcttgtcaattttgattgagtgacctcttcttttatgtaatgagtatcaagataatcctttttgcaaagtggtgaccctatggtagagtttggatctggggattgcagaatgtcactgggtgcgttgaagctgaaggcgtgcatttctctgagtaatgagaagcacccttgagtcaccaaggcactggcatatcaaaaagcggtgccgctgtccatatcttgacgattgtagacacagttgtagctgtagagagatgatgggattccgtcatcatcagagacctgccccatctgttgacccccaggctgtgactccaggcaccctgcagggcatcccaccactgctcagagcaattctagggcccattctggtttccagcctaagtgctgccccacccagagggtctttctggcccttgcttccgtgtgttctgtgtgtttttctacagcagagctttgggtggcttggttacaggatgggttgctacaggattcactgtgggatgagggagaggcagctggacatgatgtgaaccatgctctcgaagcctccggagatcaggtctgcgttgggagagacaggcacccctgccctggtagcaccgcacccctgcgaacgtcctagcaagcaggcaaagaaccagcccagggtcttgccactgggaaggctttcaagcccaaaatgccccagtaactgctgttgtggcacctgcccctgggatgcccttgttcacaggtctgccattgctgtccttgttctctacatggccccttttgttactttcacaatacacacattttttaagtacctatttgcttaggccctatgaggctggagggtgttgtgaggatagatggctctctaggtgttcacagactagcagcagagagagataaggagcatgatgatggaggttcagggcagtgctgctagagtagagcgagtgcttagtgttgtcgctccgctgctttaccaggagggaggcaccgaggtcagctggctggggtctgggctgggtgcaggggtcaggcagttcagagaggaggaagtgctgcctgagccacactacattgaggagcatgccagtcccgtgttggggtggctttagggcctgggcctccagacattcaaaggcatggaccaggggaactgcgagcaggttagaggcgtgtatggggaatgtggctgaagatgaccctggaacggtgagtgtgcagtattgtaagaaacttgtatgtcctgcagaggagctggattatatctggaaatctgtgaagtcccaaggattttcagcaggggtatgacatacatctgactcgtgaatgagaaaatcagtgtggcctctggatggacctcgcatctggtctgagcactccctgcacccctcagcttctccatcattctctcatcgccctcacctcctagcctacctacgctactagcctccttagccatgtctgcaccctgaatcacgtctctcctacttggtgtccccagtccccagggatgcagcctgtatcttccccatgtgcccagcccctctgatgcctgaccttggttctggctcccaggtcaccccaactggctctcctggactccggctggctcaggctgctctgctgtggtctgaatctccctgcaactttgtgatgacctcctttggcctgttctgttcagggctttttattaatgacttggccgagatctttgagagtgtgctgatctcatttggggatgctgggaagacagaatcattatccaaaaagatcgaaatggacgagcaggatatgagaagggcattatatcgtttcagacttacagggaagaggtgtggacatcgatgagctgccaaccaaacaaaaaacacaggagagaaaaaccaaagaacagaaagaaagaaaaatagaaaaaaaaaagaagacccgcagtagagtggggagatcttgccttgtagttatgagcatagatgaggccacaccctctgggtttggttcccagctgccctagtttttagttatgaaatcatgggcccagagggagctaaagcccagatgagctgaggcttgacaaaacgggtgaaggcctcccatagctccatttttccttttcattataaaaattttcaaacatggaacattaaaacagaaatttacatgcctgccactctgacagccattgatgttttgccagatttttcatgtaagccatgcgtcattgatggctcatatcaccccaccctgatgccaagaacgaacattcctttatgtaaattcagtaccatcgttgtacttaacaaaattaacagtgacatcctgatgttaaaaaacccatgttttcctaggctgttttcattatgattgtaacaaggagcctggacagagagatgtcaggtgttttgtgggagggttttgagctggctctcaggcaggagttggattaaaaaatacttacatttccttccagctctgtaattcagcactccaaactctgagagcaaattgtgtactgtaaaattagttcattattattttgctcgaatttaaacttagagtttttggagaatatcccttggtagactctgtttattagatagatgtatttttgaaggtgaacgagtgttaattggctatgtaatagaagtgtggtttaagttggatctctaggaattattcatgtgaatctaggttcatgtacttttcaggatgcaagcgcatcttttggtcataatattttttaccagtttaaatctagtttgttgtaaagcgatgctttattattggtgatttttttaaataaagatgttagataattttttggaagagcagaattcattaggataggctaataaactactcacaatttaagtggctcagcccattaaaggtttattttcttagttcagtgctagtctttggggatggggctggggtcgggggtgcgggctctgctccatgtggtcatttggagacctacgctttttccatcctgtgtttctgccatctgcagatgtgacttccaggggctctgcaggatgggaacatcaatttgctttgttttattttttttccaggccagaaataagtcacttggcccagcctgaatatcaggggaggctgggaaacggagtttagctatgtgtctagaggaaaaattaaactagttgggtaagaggtagcattgtttttgccacagagaaatgggtgctgctgcctcctccttaggcagagagctccttggttccatttgaaaaccttccttccccttttgctggaattgagagactgaggacacaaagtggtgtgctggataataaactagagcctgtggtgccagactggcaacttggggattgtgtgagtgagggagagattgtgcagagctaatcctaacattgctgatgagtggacagaaaccataggcctcatgaatagtgatttctgaagtcaaagcccagtatgcttaaatatcaacccaagtggtttgggagaggggagcacagcttactgttctgctaaaattctttgaggaattaagtaagaatacgtgtaaggtacgtagcaatggttatttacaaaatggactctgcctgcagattattagtatgtctcagatgtaaaaccagctcaaaagtactaggacgatttgtagtagtatttaattatttgtaaacttacacgtttttcttcacgtttgcagaatacaaatctttgtcagtagtgaaatgtgaatctagtaggattaaactgtgtgtaaaccttgtgggcgggatgaagagaggcagaggcgcgtcactgttgctgttagttgaccggcaagctcaggggcccagctatggtagctgcctctgggttgtcagctgcgcccaggaggtgaaggtggaaggcattccttaaagacagtggcttagtgtacttattaaaaaccaaaccaaaccagccaaccaaacaaacaaaaaacacaggagagaaaaccaaagaaaaaaagaaaaatagaaaaaaccccacagtagagtggggcaatcttgccttgtggttatgagcacggatgagggcagaccctcagggtctgattcccagctgccctagtttttagttatgaaaccataagcaaattatttagccaccctaaatctgcaaaatggtgctaaaattgtacctttgccatggggttttgaggatcaaatacattaatatagtcatgtgttgcttaacaataggaatatgttctgagaaatgtgtcattaggcgattttgtcattgtgtgaacatcatagagtgtacttaacacacacctagatggtatagcctgctgcacacctaagctatatggtgtagcctattggctcctgggctacaagtgtgtatagcatgtgagtgtactgaatactgcatgcacttgtaacacaacggtaagtatttgagtatctaaatatatctaaacatagaaaaggtccactaaaaatacgatactataatcttttgaggctaccgttttatatgcagtctgttgttgaccaaatgttgttatgcagcacgtaactgtataaagaaagtacttaaacagagcctgttcttctgcagcttgcctttatgtagccgaggtgctgagctcagtgcctggctgagattgtgctcactacaggtttgccgctgtggctggtattataattatagtgatgataatattaaagattggatagaaattacaattgaaatatcatttgctcttggtacagaatcttacttcctgttttcttagatcattacctagcttatgataccaaacctcaagaaggcagatcacatggtgggaggctcagacaaggattatgaaaccatcaggggtgggaaaaggagtgttgtgcccacggacccctagcctggaaaggtgcagggataggatttccagcaaggagcaagtcagcaaagcctctgaatctcagcgtccatgggatggggacgtggcctgtgaagagctggttttcagacttaggcctgaactattcctgctgatggatgggaaatctgggtggctcactcttggtggaagaagaggcttgatttgaggagggtgttacagacaggtgcactgacggaaccacagaatttcagcactgtttggagttgtgctgctaacattgtggggctggcataggaccttggcgtgcttcactgggagcgactgactatagatggcttccactcttgttttactttagggatgagtcccagagaacttgtcttgttcacagtcgcatcactaagtcagcagtgcacagggaactagagctccatttctgtcctcctttctgtgagtccccagtgtcacccagagatgttcaggagcctctgggagctgaccacagcccgggagcagaggatcccactcactgctcttgcgttcctcctgcctgcccttttaatcttatctttggagatgctgtacacagccttctgtcaatgtctcccaaggtgaaaggcatgctggcctgccatcgaggacttagggttaagcatctgaagcttaatagaagcctgtgtcaactcagatccccatggtctctaaaaaaacctggacctgaattttttaacggagcagttggcattggtcctgttcagtttcttccttgctccttagctgttcctcaattttggtcacgtatggagtttaaatttctcctcttgaattgtgcaggtaacgatgggaaaggaactcctgtattcacaggggaggttgactgcacctacttcttcacatgggacacggaatacgcctgtgttaaggagaaggaagacctcctctgcggtgccaccgacgggaagaagcgctatgacctgtccgcgctggtccgccatgcaggtactgccctccttgccatgcgggtcttagtccacatgctcatggaacattttcccatgagtacttttggaaatgcggttactattttctttgtcagtgggttgcgtcacagccctcccccagttttttcatgtggctgtgtgaattattagaaggagcattggactgggaggtgaaataactgaatttgagaccagcatttttgaccttgtgttttcacccttttacacactgcctctcttccatctctgaggtgggatctgcagcctctgccccctggggttcttctgtttggatcctctaggcagatggatgtgcaccttgggctgctgttcaccgctgcctcagcgtgcagtgggcttgtactcgaggctgagcttgctgttgcacggcaggcaccggatgaggtgccaaggaggcagcagcgccccccacagcacaacccctgtccttgggggcctggaatttagcaggaaacagagcaggtggaataataagaatgggagtctcaagcagggataatctgatgggggggatttctggttttaccctcttggcagctcaaattaggtgtacagaagccagttgcctctgtaagggggagatgacccgaagcagagagaatgacttgcctcatgtaattaccacccagaacagtcacagaactgctggcggtatgttctcgctcgtaagtgggagttgaacattgagaacacatgggcacagaggggaacagcacacaccatggcctgtttagggttgggggtgaggggagggaacttagaggatggatcagtaggtgcagcaaaccaccatggcacatgtatacctatgtaacaaacctgcacgttctccacatgtatcttgtttttttttaaagaaaaataaaactgccagggtgacagcactgctgctcctgtcttctgagtcccacctggtttgctaaataccaggttagaaagaggaatccctcttgtggagtgtttgagaacctgcctcactgtgaaccgcctgggcagggagtgctggcagtgctgttgtggttaaacaccctgtgtgctgctgggaacggtgccatagttaattctggcacatgtgtgctagtgaagacattggttttctgtgaagtggaaagagttctagctgcagagttggagacctggctgaggactggtgttgccgcatccaaccacatttgcttgagcgagctgctctccaggcccgggtttcttacggtgaactgggtggtgctgttagattccttaagttaacttttttttttttaaacattactgtgtataagagacaacctaggatctatgagataaggagagatacatttttcaatctacagacttcctgacatagctctggtttcttggaatctgcagtatttcgtggtatttgtgcgtagatagccctaagtaaattatgaagggagagctaaaaccattccttactgcttgaagaagtcccttaagactttacagcccacctggctccaccccagacttccagtgtttagggcaggtccttgttcacatgcacagtcttgtatggtttcttttaggctgttgacattggaaagtacttctccaaatgtactgtatcaccactgatgagtcatggggttttgccttccaaaccccagtacccaacctgcaaagggagcattttcaaatgagaacgtgtatttttatatctttacctcctccttgacacactttgtaagttactccttcagcgactgttcgccgtgtggtttgctttttgtggatgccctcgcccttgcttgctgtgctggtgacactcagctggtgccccctcacgtcctgcaggtgcctaatcagtgtctgatcacactgaccagctcaccagtcttgtgagttcagcggccacctgtggtaccttgcttgtcttctgtggtagcatgcattgcatcctgcactcagtctgcagatgtgtaagaggttgctggtttcttttagcttcacaggccttcacaggggccgagcggggtgtattagcaatggtgttaagcggggtgtactagcaatgatgtaccactctactgcgtcccaagacacaggctggcttcttgatttgggttttcagtttctaatttcatactgtggggcttgggagaattttgccgttcagttctctgtcccccagttgggcctactcttctgaagaagtattgggatgtagtttgtttctgtcacattaaatgagaaacctgagaatctcggtgaatttttgtgctttcagtctgcccgggttccagaaacagcgctggggattgagtgacgaagtggtttgggaactttgagcccttgacttttggcttaatcactatttattctgtgactcagagaaatcagcattgcttttggctaaaatacacttttgttttgttacagaaccagagcagaattgggaagctgtggatggcagtcagacggaaacagagaagaagcattttttcattaatatttgtcacagagtgctgcaggaaggcaaggcacgagggtgtcccgaggacgcggcagtgtgtgcagtgggtgagttgtgcctggatggaagatctaggtgatgcttttctagggcatccagtttggaatgagttagaagatctttctgtggttcatctaagcctcctctttctataatcacatgaaggatggtaaaaatttttcattcataactcaaatgtcagtaattgcttgatgcactctggaatcctgaagttggctagagctccctgacatgggctaaagccataactgggaacagaaggaaccacgtggaaaatactacatcatctttttagtttgtaacctgaagaataacattgccagtgtttgtgtacaagtgattttattttattttttaacaactttattgcctagaatcgttcaaaagttatggcttgagtgaagtgtaatctcagctgtagccctagtgtaagaggggcttgcatgcttcgcttccttttgctgtcattgttttggtcccgtagctgtcatgcagagacttctcaattatttgatacaggtatttagcacttcatttttgtcatttatgactcactttgaaaatgccaggctatgagaatagtgagaatctgttaaaagcattcaataaggaattgtgagcctcgttggattttaggaattatctcggtattcagaattgctggtgtgtctttaaaagcaggttcaggcatgtccatgtctttactaagaaggactttggaacagagttttaatcctttataacaaaaagcaagtgaaccaagaagtaagcggcctcctgcttgggttgctaaacaggtttcgttaatttctgctttggatatgagacacattctcaccctttggctgtgtggctgtgctttcaaaagactttgtgtcttggggtagctgaagccctgacagtaggggacaatgtcagtttacagttggtgctgatgcatgttgcaagccatttggtctttcttgccctggaagggcattgtgcatccttcatggcgctttctggctgaacctatggatgaccctggaggaccccaatgtggctgttaatgtctagccaaacgtggcactctagggaaacccatccgctgccttggtgggttcagggggctggagaagggctgcacttgctgggtttgggctgatttctttctttctttctctttctttcttttttttttaagtcacttctttgcgtgatgatcatttttaaccacatcttctgttttctccccctttctcttccagataaaaatggaagtaaaaatctgggaaaatttatttcctctcccatgaaagagaaaggaaacattcaactctcttattcagatggtgatgattgtggtcatggcaagaaaattaaaactaatatcacacttgtatgcaagccaggtaaaaattttaaaaaagatgaaatcttttctggcttctgccagaggtcctgcattcttcatagctctgttcctcatcagtcactgcaaagctgatcagacagattggcatggtgttcagcattttgagttccagactctggcgatgggagataggtcatttggaatttttccctcatcccctcctcaaaaccaaatcagaaatggagaaaccagatggtgtcagaagggagttgtgggtctcagcgctgtatcctcttcctcgggactgatactcggccagtcatgtggttacttaacttccttcaaaggggaaaaaaatcataaatggtttaaaacattgcccgtgatctcaccacttaaacacaatgttaattttcattacctttatttatagatgtatgttgtttttaccaagtcaaaatttttatggtaacaaatcttaatgtttctcaaagtgtagtattttgtaaatacttttctatgtttcacagttccattaataatttttaggaacttccttgttgacatggtgtggttttactatttttgaacattttccttattgttggattaatagcgcgtttccagtgttgctaattgtgctattatgtatcctctctctacctcccattgaaatatttcctttggataagttcccagctgtgggataaagtcagaagctagggtcattttgtttgtttgttttatatggtaaaatatacaacataacgtaaaatgtaccatcctaactgcttttaagtgtgtagcttggtgacattgttgtgtaataccaccaccatccatctccagaactttttgatcctcccagactgaaactcagttcccattaaacacgagctctccattccctctcttctactttttgtctctacggatttgactgttctagatacctcatataggtggaatgctacagtatttgtagggctgttttttgacccttctatgcattatacctcatttcccactgtcccttccaagtctacttctagcagagaagaatgaggtaagatattttaggaatgaacggattagtgatccccatctcttttccccattgacaggtgatctggaaagtgcaccagtgttgagaacttctggggaaggcggttgcttttatgagtttgagtggcacacagctgcggcctgtgtgctgtctaagacagaaggggagaactgcacggtctttgactcccaggcaggtctgtgtccaagcaggacctctgctttaatgtgacttggaaccacttaaggttttttccttaacattctgtgtgaggttttcaaggtgacccgccttagaattttattcatgctgtttgaacaaaattctgaacatccgatgtttgaggcttatttgagatactgaaaatactatcttaaattcattattgaggtggttttgctgaatgcaaaaccttcggaacacaagggaataaattatgtttgaaaaggctttcgtgtgaattctaggcaagaaacctctctgagggagaccttacaagaaggccataatatcatgctcgtcctactttgaacatgctgttgtttattagcccagcagttatgggctttgaatagcgctttaggctaacccagtagaagggaatggtggagttggatccatctccaaggaaaatgttagtaatcgcggttctggtggcctcaaggggcagcgtctcttctgcctcctccacttcttcctgccgttgggaacctcctgggaagaacctctccctttcaaactgtggggtgagaccactctgttaactgtcggactgaccttccatacttttattgtttttattctttcttagggttttcttttgacttatcacctctcacaaagaaaaatggtgcctataaagttgagacaaagaagtatgacttttatataaatgtgtgtggcccggtgtctgtgagcccctgtcagccagactcaggagcctgccaggtggcaaaaaggcaagtagcttctcagttctgtttcattcttaggcattatatgctaagaaatattattttcaggaataggtgtgttctcacttaatgtcattgctttatgacaagcatttaaatactgatgagacctggtctgaaaactgaaggatgttaggagtttaatttcccagagaaaggagcaggcccatccttgggaaagaagggtggattgaggttatgcctcactattgcgcattttgtgcttctcagtgcctagatatctctgtgcgtatttctgcattctgcgtaactgcagttcaaatgaagtgagttgtctaaaccagcggtgccaagaggagatttgggtcccagtgttcctgctgccgttggagaccttgtgtgggttcctgtggtctgcagcccgggcctggttctggtgactcctcacgtcgctcacgggccctcccttcagtgtggcagccttggagtgcttctgcccctcaggtctttgctgagagaaacgtgtgtttatttcagtgatgagaagacttggaacttgggtctgagtaatgcgaagctttcatattatgatgggatgatccaactgaactacagaggcggcacaccctataacaatgaaagacacacaccgagagctacgctcatcacctttctctgtgatcgagacgcgggagtgggcttccctgaatatcaggtaggaatgtttgttcctcatcgcgctccctgaggatactcatgcctgtggtgggcctttcatttaagcagagcttgtatcagtctgggtttccagccaaatcatcaccgtcattagatttgccagggtgcctgggcagtattagtattttaagctgtttatttagtgggttgtgcaccttaataacagcccacaagcctgtcagttttgggtacaaaacatacaaaagcataaaaaaaaatcctgaattaacccccacttagcagaggctaaattttcatcctgatttgttactggacagtcttctttttaataaaatgaagggagatgggcagactaagcttttcttcacagtttctcattgggaacattgctctcgtccttttttgaatcctggttttatgtcacgtgtctttctctttttgccatccctccgcgcatctgccgtggattaggaagaggataactccacctacaacttccggtggtacaccagctatgcctgcccggaggagcccctggaatgcgtagtgaccgacccctccacgctggagcagtacgacctctccaggtgaggcagagtcagctgctctgtttttggcctggtacagatgctgaggttgcaagtgttgctggtgagcgtgtgactgagctgatgatggggagtgatgctggctgtggggctgcaggaccaaggtggggcattttcagcagagtgaattctaataactgtctggtcgcctttgggatagcaaccagtcttggccacagcagagcctcggcctttagcttcatcatttaaaacaatgactgtcagtgcagaggcacgggggacagttaaggtccactgcatactgagttcagcgaaggtggagtgtaatcctggtgcgtcatgcgcccagacaagccaactcctggtagtgtgattggtggagcatgttttatttggtagctttacttccccaactacatagaaataaatgagactgaaatgtgtaagctctttaaaagcatatacattttgctttgaaattttagtctggcaaaatctgaaggtggccttggaggaaactggtatgccatggacaactcaggggaacatgtcacgtggaggaaatactacattaacgtgtgtcggcctctgaatccagtgccgggctgcaaccgatatgcatcggcttgccagatgaagtatgaaaaagatcaggtgaatctgttttcactgcttgtctcctttgccctcctaattccatgacttagtgggaggaggtggttattctgggacatccagatcaaaggcagcacagctgctcgagagaaaccctctgagtaggagtggggcctccatgtgaactcatctgcctcctgtaggagcagaagtgtgtcacacaggaatcattgttcacatggagaatgctgtgttgcagacttttgatcacacaaagggcagaggaagcaccgaatggttatgtctagcctgaattcaaaagtgtctttaggtgctttcagcagacacctgtgaaaaagagagttttgcttccaaaagctcttgtttctggattgattagggggaaaaaccgatttgggagagttgctgtggatgaaccagattcaagcacacgctctcattcgctgcagttcgtccctgggttgaatgcagtcaccgccagaacatttacccgtctcctgtggtcgttgtacgtggtgaatcttaaaagagatgtctctggacatctgtattggcttctgtaaaaatagcatgttgggaatgtacttttcttggtgtatgctaatggcagcttggaggtttttgaaaggaaggtggcaagtgtgctctggtggttaggaatcgagttcctggttgtgtttacctctgcacatgtgtgttctttactggagcaatgagttcagtgtatagtcagtcctctttattcacagattctgcatctgtgaacttgcctacttgagaacacgtgtaactccaaaatcaccacgcggaacactttctcagtcattgttggaacgagtgtagtggcccaatgtgcatagtacccgacaagcctgttcctggttgaagttgaacagggggacactctggcctcttgtttctgcctcaccctgagatgagcaggggatggagagggcgaggcagtgcagtgcaaaagctccagccctggggccagttggacggggtctgaattccaactctggcatctcaactcagagatgctccagagctggaacttccgcgctgcactgcctggtaaggtctccctaagagaagtttcttgcctagaattcacactaaagccttttcaaacatgacttactcccttgtgttcggaaagtttagcggggcagccttaggtgagccacttaacactccttaacctcgtttttccttctgtaaaataaagagagtagaatctgtcagcatgagttgtcttgggatttcagatttataatctgtgtgtaataggtttgtttgcctgatgtgcggccagtcagtacgctgagacattggggattacagccgagaaagagtttaattgtagggcaggcgaatgaggagatgagaagaaacctcaaattcacctccctaaggaatttgggttgagggacttaagggatttggagcgggccaaggtgtggggattgtttattggtagaagagtgcagggtgaagtcatcggatggggagatgaagaaactgcatttggttccctgtagggaggtcttcatagtggttagtgtcagccgttccaccggaattcaggatctgaagaacatcttacacgattattgaacgaaagccttatgattccaatgccagtgattctttctgtagcaataatggggatgtgactagtatctagtgctatgtgactttcagttacaggccagcatgcagcctgattggtgctcaattgcatgcctggaacgcagcatgcagttgttgttaactctttgaggatggtttcctattccatatgtaataaggggatttccccaggagcagtggttctgtattcaataattcattgtttgctgcagctttatagaatgtaaccaccaccaataacgaatcgactgtatcttcagggggaaaagcctaacaagactggttttcttgcagggctccttcactgaagtggtttccatcagtaacttgggaatggcaaagaccggcccggtggttgaggacagcggcagcctccttctggaatacgtgaatgggtcggcctgcaccaccagcgatggcagacagaccacatataccacgaggatccatctcgtctgctccaggggcaggctggtaaggcactgctgctggctggtgaccttcactgctgcattttttgactgagcgttgccttatgtgtctcttaacagcagcagtcttggggtgggtggcggagctaggccagtcttagttctgcttaaggtcagtgtgcggtatatatgttcacaggcagggagtgatttgtggtaccttcatggctgcgatttctgaagtgtaagcctcatcttttgctgcggagtttgaggctctggtgacatacactgtttcctggattttttttctgagtcgtacagacattatcttgcctcttagttcttgtgagttgaggatcgtggcagtggaacggggcttagagatagtttggtcctgtaggggccaagggaaagcttccctttcaccctttgaagtttccctgaaaatcagctgtcaacaggagaaaagacattaaaattttgacgtgcatagcaccggggaataaatagcaggagaaagatgacccagtagcctaatgcaacacagaaggttatgtaccctatttcacaggggagagggagataggggatgtagacagttcttttgacggggcagcaaatgattatttgggagaaagaatggacagaaattaacttgcaaatgattctctttggagcctgaatgaggaaggcattatcttgtgcacaagtctgtccaggtgtgattgctgtcctcagtcttcttttgtgggatagataatgagatttccgagtttcttttggaaagaagccttcttggtcaggtaaggaaattccagagaaagtctctccctgtgcttgagggtggaggtaacaaggcacggttcaaaggatgaccttgattctcaggcagcttctcagcatgtcaaagcactgatccttggggtattgctttctgagccccagcagtccaaaccacaaagaccacagataggaatctgaggcttggtatagctcaggcctgtgggtgaacgatgagggctgtatgtgtaatacaaaacaggaataagaaattaaggctgagggctgggcacagtggttcagatctaacccagcactgtggaaggccaacatgggaagatcactcacttgaggacaggaattggtgaccagcctaggcaacatagtgagaccccatctacaaaaaatttaaaaaaaaatttagccaagtgtggtggctcatgcctgtagtcccagttactctggaggctgaggcaggaggattccttgagcccaggaggttgaggattcagtgagccatgattgcactgcagcctgggagacaaagcgagcccctgtctcaaaaaaaaaaaattgggaggcagaggtaggaggattgtttgagcccaggagtctcagactagcctgggcaacttagtgagaccccatctctacaaaaaattagccaagtgtggtgatgtgcacctgtagtcctggctacttgggaggctgaggtgggaggatcacttgagcccaggaggcagagattgcagtgagctgaggatgtgctactatactgcagccccttggcaacagagcaagatcctgtttcaaaatagtaatcatataaacaacttcagcaaagtctcaggatacaaaatcaaggtgcaaaaatcacaagcattcctatacaccattaacagacaaagagagccaaatcatgagtgaactcccattcacaattgctacagagagaataaaatacctaggaatccaacttacaagggatgtgaagaacctcttcaaggagaactacaaaccactgctcaaggaaataaaagaggacacaaacaaatggaagaatattccatgctcatggataggaagaatcagtgtcatgaaaatggccatactgcccaaagtaatttgtagattcaataccatccccatcaagctaccaatggttttcttcacagaattggaaaaaactactttaaagttcatatggaaccaaaaaagagcccacattgccaagacaatcctaagcaaaaagaacaaagctggaggcatcatgctacctgacttcaaactatgctacaaggctacaataaccaaaacagcatggtactggtgcaaaacagatatatagaccaatggaaccgaacagagtcctcagaaataacaccacacatctacaaccatctgatctttgacaaacctgacaaaaacaagaaatggggaaaggattccctatttaataaatggtgctgggaaaactggctagccatatgtagaaagctgaaactggatcccttccttacacctgagacaaaattaattcaagatggattaaagacttaaatgttagacctaaaaccataaaaaccctagaagaaaacctaagcaataccattcaggacataagcatgggcaaggacttcatgactaaaacaccaaaagcaatggcaacaaaagccagaatagacaaatgggatctaattaaactaaagaccttctgcacggcaaaagaagcatggatgaagctggaaaccgtcattctcagcaaactatcataaggacagaaaaccaaacactgcatgttctcacttataggtgggaattgaacaaggagatcacttggacacacggtggggaacatcacacaccagggcctgttgggggctgggggggagggatagcattaggagaaatacctaaattaaatgatgagttgatgggtgcagcaaaccaacatggcacatgtatacctatgtatcaaacctgcatgttgtgcacatgtaccctagaacttaacatataataaaaaaaggtattaaaaataataataataaaatgaattaaggctaggaggtagaggaggtgagtgggattgatgttggccctgagttccttagccaggggacaacagcagactgtgtggagtttgctctgctcttctctccatggaaatgctttggggccattttatacagtcccaattgcttctgttttttaattggggtaaaatatatataacattaaactgaccattctgactgtctttgggttacatatattatacacatctctggtgtcctgtatttatcaccagtatccatgtccaggacttttacagggtcttgctgtgtcacccaggctagcgtgtagtgggtgtaatcattgctcactgaatcactgcagcctcgacttcctgggctcaagtgaccctgtcacctcagcctcctgagtagctggaactacaggtggagttacctgtagttatcaaaatggtttttaaattttttgaagagatggggggtctgtctatgtggcccaagctggtcttagaactcctaggttcaagcagtcctcctgcctcagcttcctaaagtgctgggattataggtatgagccaccatacacagcctagaagttttttgatggtctcaaatctaatttggaaaggagagctttatttctcataaagatttgcagcctgcagggtggccatttctgacaggctgggaagtgtagcctcaggccagaagccagaaacaagcgctgggagggaggaagactaagacacgaatggatgctgaacaggttagtcaagtatacatattcagcaggttacaggagcagctatgcatattcacgaagggatggcacacacatgcgtggtaggcaacatgtatgcagcatgtgtccccatgttcattttgggttgaagacataacatttaaatatattacagttgggccctgtatgtcgaaaggtgaagcagaggacatgaaggccctctgtgtgcagcctccttagaaggccaggaccacctgggagttgtggtctcttatcagcagggaatgctggtcgattgttgtgttgtcagaaccacaaaaagggatggacgttgtcaggtggtaggttgataccagcagcagagtctttcaaaagggtcggcttctgtttagcacttagggaagaaagcctagtggttaacgaggaaaggggtgtaatggggtatgtctcacctcccaccccgtcatggacaggaatgcaatttttaagtttctctggagtccccttggctaagagtggggtgtgttcagtcagttatggggcttaggattttattttcatttcttattacctgtagttttaggtttataccagggtcatgtgtttttgagaaattatcaaatggttaggagagtggagagactggaagccatgttcattatcaactaaattattaacaatcccttgttaagggtgtgtggcagcttcctcaagccccactgaaatgagccagcaggatgcgttctttccctgcagtggcccagtggacgctgcgtcactcacctgcctggtctgctttgtcattggctaacactctttttcctgagagacacttcctttagagttgaagatctcggtgatcagggaatgaatgacgggcaggctgagcttggcccatgctctctgcgggaggtgttctacccaggttgtacacactctccttgggttcacctgagcttgggccgcccacttcttctctcagtctcaggaaggatccaggtttggtgttccacggggagatgcctaggttgcccagttcagcctgctggtctgtttttgggcacgtctgtgcattccctgcctgtggactgccccctccttctctggtttcttgttgccattgagacactgggtagttccagaaagttcttggacccttggttttccagcttttctgtgataccatatttagtttacagggtagcttcacattgttgtcgtgtctctcagcactcatatagggcctgcagcacaggaaatacactcactgaaggaagaaagggccgctctcccaggggtttgcagtcacagaactttcacaggctaaagctcagtccctttcacaagcacattgtgaagtggaaggagcaggtgtgtttttattctactgctagtgttgctgaggcctggagtgggtgggggctttcaagggtagagagcccttgacggccaagggtgtggactcagtgttagtggctgttgttcctgaacccgtgaccctgggcaggtgtcttaacttccttgtgcctcagttttctcatttgtaggctgtgtttgtgggtcactgtgaggcgcagttgagaaatactaacaaaactcatagtgcagtcctggtgtgtgataaacactccctgatcggcagctaccattgcctgtgtggtggtggtgctctcacaaagctaatggctctttgggggagctttttatggaaacatacacaccgaagggcacacagatgataacgtgacacagctgggtgagtgtccataaactacacatcaagaaagaacatgcttccccctaggagccctcctgtgccctcttcctgccactgctgagcatcctcctgacctctgacagcgcaggccattgttgcccaatcctgagctgatgtcagtgaatcctacgtaccgttgcctttgtgtatggcttcttgcattcaactttttgtgtagggtacttttcagaaccttgagctcagacctaggtttggatctgaattctaccatttactgctggcacgatttctatatttctgaatatccaagcgtaggagattattttgtcttcatagggagaatgagaacattaaattctaattaggtaatgcacattaagtgcctagcttattggctgactcataataaacatctagcagattttggctatttttatgtctcaggcgagtattcttttggttctatcaagttccatgttactgtattgacttttaccctggatttgcccattcagaacagccaccccatcttttctctcaactgggagtgtgtggtcagtttcctgtggaacacagaggctgcctgtcccattcagacaacgacggatacagaccaggtacgtgtgctttcacctggccctcgtgctgagctgcctgctggacatcctcaactcaccccagtgttccagctctgaaccgacccctgccccttctttctgaatcagttactatgttgcattgacaatgggtgtctgcaggtcacccagagttcctctccactccgcagctcccagctcctgggataagaaccaggtccctcagtcttactctctgctcactgtagtttccttccttttgtttccattcctttgtgccttccatgtggcagtggtatcctggtgggctctggggcttctgcaccaccggcagatgtctgactagtcgatacgtcactccacacctaaaccatctcagtgcctgtcccctagagggtagagcccgtatgttttaatgtgaccctatccatagagcacagcctgcaggtgttaatgtgatcctgtctatagggtaaggcctgtgtgtctctcacctgtgcataggccagagcccacaggtgttaatgtgatcctgtctatagggtgaggcttgtgtgtctcaccgtggccctgtgtgtagggcaaagcccacaggtgttaatatgatcctttctatagggtgaggcctgtgtgtctcaccgtggccctgtgcatagtgcagagcccacaggtgttaatgtgccacttgagtctctcagtgcctactggctcctcccgccttctgcccgggtccatgccctccacttgttgagtgcaccctgcagggcatagtagtaagctgctcagtgacgttctctctgacctccccaaggtagtgagttgttttcacagcaccgtgtatatttctttatggtgggacctgtttgccttcccacttcctgttctaagctacactgcagactctggcagcagagaccaaggcttttccaaaccaacggccccagcacagggtcctggctttgtaactgctcagtgagggcaggatgccaggcaccctgttcatggacaatgtttctggggctgtggccaccgtctccttccctgcattcagtggacagagggaggcccagggcaaagttaaatatggagaggagaggatatcatttgacagtcacctggtcatacttcccatgattaccttaagggaataattgagacagaaaacagaacatgagatttcttaagatgtttattttctttaagaaactaatttatgagtcttatatttcctctccaactttagggagtagcaatagtcttcttagggaaatgcagtagccttaacagcttccaggtgagtgtaatttctgagtctgggctcacacttggtatacttcagggtggtgtatttgaagaggctacatgtagggctacatttttgatagggattttgaaagtaaatggagaaacagttttgtcaggtgcatacttgcaggtttctggaggtgctgtatgtatgttatgttcctgtggaattggtttgaatgcgcccctttttccccattttgtttcctgtaggcttgctctataagggatcccaacagtggatttgtgtttaatcttaatccgctaaacagttcgcaaggatataacgtctctggcattgggaagatttttatggtaagagcgatatgatgcatttccagtttgctttgaaacagggggagagtgcattattgaagtcacctgcacgtggtgatatgagagaattgcccaggccactgtggtggcagctcttactcagaaggagatgggaaaatccagatttaagggaaagatgaagtaaaaccatttaccaccattctggcacagttcagacgtgaagactgttattcttcaaataataagttgttctctttaaggaaacactttctaaaggtagtgctgaagcctgtactcattgtccattggtctctccttactgtatcttcacaccagagagcataattgacttcatttttacaactataatataataatttttaatggaataacaaatttaagaaatgtagggtaccactttatatttacttgtaattaacatgatttcaatgatacatactttctcataattgaaaatattataacattatgacttctgtgtcttccctctcttatatatggtacattattacatgcagtagatcttacacatttatagatacggggatgtatgaatttaaatgatgtatagatactaaaccttaaaggcagtttatagatactgccctttggacttatgtactaactgtactaacatgccagaaagtggaaagttggcaagttaactaacaaataagaaatgtttaacctagtgggatttggagttgctagggttcttgtctgtggtgagatacgaggcataaatttgtttgtatggctcttaccgtctgacctgcagtttaatgtctgcggcacaatgcctgtctgtgggaccatcctgggaaaacctgcttctggctgtgaggcagaaacccaaactgaagagctcaagaattggaagccagcaaggccagtcggaattgagaaaagcctccagctgtccacagagggcttcatcactctgacctacaaagggcctctctctgccaaaggtgagctcagagccatgttgttttgtagctaaaaagggccctggtggctctgtggctggccatgcaccttcctgagtgtaggatgtgcacatcccccgccaccatgggctgtgctgtccaccttgctgcaggagccatcacggtggtcttcctgcgtttgacctcgcagaatacaggggtcccgttatccgtggcttcacttttgtggtatcacatggtccgaaaataataaggtattttgtgagaaagaatgagagaaaccacattcacgtaactgtcattacagatattgttacagttgttctgttttattgttgatctcttgctgtgcctagcttacaaattgagcttcatcctctgtatgtgtgtataggaaacagcatagtatatatagggttctcaatttcaggcattcactgtgggtctcggaacatatccccccgcagataaggggggctgctgtagcctgtattcaacacagcagtcagagtgatgtttctgaaacatcacatcatatcacttcccagctcagagccctcggaggctctgcactgtacctagagtagaagccagtgtccacagtacggccatgggacgcccgtgggggctctctgagatgatcaccccctgctgctcttcccgcttggcccgctggcctccctgtttctgatataaacaaagtgcactgtctcccaccctcccctcttgaatctttgtacttgctcctcgctctgcaaccagcacagctgcaggcaggggttttcgtctgcttcattcattccgatacatggtaggaacttagtatttgttcaataagccaacgaattagagttacattgtcttctaatgcttggattggtaaactcgtgggatttaaatattttctggaagagtaggaatgccaggatgttaggcttatggtagaaacctgtcataacataggccgctgttgcagtgtgtaaagctgtcatcacataggccaccattgcagtgagtgtgtaaacctgtcataacacaggccaccgttgcagtgagtgtgtaaacctgtcatcacataggccaccattggagcgagtgtgtaaacctgtcataacacaggccaccgttgcagtgagtgtgtaaacctgtcatcacataggccaccattggagcgagtgtgtaaacctgtcataacacaggccaccgttgcagtgtgtaaacctgttgtaacacaggccactgttgcagtgagtgtgtaaacctgtcataggccactgttgtagcgagtgtgaccactttgttcatgtcgagtccctcgatacacacttggtgccctggtgtcattgctcccacgaacggctgtgaagcttgttgccagtggcagccttgtcctgttgctgcactgtgcttgtgggctgcgccatgaatactgttctgtctcttaaaatctgggccttcttgctttacaggtaccgctgatgcttttatcgtccgctttgtttgcaatgatgatgtttactcagggcccctcaaattcctgcatcaagatatcgactctgggcaagggatccgaaacacttactttgagtttgaaaccgcgttggcctgtgttccttctccagtggactgccaagtcaccggtaaggccgtgcggcctaagaactgagaggccggtcaagagtcagtgtgtgtgtgagtggatatgaaggtgtgtttctgtgtgtatgtatatttgtgtgtgtgtggtgtgtatgcttggttatgcaggcagcgtgacatttctgttatatattctctttgaatgatgcctagagttgtaatgtttttcttgaagagaatctgactatatagttaatggttttaagctatcttttgggatcagatacatcttaagaacagagaagaaaatgcagaggaaacacatttcacatgtactgtcagagcttcttatttgagggtgaaaaaaaaagaaaaagatgttaaactccctaagctgtgccctggaagctgacagtgtatacaggagaccttgacctctgggattgaccctgcctgctctgcaacagtggtacttccttgtcaagggcagtgggggtttggcttttttctttaaagagtctttagggactcactatgttgcccaggctggccttgaactcctggtcctaagtgatcctcctgcctcagcctccaaagtagctgactacaggcgcatgccaccaggcccggctgtgaagggcagttttgagggacagagtgggtgtgttttgtaggcaaagcctctcagcctcccgtggatttccttatcctcacagttaggaatgccaggttcacgcctcctcagggcttatttagggtgaaaggcagttcttgagtgctcacaaggaggcagagttctccagcgtggttttttgttgtgtttcagacctggctggaaatgagtacgacctgactggcctaagcacagtcaggaaaccttggacggctgttgacacctctgtcgatgggagaaagaggactttctatttgagcgtttgcaatcctctcccttacattcctggatgccagggtgagttctccttggtctcttgattggcgtctgttcattttattagagcatttgactcaaggtcatcgccttcctcatgcccaaaccacttattctgttcttccaggcagcgcagtggggtcttgcttagtgtcagaaggcaatagctggaatctgggtgtggtgcagatgagtccccaagccgcggcgaatggatctttgagcatcatgtatgtcaacggtgacaagtgtgggaaccagcgcttctccaccaggatcacgtttgagtgtgctcagatatcggtgtgtgttcagaccagcaatgagatgttgtccccgggtgactccatttcccatttcccttgaacctctgaatcttctatcttgtttaaaacttgcctgtgttttcgtggagtttcagccattgctagggtttgacgagaatgcactcatttcttcaggtcttaaatgtttaataaatgttacgtagtttgcacatggaggtcaaagattgggtactaactgtggctatcatttatttaatttttttttttttttttttttttgagatggagtcttactctgtcacccaggctggagtgcagtggtgcaatcttggctcactgcaacctccgccccccaggttcaagtgattctcctgcctcagcctcccgagtagctgggattacaggcacctgccaccacgcccagctaacttttgtatttttagtagagacggggtttcaccatcttggccaggctgatcttgaactcctgaacttgtgatccacccgtctcggcctcccaaagtgctgagattacaggtgtgagccaccgtgcccggccccatttgattaatttttaaaataaacaggaaacaaatcaggctgctgatttatattacagggctcaccagcatttcagcttcaggatggttgtgagtacgtgtttatctggagaactgtggaagcctgtcccgttgtcagagtggaaggtaggactgggcctgtccctacaagtcattttaaatgtatagagtagcagacgttctgaacgatgccttagatatgagaccgtgtgataacagccatagctggggtcatgagacacacgctagggggaggataatttcttttccttgagcttttttttttactgaagcatattgctaatttcacgagtgacattttccttgtgtgcctggattgatgggattttggcgtctgatgcttgaagacactaatgtggggtttggttttgtgttgtttgatgaagcaagtctttattcggggacctagactttcctagaaagctgtttgccaggcgatttgtattatatataaacaaaatcatgtggaaatggcttttaatgcccatttatagctggtatttacctaaccaaaaattgtaaaagtttttttttttttttttgagaccgagttttgctctgttgccaggctggagtgtaatggcgccatctcggctcactgcaacctctgcctcttgggttcaagtgattctcctgcctcagcctcctgagtagctgggactacagggtgcctgccaccatgcccagctaatttttgtatttttagtagagacggggtttcaccatgttggccaggatggtctagatctcttgacctagtaatccacccgcctcagcctcccaaagtgctgggattacaggcgtgagccactgcgcccggccatttgtaaagctttttgcttgaaaatgtgaatgcgtgtgtggttgcagttgcccttcacttcttccatgttcttgaaggggacaactgtgaggtgaaagacccaaggcatggcaacttgtatgacctgaagcccctgggcctcaacgacaccatcgtgagcgctggcgaatacacttattacttccgggtctgtgggaagctttcctcagacgtctgccccacaagtgacaagtccaaggtggtctcctcatgtcaggaaaagcgggaaccgcagggatttcacaaagtggcaggtaccattgtttgtcgttttccttttgttgcaaaggaatggaattaaaatattaaaatattttgctgaagatgaattttcccttgagtcagaaacatgagtgttctactgtaaaaaaaaaaaaaagcatattaatgatatttcggattttgcttgattttcttaaacagagtacatactgaaggatgttggtagagcatgtctattttattcttagttagccatgccagttactgactctaaggtcatatttctcttctttattacaacgttgggacacagtgagctagccagtgttggatgttctggggtagtacttgatagcattgagtcacagggaatgcatttagtacgaggtttggctgtagaaattacagggcacgctgttggtcattcatgctgtttcagcagttgggcaagatttaaatacatttaggaacttgtaaaaatgaagtcaaagtagctggtggtgagtacgtggacagccctcaggcacagtggagaaagtgacattcccttaggtgatgaggctaaggaatgcctcatgtcatcatacacgggtcagtctgtgacgttgcagcagccttggacaaggggaagcctgattttattcccaaagtgtaatgtgacaggagtgcatggtatggtgctgggaggccagggatactttgtctcacactcttcagggtgtgtggtgtcacatgtcttaggctaagtttgacagcctagggacccgaaccaaaccttgtttaatgttctccttctttacaggtctcctgactcagaagctaacttatgaaaatggcttgttaaaaatgaacttcacggggggggacacttgccataaggtttatcagcgctccacagccatcttcttctactgtgaccgcggcacccagcgggtgagcatgtaccgacggccctcagcggggtcttctccccaccctcaggctgctgggatcatattagaaagaatctgtcctcagatctcatcaaatctcctggttaactgagtttaaaataaccatttacagaaaatatgttgaaactttcatcagttagtattgattttcatgaacgtaaccattctttactattttcattcttaaaactcaaagtataaactaaagttttgcattctcacttttatatatgtgcctcttaacttttttagccagtatttctaaaggagacttcagattgttcctacttgtttgagtggcgaacgcagtatgcctgcccacctttcgatctgactgaatgttcattcaagtaagtccatggatgtgttgtctcttttggacagactaacttggtatgattttgctttaataattagtggtcttgggtgcaggggattagattagtcagttaatttacctaggactcggtttgctcatattaaaatgaggagtcgggctaggttaactctcagctccgtcaccacctggagctgctgtggtgactgcatggggaagggattggagctgaagcagagagtggacccctggcactcttgcgtgatccacatgtcagtgagcagagtgggccaggagcggtgtggtgacccctgcgatgaagggaggtcttcgttgcatgtgatcgtccacagagctgctctcaacagctttgccagatcgccctctggacacctggggtcccatccttagagattttggttttgtgggtctgcggttctgttttttggagggatgccctgtgttctgccgtgtgaaacacccagtatgagccacttgatcactgttgactttcctgggggaaagtgcaggtgattctgtttccttccggcctttgtcctgttgtgtcatcggttatttatgtaggtgaaatcatcatttaagttttaggaacgtatgtaaatgcaagcatttagtaatttatgttcagtgactttaaatcataattttagtaaccttaccttttccagttaacattttgtaaatattttcatgtgaaacaaatttgtttctcatttctactggatgggaaatgtcctcagtagatatccccagttcacttagcagttctctttctgccatgtgaggctgccttcagttttctgatatttatatacaaggaataaaattttgattttctttgcacataaagcatttttcctagagatatgtgtatgtgtgtgtgtgtgtgtgtgtgtgtgtgtgtgtatatatatatatatatatatatgtattttttttgagatggaatctcgctctgtcacccaggctgaagtgcagtggcgtgatcttgtctcactgcaacctcctcctccctggttcaagcaattctcctgtctcagcatccctagtagctgggattacagacaccaccatgcctggctaatttttgtggtgtttttttttttttttttaatgagacagagtcttgcactgtcgcccaggctggagtgcagtggcgtgatctcgactcactgcaacctccgcctcccgggttcaagtgactctcctgcctcagcctcccgagtagctgggattacaggcgcccgccaccacacctggcgaatttttttgtatttttagtagagatggggttccactatgttggccaggctggtctcgaactcttgacctcgtgattcgcccgccttggcctcccaaagtgctgggattacaagtgtgagccactgagccagcctattttttgtatttttagtagagacagggtttcaccatgttggccaggctggtcttgaactgctgactgcaggtcatcctccgtctgccttggcctcccaaagtgctgggattataggtgtgagccactgcgcccggccttcctaaagatatttttatgctaagtttttaaaagtagaattaaatcagaggagaattttataatctcataataaaagttaatatatgtctattgtaattgagagtccaaaaatattaatagatgaaattacccaccctcacctctccctccccaacccctagcttcactccactttttactgtttcttcttgtggttctttttggaaccttctataactctaaacctctgtttgtcagcttctaatggtgtctgttgactctcttttaaaagatgaaagctgtcctcacctgtgctgttctcctctcctctttcctctgccttggctttgttagttctatttctgtttcttctgttgactacttttagagcatttggtgatattcactaagctctgttcttgtcccatcaccttcaggcagctttcccttcctgccacctgcccctggtttgggcactcctcctctcgtgcgtgcagtactgcagctgccactccgaggtctccttgccatgtcccttgtcacacgtttggttagtcccacacagtaattagaatgatcctcttgagatataagtcccaccatgtcgctcttgctgaaaccttcaatgcagtgagcgcccatctcattgggacctacaggctgaagttcttcctctgatggacatgacccccgtgttgtctctaataacctcactttcactctgttccagccacacggggtttctgtctttctcgggtcatgtcgggcttatgtgcctcgggccctttgctcatgctgttctctgcctgggatgcgctttactgggtgccaggatggtcagtgattccatttctctcagagtctattcacaggtccccttctcggtcacgccttctctggctccactgtctaaaatttcaacagctgcctctgccccccgaacttcatatcccccttatctgccttttttccttcagctcttacttccatcaaatacagtatgtatttttaaaagtcttatcttgttcacggtcattttcttccacaggtaattttggtaaactttgtaagattgatgatgtttaatactgttttgtttaatacagtacccccagtttagcacacagcttttgaatgaatgaccagtttttattcccctctgaagcgctaagagctgccgctgaggtggcatctgtagctgctcccgttcctgctccgtggtggcagagtgtgtgtctcactcactgttaatattgctcctggcatggggttggttcccagttactgtctgtatttgggatttgtgtagttagtgaacctttagcctgtgcagaaaggtcagcaagcccattttaatttcagaatttcagtaactgctggcggccttggttttaaacaacaggtggcgtgcggctgccccgggcatggcccctgctgtgtgtgctcctagcatcttggctgcttacctttgtcaccagcaagttccacttctcagtggcctgagcacagacggcacgcactttgcagacttgagtttttctgttaaaatttaaatttttttttaagtgagcctaatagtttcctgaactattatgttcagggaagttatgttgttgctgattctgatggggtgtgtgtgtgtgtgtgtgtgtgtgtgtgtgtgtgtgtgtgtgacagagacagagagaagtcgagtctaaagttctgtcaggcttagactatgcctgaatacttgaacgtttctagacagtgcccaatgtttaaagagaatacgaccaagcctaactaactgcgggttttcttcttttcagagatggggctggcaactccttcgacctctcgtccctgtcaaggtacagtgacaactgggaagccatcactgggacgggggacccggagcactacctcatcaatgtctgcaagtctctggccccgcaggctggcactggtgagagagggcctcctcgtggggtggtgtttgcagtgagtgtatcacaggccagcactggtgagagggggcctcctcgtggggtggtggttgtagtgagtgtatcacaggctggcactggtgagagagggcctcctcgtggggtggtgtttgctgtgagtgtatcacaggccagcactggtgagagaggtcctcctcgtggggtggtggttgtagtgagtgtatcgaaggctggcactggtgagagaggacctcctcatggggtggtggttgcaatgaatgtattgaaagctggcactggtgagagagggcctcctcgtgggatggtgtttgcagtgagtgtattgaaggctggcactggtgagagagggcctcttcatggggtggtggcttgtcatgagtttatcagggaagatcaagtaggatggggattctttggaggcgctttactctctgcagcatggacgtggttcggccgagaaacagcaggacgaagaatgatttaagggtgttaacagttgatccctagtatggcccagggtaaatcagtgctgaggactgctgggaacatgataaccctttctgaacatgaggagatgaagatataatagatagaaataatagccatggtgaggaatccttcttagcaggtagaagatggggggtgtgacgtggaggtcttggtgtgtgcctgcgtatgttgagagttgtatggtcggtccttttgtgatgcagggacagctcactcaaacctgcggtggttggctgagactggatgtcagctgtacatgggaaaccaagggcacctccagggatcttggtaccactcatggcccctcggaaccctgaagatgaaactcatcccatgttcgtggagtttcatacagccccacctgcatcttgggtggctcacctcaaaggcggtgtggttatttttagctgcagaaggtggttccatcctctgtgtggtttgaggctgtggttccacttccccttgctgcgttgtgctgtgcagacttcgacagtggctgtacccctgtggcatgggactagttcttcacccagggcacatggcacaggcattttagggactgggaaacaggcagaattcttggtagcttcttgaataaagaaggtgcatggacgtaggccatttaaaatgttcctctgtcttaatttgggaatataaccttcatcctatatggggttcagaaagaatttcgactgctacagcctagctattcctctacactcacgcccgcctgccccagtccatctgtgacaaaacagcatgtaagtgagtgagaactaacgtgatgtcattgtcatctgacttatgtgaaagaaatagcaggtattttgaagtgactcttagaaagcgtatgaagttctgcagcgtgtgtgacatttattgcctgatgaagttctgttctagcctggggagtcactaaaggcaactctttcttgtgtctggtgctgcagagccgtgccctccagaagcagccgcgtgtctgctgggtggctccaagcccgtgaacctcggcagggtaagggacggacctcagtggagagatggcataattgtcctgaaatacgttgatggcgacttatgtccagatgggattcggaaaaagtcaaccaccatccgattcacctgcagcgagagccaagtggtaagggactgttcctgcaccttctgctgttgcagctttgggaattgagcccatgtgcagggcggtgagccgcacgtcctcatctgccttgggatgcgagttctagagcctgggatgatgcgcccttaccagaggttgggggaacagcgtcgccgcggcctgcaatctggggaaccctcgtgctgtctggctccttagaagcttgcctggcagttcccgactcagaattggttctcttcagagtttgactcagacccctaaaggctgtggaggagattgttgtttgactacatgcccttttgtcttcacggcggcagcttgggaagcacgagaaggttggctgggcccgggtcacaggtagcgctgccacttcccagccacataacttggttaattactcaggtagtctgccctgctcagccgttcataacatgaggcatacttgtcctgcccattgcagggtttcgagagaagaggtaggaagtgccaggtgtcatttctgacacacgggagatgcacagtcagtgagcatgagtgcctgtgatcagttcttcccttacttgtttggcatgcacgtaagcaggtgtcgactgcatacaggtttttctgtgtgtgagattgtggtgagccccagtgctagcgtgcatgacgagctcggtggctgagttgggcattaactcgggcaagaccagctcgctgggtgtcagggtggctcgccccatgctctccagcggtgggcagcagtggtaggggagcttgggatggggggctccaggagcttcaggcctgccctcttgcctggagcggcagggaagtttcctcttgggaagattgtgcagaggcttagtccagactcatgagctgctggggcctctgagcattctcctctgtgacctgagaggctcatggccgaggacaaaagggctgccccacatgtggggggcaaaggtgagagggtgtgtggggcccctgtgcccagggcccagaaggctgggagggaagggtgaaggggtgtgtggggttccccatgtccagagcccaggaggctgggagggaaggatgagggtggtgtgtgggggcctctgtgccccagacccaggaggctgggagggaaaggtgaagggtgtgtggaggccctgtgccccagacccaggaggctgggagggaagggtgggggtgtgtcgaggcccctgtgcccagggcccaggaggctgggagggaagggtgggggtgtgtcgaggcccctgtgcccagggcctgggaggctggactgcagcgtggcttatcagggtgcccagcaggaatcatggggtttacctgggaaggaaggtgctgctgaactcatcatgctaactctgcagtggacatgaagcgttttgagatgagcagagtaagccttggctggtgccagtgggaggatgcgtggaatgggctagttctcttggtatatctttttgttttgactgtgataatggattttacctcatttggtttttagaattttatcaatgatttacacatttgtgtctccctgtagcccttccagcatcctttgcacgcctgtccccaacccctgtcctgttcctcagcctgagggagcttcctggtcccctaagtgtgttgctgcctgtgggtgtttcacttacctgcaggggaagcccatggtggcagctcaggacacattctgaccctttgcttttcctaatctgcgcctcatcccacaggcacatggagacagaaatgtcacatgctgtggagtttttcagagaagcttccacttgtaagttgaaatcatgatagacatggagtttttgcgtgatcccttcaggacctgtctgtgctttgttgtagaactccaggcccatgttcatcagcgccgtggaggactgtgagtacacctttgcctggcccacagccacagcctgtcccatgaagagcaacgagcatgatgactgccaggtcaccaacccaagcacaggtgagaggtggtgccagtcgttaaccccagcgcaggtgagagacggtgcccccaccaaacccagctcatcaggggagagacccaaagagaagctatgggcagcaggcgccctgggcagaggtgtcatggtgtgtgggtgtgtttggcctttctctggatgggctgctgtgtgttctcctggctctccttcagtggaggagagaatgctcccacagagaatccatccctcctgtcactctcctggtgtgagaggtgctcctgactggggttactgacagtgtcagtccagcagctctaggctctccagggcaggttagagctagcccctggctgcctttcagcatcagtgtagtggattgccaggagtctctcacctgcccttgtgctgggcacccagaaaggcacaggcacagtccattggcagcaagaggtgtgctgggcaggctctccccatgcccaccagactcttagtggctgctgtggtatggcccagcagagggtgctgtgagccacgatcttttcagctaaggatgggacatctcatggatcaagggactgacagtctcatgatacagcctggctgttggtggaggatttaggacaggggtcgtggtgagaagtcagaagtcccgatgctgacataatctgtgtgtgagctcgccgatgatgagcctcccaagtctcagctccctggagtcactgtgtccccatcttcttccaccctacaggacacctgtttgatctgagctccttaagtggcagggcgggattcacagctgcttacagcgagaaggggttggtttacatgagcatctgtggggagaatgaaaactgccctcctggcgtgggtgagtgctgtggtctctcgtgtgttgtctgactctcccgtcctctggggttgtcctcagtctctttgcatgctaatggcaaaaaggatgagcagagccaggaagctgagacgcttttgtctcctgcagcagtcaccccatgtgggggacacatggtcatgtgatggaatgaacattcaatgtaaaacaatggttaaagccggattggacacttgaagttataagtgttggctatgaaattgatggtcctgacttgcgaaagttctcatcagaaaattggccatcgagtctgtgattgtgttttctccgcctttcccttgtggtgcaggggcctgctttggacagaccaggattagcgtgggcaaggccaacaagaggctgagatacgtggaccaggtcctgcagctggtgtacaaggatgggtccccttgtccctccaaatccggcctgagctataagagtgtgatcagtttcgtgtgcaggcctgaggccgggccaaccaataggcccatgctcatctccctggacaagcagacatgcactctcttcttctcctggcacacgccgctggcctgcgagcaagcggtgagttttcagatgggcacgggagaagtgcatgtccagtgcctggctgcacccgggccccttcgtcaggttcacttgcccactagtagatgcccagctgaactgtccactcctgatcaccccaataataaagttgactggaagtgcccagtgctatgtaatgaagcattttgacacctttctactttttttgttgttgttattcagcttttaaattcttatggatgacctagtggtgattaggaaaatttttttgtagactcaaagcagtctttcctacttaacagaccgaatgttccgtgaggaatggaagctctattgttgacttgtctccccttattcatcgcactggtggttatgaggcttatgatgagagtgaggatgatgcctccgataccaaccctgatttctacatcaatatttgtcagccactaaatcccatgcacggagtgccctgtcctgccggagccgctgtgtgcaaagttcctattgatggtccccccatagtaagtatgacaaatccaagggtggagataatttttgcaagacttttagtgataacctttgcgttgtttcttgccttcagtggggagttgctcaagcataaaaaaaatggagaaagtaagtgggactgtgtatgttctgggtccgctactggaagattaaaggtttgcacattgaactgttcgctgatgatggtagccagccagtctttgagcatgggaggtaacacgaatatgtgtgtagggactctacttgtcatgagcctcagggttgacccaaatcaagaagtttttaggtgaagtgacaggaaagcacattgccctagcctggtttctttgtgtgaaatgccttgtcttctgtagttaaaacgcttgcgaaatgcaaacagtttctttggcaaggagttataattaagggcaagagtacgtttgctaatagctaaatattttgccttaaaagctttggttttatgcattaaaaaattattttgtagagatgggagtattgctatgtcacccagccaggctggcctcaggctcctggccttaagtgatcctcctgaagttctgggattacaggcatgagccacagtgcctggcttactagcatgttttaatagaaatttggatctttaaaaattgtctccatgagttatattcatattttgtcaaatccttggtatgttttaatatttgaatgtatctcacaagtcgtctgtatttctgtctgtatcatctattatgctttaaagatggatcctcttgtaacatatctagatgtcctttagaaagatggccattatatgtggcagtgatatggggagatgtcaggagtgtgtaaggagatcggccacagcctgaattagcacagctccagctctgtgtgagatggaggcctggacaagctgagtctccccaggaagctctttggtagcgtcctttctgacagcgcagaccggggatcctcgatcgggaatcattgcctggccacccattgtcaaatgttaaaagatgtagaaagttatttaactggagaaggtgtggtgccacgtggtctgaacgtgccccacagtggtgaatgaagagcactgtagctgagaacaaaatcatggggaagctgcttatacacacactcacacccacatgcacacacacgtgcatgcacacacacattcatcacatacacagttcctggccattcacctttatttactttttaaaaataaaaaaagagttttttgttttttttctcataatactcagactggtcttttatttatttgtttattcactcaaaaatatctcttgggcagccgctgtgtgccaggtgctgtgctaagcaatgaaaatgaacagtgaacacctcctgtcccctctcccaaggacatagccagtggttactgctgggccacgtcagtgggcagtcccggggcagcactgggcagtgagggtggcaggtcagcatggaggttccggccttcccctgtcaggtggtgggaggaccgtgtagcatccttagaggtttttcaggttccgggcttccctcatcagctgatgggaggactctgtagtctccttgatgtgactggagagattcctattgcttaggatctttgaaaattgaagatacctagaaatagaaccaaccttagaactaacgttaggatcaaaacgataaccactgacatacggaggttacacagcatctgtcaagccttccaactggagttggtataaacccagtttctttagatgctgctcattctcagaacctatgaggtctggtttttgcaattctgtatcaattcttaattccactaaccttgggaatggttaatttcctgaaatactgtttgccctcgctctttgtttaggatatcggccgggtagcaggaccaccaatactcaatccaatagcaaatgagatttacttgaattttgaaagcagtactccttgcttagcggacaagcatttcaactacacctcgctcatcgcgtttcactgtaagagaggtgtgagcatggtaagtgtgggcctgtgacgatctagatgctcaactgcgggttagtgagccaaggctagacaaccagaaagtgcgtgtcaggtccaaggatactcttattcaaaatgtctgccttgggtaagatggtacgctagtagtgtgtctgaataatttaaaccactgattgagggctgagtgagctcccccgcagttaacagcatatagaaacttgctgtaatttaaaaacatagaacacaagtatagaaatgacattcagctttgactgctgatgcataaaagtgtcataacttttgtttttactttaacaattactgattttattctaactgggaagtcagaaagacatttgggcagctatagtcactcaggacatagcccagaagttaacaagtaacaaaagacccctggaatcagaatagctacaacaaagtggcaccttttacttataatgaggtattgacttccattttatgtgcattaaaaaaagaataccagcttccattataatgagttcggtattggttatagtctttgaggacgttttcttttgatccctgctctgtgagataaattggtagattatggcccctattccacagggactcagagtagctctgcaggggcagagccaggtcccagctactgcacaggggaacagctctttgctccagggacacagcaccacagcctgtcgtctgtgcttctgaaatctctgaagctctgaaaacttggggctcctttgacatgaatggactgaggctatttatggtgtggatttgtcccacctaatgtggatattgatacatctagctgcagaaatattaatatgtttgatcacaggatctgggggtgtgagaattgcctcttaaaatcctaataaagatgttggattccaaggctcatctgacccctaggagttcaggtgatggattaggatctgttgggtgtcttgtaattctgataaagacatccttctgatgtttgggcctggagcaggtttgtaaagggactgttagacatgggtgtgctgacagtgacagaaagtgacctggcagccgcctgaccagtgagagagacagtatttgagaaggaggaggaaacagtcctgctgtttggggctactccacaggggcccagagcacctcaaagcccttggatgtgttcatgaatcttagagtgtagtgacagtcctagttagtaaggaaaggcagagctgtattcagtccacccattgcatctgtttataagcgtattggcatatttttataggggtgtctgggtgtgcctctgtagatgcacacagcatggggcaacgtggattttgccttgcggggggcttctgcattaagttcttcgttctttaaaggacagtcttcacttctaagacccacctcatcatgagtgatgctttgttatctacaccaccagctaaagagtgtggaactatgccttgctttgactctgctgccaacgtgacaaatcgaattagctaatgtgattttagttaattctcagcagctgcacattgagggtgattagtgtttacttgattttagaaatgaagcatcttatgctgaatgtgtgttctagcgttccagaaagatttttagaagatttttcttccccagcagttttcattttcaatggaagtacttttaccactgaatcatagggaaaaagatgcttaacattaattacaaatggaattcctgagagctgcctcatctttttttgttgctgttgaatgagggagggaataaataaagtgattctacaatacttggcctatggaatatctggccatgtggcatcttgccccttgaataaatgtctcccgtgtctagagacagtagattggagcacttgtgaggcagggtctcagtttcacagacctctctcatgacatataagccctccccctttcttcctttgaacccgtagcacagaacattgaggctttctctctaagtagaagacaagacctggattcagccagggagctcacaggatgtgtagggggcaagggcagggtgatgtctgtgccttgaagatggcattgggtctttcagctgctgttgtctagcatcccttccctctgagaggccgctgtgggttatgcacagcccctgtagggacgtggtgtgtcactgctatctatccctatgccatggggtttttaagacccgtgctcttcctggcaacagggaacgcctaagctgttaaggaccagcgagtgcgactttgtgttcgaatgggagactcctgtcgtctgtcctgatgaagtgaggatggatggctgtaccctgacagatgagcagctcctctacagcttcaacttgtccagcctttccacgagcacctttaaggtaatgcgttcaccctgggcgttgctggtgcaggtgtaccaggtgccaggtgctgtgaggctgctgggagtgttttggataatgtggtacctgtgagctgagagggtgtatgtggccactgggcagcatcttggtgctctcgtagggcatgccaggtctcaggaaggttcttggattgcgtggccaactcagcgcagctgacacttgcgttgtacctcatggctctgcacttaacgctttttgatgataagtaacctcatgaggcgggtagtgggaccctttgtatcagacagagggcaggtggggcagcccggagacatgaatgtaaggtatccatggggacagggccagctcctgggtggctgaaatctacagggatttaattcctccaacctggttgaagatgatcaaggcagttgtttgctgattgtggcagctttgggaagagggaggtaggaggtgccctggaattgagaggcacttgggcatgtgcctccatgccatgccagagccctggcgtgtgctgattctttgggctgctggtcttactgatgtggtgtcgtggtcactggtgcctgggggcccctgactccctaagcctagatatctagatgttaccatgccagtgcctggactggggtacggaaccccagcacctgctgtggcacggcggctggtgagtgatgagcctggagttttgggcccaggtgtcaacaccctggctcctgtgatggagccctctgcctgggtacaggtcctcccgacaggtgtgcagtaggtgtgagccttctgggcgctgggtgggccaggagagtcaggtccatgcttcagcgtgcagcgtcggctctgctcattcactcacttggcccgcacaatgtcttattacacaggtgagggaggtggggtgaccccactgctgggtcccttctcactgggctctgactggagacgacagccagagcagtggctggctggcaggggtggccgaggcccccagcagggagcaggaggagcaagcaagctgggcctaggggttgggggaggccccccagggaaagcctagggccaaggcgattgcgtggctctgatgcacacagaggagtctttgctcttcctcatgaacctgcctccagcatcagctgcaatagtggttctctcttcactttgagacctgggtgctgccactctgctgacggccacgcatggtttttgtccaggtgactcgcgactcgcgcacctacagcgttggggtgtgcacctttgcagtcgggccagaacaaggaggctgtaaggacggaggagtctgtctgctctcaggcaccaagggggcatcctttggacggctgcaatcaatgaaactggattacaggcaccaggatgaagcggtcgttttaagttacgtgaatggtgatcgttgccctccaggtaaatatttgcaatgaggtaaataaacttcaagctcatagtaaactagaaattagacatagcagcagaaagaagctgcggagtggagctccacggtcctatgagtgctgtaaccttgggcgtgaatgtgagctgttcctctgtacacccccggtgtgaatgctggtgtgtgaatcacgctgtgttctctcagttgcctggtgagttttggcaggtgaatgccggttgtcacgtaggtgctttaggatgggcagcttccttagggactgctgctgcattctgaggtgattgtgcctggcgaggcacagctgccacactgataatgttcttcttctttccagaaaccgatgacggcgtcccctgtgtcttccccttcatattcaatgggaagagctacgaggagtgcatcatagagagcagggcgaagctgtggtgtagcacaactgcggactacgacagagaccacgagtggggcttctgcagacactgtgagtaggacggctccgcgtccccacatggcctggggccttgatactgtcaaggctcgattcacactgagacctttgtggatgccccagtcagtggcaggaattctcttgcataaaatattttcttactcgggctgtttcccacagagaaacgtttgaattgctctgtgggattgctgggtaaccgtatctacagaccgtggtagagctgccgtgagatgctgtgctgggtggctggctaggcccactcactagctggagggccttgtgtccacataccaggttttagccctggtggttcagattatgcctcaggaaaatgaatgtctgctatgggtcttcaggattctgaagctagtgaggattccggtaaaccaggcgactcatttattgactttctgccatgtggcagcccaggtggggatggaggtttcttggtgagccacactcagtgccttgcccctgcggtgctcaggaagtttcatgagaggagccaactgctgtgacttgtgtctacggaccgtgagatgagggaaatgcatgaaaaattactaatttttggccaggcgcggtggctcacgcctgtaatcccagcactttgggaggctgaggcgggtggatcacgaggtcaggagattgagaccatcctggctagcatggtgaaaccccgtctctactaaaaatacaaaaaaaaaaaaaaattagctgggcgtggtggcgggcgcctgtagtcccagctactggggaggctgaggcaggaggatggtgtgtacccgggaggcggagcttgcagtgagccgagatcatgccacttcactccagcctgggtgacagagtgagactcggtctcaaaaaaaaaaaaaagaaaaattactaattttcataaatgtccagtatcgggggaaccagcccccgatttttcaacgtaggttcttttctatttccctaagtgttggccggtctgagaaataaggggaaagagtacaaaagagagaaattttaaagctggtgtccgggggagacattacatgttggcaggttctgtgatgcccccgagccgcaaaaccagcaagtttttattagcaattttcaaaggggagggagtgtacgaatagggtgtgggtcatggagatcacatgcttcaaggatgacaagaggtcacaaggcagaaggtcagggcaggatcacaaggtcagcgcgaaactagaatcactaaataacttccatgtcccactgtgcacacattgtgagggttcaagagcagagaaccggtttaactagaattcgccaggctggaatttccaaatcctagcaagcctgggggcgctgcaggaggccagggcgtgtttcatcccttatctgcaactgcataaggcagacacccctagagtggccatttaagaggcgcccctgccttcctcccgggaatgcattcttttcccagggctgttaattattaaaattccttactggggaaagaattcagcgatatttctcttacccgttttcggtaataagagaaatatggctctgtcctcaccggcccacagtcagccagactttaaggttatctcacttgttccttgaaaatcactgttatcctgttcttaaggtgcccagatttcatattgttcaaacacacatgctttacgaacaatttgtgcagttaatgcaatcatcacagggtcctgaggcgacatacatcctcagcttacgaagatgatgggattaagagattaaagtaaagacaggcataggaaattataatattgattggggaagtgataaatgtccatgaaatcttcacaatgtatattcttctgtcacggcttcagcaggtccctccgttcatggtccctgacttcccgcaatagtccagggaccaaaatgggatgtattaaggaaccaaacgtgttaaatttacgaaggattgctatagctttgttttgaggcttattttgacaaaacgttattccctattttctgaatcacactcctgttttcaagtacttgtaggtattacattattatcttaaattttttttttttttgagatggagttttgctcttgttgcccaggctagagtgcagtggtgcagtcttggctcactgcaagctccaccttctggtttcaagtgatactcctgcctcagcctcccaagtagctgggattacaggggcccgccacctcacccagctaatttttttgtatttttggtagagatgggatttcaccatgttggtcaggctggtctccaactgctgacctcatgatccgcccacctcggcctcccagagtgctgggattacaggcgtgagccaccgcgcccagctatcttattttttttcgtgatcattagtagattggtcaaatattgaatacccgtgtgaggaatcacctagggctgtggggttattaagaagtacgatgaaaggctgtgtgccaaggagctgggtctatttggagtcaggatacacatgagtgaatcaacatgagatgtggccagggcagcacgtggtgtgttgccagatggcggatggagtctgcaggtgctcctgaggcagcatggggaaggcgtgcaggaacgtgccctggtgcaggccttggtctgacattctcccgcctctgctcccctgaaggggtggcctgcccctccacacttgtgggtatttctagtcgggtgggatgagagactgagaaaagaaataagacacagagacaaagtatagagaaacaacagtgggcccaggggaccggcactcagcacaccaaggacctgcaccggcatcggcctctgagttccctcagtttttattgattattattttcattattttagcaaaaaaggaatgtagtaggagagcagggtgatgataaggagaaggtcaacaaaaaacatgtgagcaaaagaatctatatcataattaagtttaagggatggtactatgcctggacatgcacataggccaaatttatgtttctccccacccaaacatctcagcggagtaaagaataacaaggcagcattactgcaaacgtgtctcgcctcccgccacagggcagcttttctcctatctcagagttgaacaaatgtacaatcgggttttataccgagacattcagttcccaggggcaagcaggagaaagtggccttcctccatctcacctgcaagaggctttcctcttttactaatccacctcagcacagaccctttacgggtgtcaggctgggggacagtcaggtctttctcatcccacgaggccatatttcagactatcacatggggagaaaccttggacaatacccagctttccagggcagaggtccctgcggccttccgcagtgcattgtgcccctggtttattgagactagagaatggcaatgacttttaccgagtatactgcttataaacattttgttaacaaggcacgtccttcacagccctagatcccttaaaccttaattttatacaacacatatttttgtgagctccaagttgggtcaaagtggctggggcagagtggctggggcaaagctacaaattaacaacatctcagcaaagcaattgtttaaagtacagggctttttcaaaatggagtctcttatgtcttccctttctgcatagacacagtgacagtctgatctctctctcttttccctacactccccagcaaacagctaccggacatccagcatcatatttaagtgtgatgaagatgaggacattgggaggccacaagtcttcagtgaagtgcgtgggtgtgatgtgacatttgagtggaaaacaaaagttgtctgccctccaaagaagttggagtgcaaattcgtccagaaacacaaaacctacgacctgcggctgctctcctctctcaccgggtcctggtccctggtccacaacggagtctcgtgagtgccttcccagtccacccgcggcgccacaccctcagcatgtgaacttcagactgcttgacgatggttggctcttttgggttctcaagatgggaatactatgcccatgtgaggctgatggtggttgagttgtgactgttcctggaagcagcccgcagtgtcaatcctggcacagagggtggttctgaggtcagagtgggggcaggagctttggtgactggaaacggagcctctggagctggaagaacctgggcggactgagttaggctgggtttgatttgcgtttgtgtgtagctcaggttgtgggaggcgtgtgggttttctcgggtctttggcaggagctccttaggctttgctggctggggtcagcccatggtcctgaccactctgcgtggggagcgcccgcttggccaggtgctcctgcaagacatcaccgaggagcaggggcatggactcacagggtttaagtggttctaagtgaggtgggaaacttgccgagattctagccactgcctctcccagccccggagcccttctttctactgtaccacgctgtgtccagggtggccgcaggtgtggacattccactccgcgtgtgtctggttggtgagctcccttcttcagtgaagacttcttttgccctttttttttttaattggaaaagctattttagtgctacattcagtgatggaatggagcccttagttatcagaacctttctctgaaagtaaagtgaagagccctcctgtgtcagggcagagacgtcacttgcatgccttttacctgcccctttgtgtcgttttctaggtactatataaatctgtgccagaaaatatataaagggcccctgggctgctctgaaagggccagcatttgcagaaggaccacaactggtgacgtccaggtcctgggactcgttcacacgcagaagctgggtgtcataggtaaggcctgtgggtcctggtccttggttcaaggagcagcatctgaaccgggaaggtgagggtgttctcaggatggcaaggagagtgagcatgtgctttggtggaaacctccagatatgattgcctgtcactgtctcacaggcattttggctctcctggcacattaaaataagtgctgctttgtattatatgagactgcaggtcctagtctgtgtgtttagaggggttgggctatctcggggaagtgcgtctatccaggaggaagtctcagaatgttcagagttcctctgaagttcacattctagctgtagatcaagtgcctaaattggcataaacacacgtgtttgtttaggaaagccaaacagttgcatgaggacttggtacaggtagttcagaggtacatctttgtaaaatgtcttaacaatttttcacgggaaattgatcttgtacttggttgctgagtgaaagttgttttctttcattatttaaaggaggaaaatagaggtttcttagtaagagcaattaggatttgttggagggaccagtaaaggaaaatattcacctttgcctcttaggctggagtggggtttcccgagttgtcctgattcagccacagggctacttcagattagcttgagatgttgagatggagaaagagaattccgagaaaactactgccacccttgataaaaatcacacacagactctgcaggttggtaggtggagggagagctgccatacaggaagtggcgcccagaccgccagcctgagacccgccctccctgggaggttcttactgctttagaggtcagttattgctgccactcccacactgccccagaagggggaaggagggaaggtcgtggagggttgctttttcccctgtaatcttgcagtatatatggatattcgactagtctttccccaacttcagccaactgaaatgactaaaacacttaaggcttcctaaaagtttgaggcaggaggagcaaaagagagtagtgaacacagggggtgacatggaactagatcatctgacttcttagcggtgacctgcaggccacctccatttggagagcaccattttgcaagtccagcctcgcctggcgggaagagctcatgctttctcctgggactggcatttggcatcctgagcacctgctgaccggaacgagaaataatctggtgtctgacaccaaatgagctcttaatctttggcgccaacaagacagcatctaaggacaaccacggtgcccccattgtccgcttagggaatggacccctgttggggtgggaggtagactttttgttttcagaaccaacatgtctcaagcagctgtgcttaatatatgtttaatccccatccactccatggggcagcgttgtcatccgtttcacaggctgggcccctgagccgaggaggttgagcctcctgcccaatcagtaagggctgtctacactattaaagttttttcttgtttgatcccatatgccagaagttttaaaaattttccgtaaaacagtggaattcttttttccaaaattttacacagaagcccaatatttaaaacaaattcagctggagcagctttgagtttggggcaggcctgagagcctagagtcccacctcccacctcaccatccagcagccctcagtacctcagcctgtgtcctgtggaaaacactcgggaagtgagcactgtgcccatgttgcctccaccgcatgcccctgcctggaaggatctgtgtgtgtgtggtcagggtggaaggcacctgcttcccctggacaccctgcgccatgccctggagacatcatctgtccatgcagccaggctgggcccagaccgttcccagaacagccccctgcgcagccacaagcagcctcttggtggtggcttgagagttggaacctggcggccatgctgccccagtgatacctgcagcttaaagcatgtactcacttttctctcagaccctgcgggttcgagggctcaggtttttcttttaatgggtcacttttaaaagcagacagtgctcgactgaaagctagaagaccctagaaaaccacagttggtttctgtttctggcttttcactttttccattctgtgctctgttattactgggaggctcacatgagggtacctgtcaggaaagcacctaatatgatagagagagtttacacaattggagcgataatgaaggctgccattacccggggtcccactgttcacatgagtttgttgggcactttctatacatgcccgaaacctgcccactttggacagtgccctgttctgcaggtaaggccctcaaggctcagaagctcagcaacccagggccacaaagtacgggagtaggagggtttgggtttgaccccaggtcttaggctgtgacaattgtgcagtgggccaggtgaccacccctgagtgtgggaatgcaagaacaggtcgataaacctttagggagcccaaaatttattttcttctggcctttaaaccagatttttactcctaacattgaagctttgtttgtttgttttttgtttttgtttttgagatggagttttgctcttgttgcccaggctggagtgcaatggcgccatctcgatcttggctcactgcaacttctgcctcccgggttcaagcaattctcctgcctcagcctcctgagtagctgggattacaggcacctgccaccgtgcccgaataatttttgtatttttagtagagacggggtttcaccatgttggtcaggctggtctctaactcctgacctcaagtgatctgccctctttggtttcccaaagtgttggaattgacaggtgtgagccactgcgcctgcctgaggctttttataatgcactagaaataatgtcagttcaatcatttgtgtgtttcaggtgacaaagttgttgtcacgtactccaaaggttatccgtgtggtggaaataagaccgcatcctccgtgatagaattgacctgtacaaagacggtgggcagacctgcattcaagaggtcaggagactgggggctcagagcgggactgtgcagtgagcatactggagggaattcctccttggggttttcatgggcaggttttggctgagtcttaggagctcagggccagagccgctgattgtgctgtattgggcggggctgctccaggcagggaagacctccagatacagtgctgagacactgttacaagaccagtgcaacttctctgggctagcttgtctcttgaactaggtttagcactggctgagcagtacttaactgacctctacctttgaatgtcatagtagaaacaaaggggcgtggatttgtcccacccgaggtgttcaagcagcctggctgggaccctcgagcagctgggacctgcatctggacctgggatgtgcttggattatattcaagttttcccggccacattgcatctggtgccagggagagcttggccaacagagggtgcatgtgagctgctgtttgtgaacagaactgattccttccagacgctgagtttggaaaaggggtgactcagaaattgccaaaggatttatgaatgtatgagtctgagaagcttaaacaaaaatctaaaaatctaggagcaaattttccaggttttgaatgttgcacggtttacaaattttaaaaaatttatattgaatgcttgcctgctttgtcacattactgatgtgtgcaccacagtcatcttccctgtccattgtggtgatgaaaagaagtgagtaaaataaccaccctcgctccgagctgccgtcagtgttgagtcgggaaattctgcctaggcctgcgcagcccggggagtgggggcctcgggacccaactgaagtctcgcagcaccttgactgaaagccagtgagctgcttcaagggctccgcagtgttcattgttttgcagtcttcccttatgtctggctggggaagtgactgtagcctgtgcttccctcctcctaggtttgatatcgacagctgcacttactacttcagctgggactcccgggctgcctgcgccgtgaagcctcaggaggtgcagatggtgaatgggaccatcaccaaccctataaatggcaagagcttcagcctcggagatatttattttaagtaagtaaaacgttttccttctgagctgtgaaatgtgttcaaaattaaaccagcaatgccgctctttccctatcggggagcactgcaggataaataggtctgtgttttagttactgttgctggagtcatcgtcatcttttgcttaaactgaggaaaagcgttactcaatcattaagttttaacaccaaagatggtgaattctcatgagtgtaaaaataaatcccccgtccttctccctctcttcatgataatctcaggggttgaagccgaagccttctgacatgtttgagcaggaatcttctgggcttaccagtgtttagaaaataagtttctcagcagtgttactggggctgctcttgggggtggtggccgaggtgcacagacagggcgagggccgtgtggtgctggatacggcacctgaggaaggtggattagcactcagaggccagaactggttggggagaaagcctcttgagagggaaactggtgtcctcagaattgctgtggggtcacagacgtgctgccctagcgtgtccgtgcttcctttccctaggaaaggaagcatcctggggccctgcagtgattctgaggactgagggtttatgtcatgaatgccttcttgaaggacttccatgtcactgtgatcttttctgtctcttcaggctgttcagagcctctggggacatgaggaccaatggggacaactacctgtatgagatccaactttcctccatcacaagctccagaaacccggcgtgctctggagccaacatatgccaggtgaagcccaacgatcagcacttcagtcggaaagttggaacctctgacaagaccaagtactaccttcaaggtaatccgtggcttcccacaaagttccacatttaacttcctccaaggaaggggattaaaattttcaactaactcccttcagttgaaatctcggaccacttttaaaacaaaaaccatggtctaattctttactttgttatgaatttcttgacagtggattgagcgatacgtgtcagaactaagcatttcactgtaggcaaattgtgtcttagttatcaaataaatgtacaaaaaaactaaaacctggtctgatccagtggttctgaggttgggtggaggctgagctgtgcacagtcagaattgcctttgatttggttttaaccatgacacttccttattttggaatgccaaataatattagagaagggtaagagattttatatttgtaagaaggatgaaaggaaactggcctaaatgttaggatgtaggttaaaatcaaccaggacgcacatagggcagagtccagggtgtgaaggaaggttttaaactggcactaataagggtgttgccctttgttccctcacataatcgtgaaaggctgcttttgttttgaacagctagtcttaactatatacctttcataatttgatttttgaaccgtgtgtggatgtaataactctttaaaaaaaaatgaagtgtgtttaaagaaaaccccagcctgctctgatgtcaaagagctgccgatcatgtcctctgggaggggagagtagtgatagctgagaaggagcaggtgctctgtgccctggtgctgagcacattgccgagaaggagcaggtgctccgtgccctggtgctgagctcatcgccgagaaggagcaggtgctccgtgccctggtgctgagcgcatcgccgagaaggagcgggtgctctgtgccctggtgctgagcgcatcgctgagaaggagcgggtgctctgtgccctggtgctgagcgcatcgctgagaaggagcgggtgctctgtgccctggtgcggctgagaaggagcgggtgctccgtgccctggtgctgagcacatcgccgagaaggagcaggtgctccgtgccctggtgctgagcacatcgccgagaaggagcaggtgctccgtgccctggtgctgagcgcatcgccgagaaggagcaggtgctccgtgccctggtgctgagcgcatcgccgagaaggagcaggtgctccgtgccctggtgctgagcgcatcgccgagaaggagcaggtgctccgtgccctggtgctgagcgcatcgccgagaaggagcaggtgctctgtgccctggtgctgagcgcatcgccgagaaggagcaggtgctccgtgccctggtgctgagtgcatctccacgacggcagcacctgatggagggaagctgggtcagcatcgctgctcctggtcacagattgtagacagcgccctggtgcatctgctcatagcacctgtggcccctgaatagaactgggaaagtgaatgttctgctttctgggtgagttgatgatgggaaagttgatcagcctcattcacttgcataactccacagcacggagctagcactctgtgtttctctgttctctgccttcctcacacttcggtgaatccttcagtcattcagaatcagatgttgcatgtcacaggttgtgccttctcttgctgtcctctttcccagtgctcggtaaatcttgattaaaggaaggaaggaaggattgtttcagaagccttcaggggccctatcatgcagagaaggaaagtctaggctctctctgacacagcttgaagatgtctgagaggctcccatgtaccagggtagccttgcaagctgctgctcctacacatgcctcagccatcaggttattcactagttcccaaagtcaccctgtaacctggtgggtttacatatgctgctcttggtgctggaatgccttggcccaccttcctcatccttccaaacctacttctagtgcccctcctgggaaggcccaccttctcatagcagggtgacaccgctggtgtgtctgcaggattccaaacctacctccagtgcccctcctgggaaggcccaccttctcatagcagggtgacaccgctggtgtgtctgcaggattccaaacctacctccagtgcccctcctgggaaggcccaccttctcatagcagggtgacaccgctggtgtgtctgcaggattccaaacctacctccagtgcccctcctgggaaggcccaccttctcatagcaggtgatactgctggtgtgtctgcaggagtcttcacgctccatcgcgcagcactggccacttgtctggttacacataagacctccacgttcacaagtggtatgtctagcagacctttgaggatccccagctttcagagtgcttgtgcatgcgcatttagtcattcttggtaaataaaatccctttcagaccttttcactttcttcattcaccagccccaggaagtagctttagttttaagacatcttttcatctttcatgaagaaatgaagtttctatctcttcctgaggcttgccattccttcgggagggcagagctgtctctcatcaggacgtggagctgctgggcggtttgcttccccacatcagccctgtggaacagtccattcagcagcccctgcttcagctactcccaagcgagaatgtggggccctcccggagcggagccgcaccgcctgtctctgggccccatctgtgtgtggacatgtccgtctcctaccctgcactctcgcctctgcattcctggcacccagcagcaccagccacaaagattttcagccagtgacaaaggttgggagcagcagagttcatgcaaggagtccacacaagggttcctcacttctgacagcaacagcacactgaaggggttcccaagccaacttcagatttaccctttcaccataactcacagagctccctggaagcagttacacttatagttatgatttactgcagcaaaaagatacaggttaaaatcaaccaagatgcacacagggcagagtccaggagggaattgaatgcagagttcccaccagctctcccgtggaatcagatgtgttgtgttcccagcacccacgtgtggcagtgcacatggagtatcatcagccggaggtgcttccccaagccttggtgtccagagtttttcccggggctctgacatgggcaggattggtccattgatcactcaggtactgcatggccagcccctgctccgtatcctgtcattagccaaggagcaaggccagccctctttttgggcaaggttaaattcttgccttccctcttgttgccgttgcttctgttcctggaggagctcctggcacagtgatggggtctcaggcctccaccttactgcacgatgaagagtttgaggagatcaagaaggagactggcttttcccacagtcaaatcacacgcctgtacagccggttcagcaacctggacaaaggagagaacaggacgatttccaggggattccagaacttgccatcaacccagtgggggactggatcatcaatgccttccttccagagggagaggaccaggtaaacttccgtggattcctgcaaactctggctcatttccaaaccattgaggataatgaaaagagcaaagttgtgaatggacctgaaccactcaacagccgaagcaacaaactgcagtttgcttttcgactatatgatttggataaagataacaagatctctcgtgatgagctgttaagggtgctgtgcatgatggtccaaataaatatctcagataagcagctgggcagtatcgcagacaggaccattcaggaggctgatcagcatggggacagtgccatatctttatcacagactttgctaaggttttggagaaggtggatgtagaacagaaaatgagcatctgatttcttcactaaaggacagacagcaaactattccttgcagtctagtatttaagtactggaacttgacagtcctcctgtccaccagccctacctccaccccatcattccccttctcccaaagtactactgctgttgcataacaaccccaaatatgttctgtcaacacaaacctgcttttggtctataaacagggcgttacagaatggtacacccagtctatttcttctcagtatccattcgccagttcttcatttataaatatcgtcttcctctgttctgctgctgaatgccacacatccatccagtctgagaaagtaagatagggaatcctgccgaggaacaagccagcaaagctctttcactggatgtagactgcacctgctgccttccctctggcgagtctgccagcatgcttctccatcctttttatatgtcctttgcttcccacttctgtgtacattcaacatactgttcacgtagtcatgcagtctttctgctttttgtgaagcctcagaatctcctctgttctacttggcaccccaagctatgcctggtattgtatttctgacttggctcgatagttcggtggtctggcagtttttatctaccttcattattaaaaggccctctggagctgggcgtggtggctcacgcctgtaatcccagcactgtgggaggctgaggtgggcagatcacgaggtcaggagatcgagaccatcctggctaacacggtgaaaccccgtctttactaaaaatacaaaaaattagccgggcgtggtggcgggtgcctgtagtcccagctactcgggaggctgaggcaggagaatggcgtgaacctgggaggcagagcttgcagtgagccaagatcgtgccactacactccagcctgggcgacagagcgagactccatctcaaaaaaaaaaaaaaaaaaaggccctctgggatgttgcctctccaggagctttttggtaaccaacacttctctcgggagtatgagatcatcctctgcactcttctctgtcatcaaagggctgctgggtggagatattcttgaaaggtggccttggtgagaggtgtggagtcaagtcttttaggttgcttgcccacgtcactctacctctggcctctgattctcaactttgtacctatggggcgtctcttgttagtgcagtgttgactattcaaaaagtagcaatatgcctgcagatttgcttagtcttgggacacggttaccaccagaacggctgctcagacaatatgcttggggactttctcatggctttttgaacaaggaggctgcgcaccctgtgaagcctcctgcattcacacctctgctgcatggtttatgcctcagtgttatgtgcactggaatgcttttcactatacgtttccaagttagaaagattagtgttatggaagtgcctaatgtatcctagtccaaaatatttaaagattgttctctgtgtcttgaagttttgcacaaaattctttatgaattttacacttggcaaatgttaatgctagaagccatagtccgcttcttatacaagtccaaagcgttgactgttgtatcattagctccctggttacactggtttcccagctccttgtgtagaccactgctaatcccttagaaacaagaggtctggcactagtagcacaacctaaggtggcattccaagtctttaagcaagtcacagcaacttttctgccaaagtcagcttagtttagacttcagtgaatcaggctgttgccatcctaatgtatgtctctgtgagtctgttcattcacatatctgccgttggctgactttcttgactcgctgcttgcttgcttgtttccttgctttggaaagctattgaagatgtgtacataattctttaggaaggggattgctaaaaaatacactgcaaagcgatggaaaacagtggagaacaggggagtagccaggctggatggctcaaatataaatgaatgaggaattctttatgaagtgtcagttggactttgtgattgagtgatgtaatacaggaattatatagaaagggaagaatatctgatactgatctgttagatacttcagaggctccttgatttgcatatttaaagttcctaaaattgtagcttttcccttcttttggctgtacagcagactgttttaatccacggttgtgccttattgttccattaaaattgtgtcttcagtccatcaataaatactcgtggttaaaacaaaacaaaaattctttactgcatgctgactaagggcagggctctatccatgtgcatcgagtggcctcgtaagctgtgaacagagtgcctgtgggacgtgggatgaagtctcttctgcctgattttaagtctttgcaaactttttagaccgtaaggagctaagctcagtctgctcgtgaaaaatgatggtgacatgccatgtgtgcccttcccgtttgacagacggcgatctcgatgtcgtgtttgcctcttcctctaagtgcggaaaggataagaccaagtctgtttcttccaccatcttcttccactgtgaccctctggtggaggacgggatccccgagttcagtcacgagactgccgactgccagtacctcttctcttggtacacctcagccgtgtgtcctctggggtgagtatgacatccggaagcttagcacttgtaccccacatcttcccttaagaataagtgtatgtgtgttttttccccaatgttttcttgtgaaatattcagaacatgcaccaaaaaatagagaaaatgatagaagcggaccccacatagtcagtgccccgctccgttgcttgtcagcatcctgccactgatttttggtccatggctgcgtcacctcccaccacccccagcagcagtgccattgtttcctttgtgtgtaccatgccccgaatagggtccagtcagggcaccccagctctgtccctctaccctgttcccattgctgcctccctctccttagctcctgggaggcaagtactggtggtgcctcctctgtgtaatcctggaacatcttttgtgtcgtaatacaaatgattgtttggtaaagtttcactttgatttgagtgcagtatttttactttgatttgagtgcagtatttttacgtttgtttgaatgaatgaaaagcttactctccagattttgagaatcagcatgagaacagagggagcagtttctgctctgaaggaaggtggcacctccattggttgtcttgtgtcccacagccgttttatactttgccacgaataacatgttgtcagttgctttcctcttggatttattttcttcttatgttacccccacccatcattgtatttatatttatttttattttttatttttttgggatggactcttgctctgtcactcaggctggagtgcagtggtgcggtcttggctcgttgcaacctctgcctcctggttcagacgattctcctgcctcagcctcccaagtagctgggattgcaggcatgtgtcattatgccctgctaatttttgtatttttggtagagatggggtttcaccatgttgaccaggctggtcttgaactcctcacctcagataatctgcctgccttggcctcccaaagtgctggcattacaagcgtgagctgccatgcccggcctggcccaccattttacataagcttttcattctctgtcctgagactttaagattgggggaacatgaattcttgccatgtaattgtttccttcatgtcctgaaaaagggaccgtagagtcagcagacgacagtggtgggggtcatgggggaatgaagatcacacattttacatcttaaatcagcactccccctgcccacccttaacagtggacatgagctcagcaaaaaccagctttgtcctgtgctgttcaggcctgtgtacttagggatcctcagctgcacagtcagggaaagaggcttttggttgaaatttcacttgtggtattttcagcttttgaatgtttatggtgttccggtgacgtcattacaaaatgaaaggattgaaactggaagttcttcctgaaagaagcaaaatgtgaatttttataaaagataaaacccagaagtgaactttccctgcattctctgtcatggagaggctacagctgccatgagatgaatcctgcctcctgacatggcagctggtcttctgtgtgggtttgagggaccaggccaggctaggatcccgtccatgttgaatgtttagagttcgacttctgtgagtaggaaaagcaccgtttatagggctttggtgtttgactctaaaaccagagaggaagattctccaggaaacctcggtttcatgatgttcagaacatcaggattgggagctgtttaaatcccttaacacactgacaaggtaataaggactttaaaaaaaagaaacagaagttgaaaccaagagcaaaaactcagatggtggattttgagggatgcaggtaccacccgggggtgacgtggaatagtgcctgagatttttttttccccaaatgttatcagtgttgtacattgtagaatcatgtaaatatggccagacgcggtggctcacgcttgtaatcccaacattttgggaggctaaggtgggcggatcacttgaggtcaggagttctagaccagcctgggcaacatggtgaaaccccgtctctactaaaaatacaaaaattagccaggtgtggtggtgcacacctgtaatcgcagctactcagaaggctgaggcaggagaattgcttgaacctggaaggtggaggttgcagtgagccgagatggcgtcactgtactgcagcctgggtgacagagcgagactagatctcaggaaaaaaaatcatgtaactataacaaacaggtagcaatgttcgccctaatagattaccatttttagttcttttagctatttcttctggaatttacctcagtattttaaattaacatcctatatctcatctgttgacttcctgcaatagtagatgaagatagagctgtcttacaccttcctcctactttacaaaaatggttctttcacaatatttgattaaagtcaaaaaatttacacaaagctaaaagacaggcatctacagatggaaggggcaggctatgtgcccagcacagttattgatgacaagacccacccacttatgaaataccaggagagcagatacaaagaaaagactgtaaaagctttaggggaggctaatttgttgtattagaaaataattcaagaaaggttaaaatactttaaatcctcactttatatcatcgataggttcttggaaactgcaactttatgtgaaatgatgtataatgaaaccagttttttttcctcagctttatgttatgttatgttatgttatgttatgttatgttatgttatgttatttttttgagacagagtctcgctctcgcccaggctggagtgcagtggcgcgatctcggctcactgcaagctctgcctcccaggttcacgccattctcctgcctcagcctcccaagtaactgggactacaggggcccgctaccatgcccggctaatttttttgtatttttagtagagacggggtttcaccgtgttagccaggttgatctcgatctcctgatcttgtgatccgcctgcctcagcctcccaaagtgctgggattacaggcgtgagccaccgtgcccggcctcatcaactttataatgagacagttttgaaggaaatgatgtcattcgaggacctcccatagtcgcttcacggaaggttgcagtttgaaggaaactgtcagcgaccctatgaggacacactgtactggacaacagtggtgtctaagctgagaggggtggcagagttcccagcttttaaaatttcttacagtgatagcatcatatgaaagtaaaaccattttcttgaaagaaatgaaggaaggaagaaaaggtagagttcctaattgtttggaagacatactgttagacttcctgtcttagtatgcatgccagtattttaagaataaccactaaaataatataaatatagtatgtaacttccaaaacagcggagaagaaaaggagaagtaaaaatacttaaatccccaaagaagacaagcaaggagaaaaataaaacaaaaatcagataagtagaaatttcagcccagtatggtagaaataaatctaaatatatctataatcataagtatagcttgactaaacttgtcagctaaaaaacaagttgtcaaactggatttcaaaaacaactctgtttacagggaacatgcctaaaacaaggatacagaaaagaccaaagtcaaaggagaagaaaagatataccagaaaataatctgaaagaaagctgcagtagttatgttaatataagataaaataggatattaaagaaaaatattagggataaagaataaagagggtcattataattttaaaagggctaatttcctaggaagatacaagaatcctaaacttccatctacctaataaaaaagccttgatatgtaaagcagaaattgacaaaaccacacacaagaaacaagcctagtgattgctgggttgagtagacaaagagtaaagctttttttggaagattgagacagcacagtgaaaagcaagatttaatagacatgcgcagaacactgttccctgcgttgggagaacactgtttgcccaagcttacatcaaacacttagaaaactttagcaaaaattaaccacaaagcaggcaagtcagcaatttccctttttttttttttttttttttttttttttttttttttttttttttttttttttttttttttttttttttttttttttttttttggagacagagacttgctcttttgcccaggctggagtgcagtggtgcgatcttggctcactgcaacctctgcttcccagattcaagtgattctcatgcctcagcctcctgagtagctgggattatgggcgtgtgccactacctcctggctaatttttgtatttttagtagagatggggtttcaccatgttggccaggctggtctcaaactcctgacctcaggtgatccacctgcctcagcctcctagagtgctgggattacaggcatgagccactgtgctcggcctaagtcagcagatttctgactgatgcaattaactacatacatgatgcaattaagttaggaaccaagaacaaacaactgaaaaatagaaatacgtttgaagactaaaactcacttctgaataatctatggtccaaagaagaaatcaaaggtagaaagtaaaatacgcttagaactgagtgatgatgtgtctcttggatgcatttcgagtggtcctgagtggctggagctgcttctgggtgagtgggtttctggcttggagggagaggtctgcatagctctcagacctgtctgtggagtgtggtggtgcttctttctgagcagaggtcaacccttgcaggcccacctagaactggacgccaggctgtccctgtggtttcttgtcttgctgatgttttagattgtttggcttaagctgaactttgagagcggcagcccttgcggctgggccgcgggttggcctgttgccctcaacctcagttctttgagcagccggcatcttcagcagcacaagatgcgccccgctggggttgcctcttatcaccagcagcacaggaggaatttctgtttatgtgatcctgttcctgtgtgtgtggccccaagtgacagagggccagagagattagaagtgtcaagtcgttacactcttgagtgtcatcttgctccctaagcgcaaagggaagtctccgtggttgtttctcattttctattattgtcccaactctgcttgagtgttcgatgtcatggaaacgcactgctttttcccacaagtgtgcatgtgggtcttgggtgggaatggtgaactccgctggtgaggcagctggtgtgctcaagagccttctcctgggatggagcaggcttggagagaggagacccgtcgggggctgtgctgggctctgctgctccctgggccccaccctggtctgtggccgcccctgggccccgtcctggcctgtttctaaggccccctgggcccctttcgtgtggagatggtgtctcatggtgggctgcgctcactgcttccagaagaaattctgagaggaaagagctctgaccctggagagaagtgtggtgcttcgggacagcctctgccccagcctagtcctgccgtggattgggccacctagagggggccgcgtccctcctgcctgtctcctctgtgtttgggtgaatgatagttcatggagctggaagcagtgccttcttgtctgctttctgacaaccctgccacaaactcatcatcaggaactttttgcagccctcttccatgtggagtgggacttgtggccttgttttctgggcaggagtaagaatcacatggtgttgggaaagtcagagctgctcttgccttggggactcaggtctcaggttgtggctgtggcagcaggaccaccctgtgacacggctccttttctgtgacgtccttgcagggtgggctttgacagcgagaatcccggggacgacgggcagatgcacaaggggctgtcagaacggagccaggcagtcggcgcggtgctcagcctgctgctggtggcgctcacctgctgcctgctggccctgttgctctacaagaaggagaggaggtaagcgggtggcagggcgaggtggggcgggtggatgcatgcctcccatagctaatcttggggtcagttttgtggggttttatttatttgtttttaagccctacagcagcgaaggctcgaggttcttagtccaaaactctctggaagcagtccccagcgttgtggtttttaaatgcctgcatttctgtctgaccaaggccgaggccctcgcacatcacccgtgcctgcggcttctaggaccgtggtcctttgtgtccaaagatgagtagaacattaaacggcacctttcatgggtgccttttcccactgagcagctgacccctctgccctcctcacatcataaatgcaggagtttattaagcgcctgctatgtaccaggtatgatgccatccttttgcgccactttgctgggtgaaaggactctccatgtgacggtcaagcagattttcacgtcaggcgtcagtgttagtggctctgacctgggggcaggagctggccagctcaggcgttccctgctgccactgtcatttgccagctgagccacaggccaatgagagaggtggtcagaaagtaccaaccatggaggttgcagtgagccaagatctcaccactgcactctagcctgggcaacacagtgagactctgtccaaaaaaaaaaaaaaagtaccgattgtggccctctacacccaaaatgcagaatggggcagaagaaggtctgggccgggaagggcatgtgatgtctgtctctgcgagccaccattgggcaggcttagtggcgacggactggtgtggtcctgttagtcatgtgaaaaagtccttgccctaatgttaagttgctctagagggccctctgctgttggattccaaagcccatcttctttccactcaatcacaacaaatacattagggtatatataacctgtcacggctactcatttgtcattcagaatgtgggagaaatgcagccaccaccagccccctggtggtgcagatgggggtggggctggcgggggtggggctcctgcccatgccctctctacactggagtaattattgtctcctttttttttatagggaaacagtgataagtaagctgaccacttgctgtaggagaagttccaacgtgtcctacaaatactcaaaggtaattttctgtggcgagtctcttgaaggcctgcctccccggccccctgtgctgcgctgtccatgtcgttctcatcaggggtgccaaggaaagcagtcacaggctgactggaatccagaaaggaaagcaacacccgttgcctcagccacttacgccagcacatttttttgttatttttttccctcaagtttctctcgtggttacaactgatttccttgaagtatttaataattaggttgtttccactgtttttggctgttctttaaaaaaaaaacaaaacacacacacacacagtagtgaagatagttgtgcatgtagcatttggatgatttctttcaggtaaatttgcagaaaagaggcattatctggatcaaaggacataatgtttgtggtctcgatgggtaatgatgaattgctctctaaaactaggcttttgactggagtccctcctttgacattcctcccctgccatgcagtgggcacctttcagtctatgagtagcccggaagagccccttctcccccagctgcgctgggggatcactggtctgcttttcggtccaggccatcccgaacgccttctgcttggtcccacccttggctgtgagactcctgccaaatgaccccactgccaccctcccaaaccctcctgccttggtgcagtctcattaggaacaggaaggtgttgccagccctcgtcttcctttccctgggaactggagatgcagtgactgtgaggacagtgggccagttcttccccagctcgtgccagcagagagcatccctgatgtggtggatggtggagcagaatggggtctcttagggggctcacgtggtctctgctgttgatccctggcaggtgaataaggaagaagagacagatgagaatgaaacagagtggctgatggaagagatccagctgcctcctccacggcagggaaaggaagggcaggagaacggccatattaccaccaagtcagtgaaagccctcagctccctgcatggggatgaccaggacagtgaggatgaggttctgaccatcccagaggtgaaagttcactcgggcaggggagctggggcagagagctcccacccagtgagaaacgcacagagcaatgcccttcaggagcgtgaggacgatagggtggggctggtcaggggtgagaaggcgaggaaagggaagtccagctctgcacagcagaagacagtgagctccaccaagctggtgtccttccatgacgacagcgacgaggacctcttacacatctgactccgcagtgcctgcaggggagcacggagccgcgggacagccaagcacctccaaccaaataagacttccactcgatgatgcttctataattttgcctttaacagaaactttcaaaagggaagagtttttgtgatgggggagagggtgaaggaggtcaggccccactccttcctgattgtttacagtcattggaataaggcatggctcagatcggccacagggcggtaccttgtgcccagggttttgccccaagtcctcatttaaaagcataaggccggacgcatctcaaaacagagggctgcattcgaagaaacccttgctgctttagtcccgatagggtatttgaccccgatatattttagcattttaattctctccccctatttattgactttgacaattactcaggtttgagaaaaaggaaaaaaaaacagccaccgtttcttcctgccagcaggggtgtgatgtaccagtttgtccatcttgagatggtgaggctgtcagtgtatggggcagcttccggcgggatgttgaactggtcattaatgtgtcccctgagttggagctcattctgtctcttttctcttttgctttctgtttcttaagggcacacacacgtgcgtgcgagcacacacacacatacgtgcacagggtccccgagtgcctaggttttggagagtttgcctgttctatgcctttagtcaggaatggctgcacctttttgcatgatatcttcaagcctgggcgtacagagcacatttgtcagtatttttgccggctggtgaattcaaacaacctgcccaaagattgatttgtgtgtttgtgtgtgtgtgtgtgtgtgtgtgtgtgtgtgtgagtggagttgaggtgtcagagaaaatgaattttttccagatttggggtataggtctcatctcttcaggttctcatgataccacctttactgtgcttatttttttaagaaaaaagtgttgatcaaccattcgacctataagaagccttaatttgcacagtgtgtgacttacagaaactgcatgaaaaatcatgggccagagcctcggccctagcattgcacttggcctcatgctggagggaggctgggcgggtacagcgcggaggaggagggaggccaggcgggcatggcgtggaggaggagggaggccgggcggtcacagcatggaggaggagggaggcgctgctggtgttcttattctggcggcagcgcctttcctgccatgtttagtgaatgacttttctcgcattgtagaattgtatatagactctggtgttctattgctgagaagcaaaccgccctgcagcatccctcagcctgtaccggtttggctggcttgtttgatttcaacatgagtgtattttttaaaattgatttttctcttcatttttttttcaatcaactttactgtaatataaagtattcaacaatttcaataaaagataaattattaattgggtgttaccattttttccttgatagtgagacgttcccgagcgagttacccatctgcctgcctgtcttttctttctgttaagtgactgaatttgggttttaactctggtgttctcgttgaccctttatgaggcagcactttcatttttctccagagtctcctggtcgtaggtgttaactttgggtccaatctgccttcccttggctctttctagatccgatttctttaccttctccaggccaacctcggggtgtggtcctgttcatcaaaacaatgaacatggagtttagagtccagtgagtcaataaagcttttttttgtgcaacctgatctaacatggagatgttttctcttgagtaaactcactgagttttccatcttaaattactcagcagtgactgagagctacctgcatggaagcaggaagttactccagtgttataaacaaacttcttagactcaacatcctattctccatccctttttttttcctgtagagtccaaaaacctcaaccgtctcatttttaaattatccaattggagttacctttttaaaaaagttattcttaaggactttccaatacctctcctgaggaagacatgtcaggtcttctaaaagtttacattatgaccaaagaaagatgctggtcctcaggcattctacccagggggctgttctccaggccattcccacctcctgctaagaccatggggagccctctctgtaaggaggggcatatgcagggacctgcccatccccttggtaagctggatggcaaaaaggcatgttgtctgcaccactggctgcctgctaatgtcgctgtcagtggggaaggagaagtgacaacacgtttgagtgcatttgctttgactcttagaaacccaagcctctgaaaaaagagtaactacttgccagctgttgttacagatgatatttttaggaaaacatcccgtgacagcaaatcagaattggactctttttcagagaaatgattttattgatggagtacaacctgggtatttagcttcctttcaacaaaattttttgtgcccctttcttgagactgtccatgaatgacagagacatagaataagaactggggtgctaaagatggaataggcaaaccccacaccaaggaaatccacagtgaagtggaaatctggttcttatgaacattttaagagcatctgaagcctgtacttcaccaaccctaaaataatacgtaacacgagatgattcctcaggaaggaacatatagacatacagacaggagacaacatatagacattagaacttacaggacaaagaactctttttccctgaatcatttgagatgaagtttcttcccatcaccaggcattcctacaaacaaggaccttcacacgactaagatgccacctggtgattaaagaacactttgggctggtccgatccattgtacaagttaaagcactgatgggtacacaggtcttacccctgttggcgatcgggtcacaaggagccagtgtgtgtgtcaccaggaggttgtatggacgagactggatttctggaaatatcctttactgactctgaagaatcccatggctcagggaggtacactcatgtcctttcttacttctccggttccactctgttgactagtagttggcctcttgagccatacttgctgtcagttctggacattgttctgtgagaatggggtcaacgggcagtcgtggtgcaggtgagcttgtgtgcaaggcggcaagatagccacattgagttggggacagtatggcctgggggtgttggataggtaaggcagaagcaagcccagaacttggagcctgttgtgactgtcacagtaaggagtttgaagtcctgaaagcagttgagagctgtaggagggccagattgggcttttgagcaagatagtctagatgaaagtaaagagatggagacgcttcagcaaccagatgggaggttgggcatgggagctgtggctgtgctgagctgag

SEQ ID NO: 165 - DNA, 28316 bp, Human
  misc_feature (1)...(28316): n = A,T,C or G
accaaccaccacccaccaccactaccacccctcaccacccaccaccaccgccacccaccacccaccaccatcacccaccaccaccaccatccaccaccaccacccaaccaccaccacccaccacccaccaccatcacccaccacccaccaccacccaccacccaccacccaccaccatcacccaccacctaccacccaccacccaccaccaccaccacccaccaccacccaccacccaccaccaccaccacccaccaccacccaccaccactaccacccctcaccacccaccaccaccgccacccaccacccaccaccatcacgcactaccaaatatgtgatcatcaaaggtagaagcttacaacttgtggaaagacagataccactctctggcctggggtgggaggacagagtatgactcgtcctcaggcaggttggcttcctggatgatcagagaagtagaatctagggtgaaatgaaacaaaagtagatggagaaatctcaacaggaccaagtagagagggagaatttaggaatttagttagactgcagcaaaagaattcactgggtctctggccctaggctaaaaactatagaactccaaacctttaatgggagggggtacttcatggggcatgtctaagaggagtgaggaatgaggttaatgtgattctacggaattagacagaagtctgtatggctgaatgtactgggtttaacagcaacgttttagttagtttttgatattattgcaatgatgcactccagcaggagacaaatcctggcaggatgcatggttcaaagaaataccaatctttcaagagtatgtttaaacaaatttcactataaaagactatatctctgggaatgtcaagcaattggttactttagcagaaaaaaaaaaactagccatgtgacaacatggggataaaggaaaataaacacagtggacatgttattttttctgaaagtaaaatcgagccattttctttcataatctagtacagtcatgtgagaaattctgcttcatggtgatctcaagcaacagtttattggtggtgtggtacccaatagattgtgggtatggttgtaaatatactaaaaaacattaaattgtatgcctttagtgggtaaattttatggcatgtaaattatatctcaataaagctgtttaaaaaagaaaaagtaggaaacaaaataaaccaaataaaagtactaaaatcacccataattaattccaccatacagagataactgttaacatttgtttaaggttttcttgtttgctttttctaatttgtaaaagtcatatacgttcattaggggaaaaagaccacttagaaatgtttgcttgggccgggcgcggtggctcatgcctgtaatcccagcactttgggaggccaaggcggggggatcacgaagtcaggagatcgagaccatggtgaaacccagtctctactaaaaaatacaaaaaagtagccaggcgtggtggagggcgcctgtagtcccagctactctggaggctgaggcaggagaatggcgtgaacccgggaggcagagcttgcagtgagccgagatcacgccactgcactccagcctgggcgacagagcgagactccatctcaaaaaaaaaaaaaagaaatgtttgcttgaagaagaaagtgaaagataattataatctcaccactgacagacaaacattttaacagcttgctgtgtatctttccagacttttaaaagacatagatttatatataaaccagttttgacaaaaatgggctaatactatgcatactgctttgtaacctttaaaagtacattgtgaatatattataaacattctttcacataaatgtttatgatagaaatataaatatattttaagtgaatgctttgctctcaagtcaaagatcaatattcctaactttaccggaacccactagaattatttgctgttgggtcagttggatgaaccctaagtatctttggctgcttttcaggttggctctgacacgttttattccttcaagtacgaaatcaaggagggggattgtcctgttcaaagtggcaaaacctggcaggactgtgagtacaaggatgctgcaaaagcagtaagtgtattggccattcttgggccttctgttttctccgttgaccctgccagatttttttactgatgcagaaatgatggctactggtgagcctgtttatgagaaatgcaaataaacattccaatgtgtagaaaagtcagatgctttatatctgtgttcttgtatagacagaaaaatcatggagaagccagcagttaaacatggagaaagcctttccatgagaagggggctctagtgtccagccagaacatgtggctcagactccagagagataacaaattgacatttgggccaagccaaagagctggcgaggggagggggtgggtgcttccattgcacaatgttaagtgcaaatcttgactctgccttccattagctgtgtgatagcaggggagctgtgacctctcagaactggcactttctgctgtatatgggagataatattgacctcatcaggttgttggaggatgaaatcagatgaattatgcaaataactttgataacaatggctatcttaaccaaatgcctaacatataggcctggcacaccgtagctggttgttttgcttttttttttttttttttttttttttttgagccagagtctcgctctgtcgctcaggctggagtgcagtggcgcgatctcagctcactgcaagctctgccttccgggttcacgccattgtcctgcctcagcctcctgagtagctgggactacaggcacccgtcaccacgcctggctaattttttgtgtttttagtagagaccgggtttcaccgtgttagccaggatggtctcaatctcctgacctggtgatctgcccgcctcagcctcccaaagtgctgggattacaggcgtgagccaccgcgcccagccatggttgttttgctttaattaagaaagatttcagacagtatctgcctcagaagcaagactctcttttcatggattgattcccttcttttatgtcagaacataaaagatgactgcccgtcatctgccattaccaaagagtactgaactccaagtcaggagtctaggattttgcagtgctggttctcccttctcagtcatctcatctgtaaggtggggataagtagctgctgtgctctgtactgcctgcttctaggggctgtgtggacaaagggaggtgtgctttatcctgatggaatagtatctgtcacttagaatccaatggatatgactgaagaatgaaaagacaaaacaaaacaaaaacactgttcaacaataacaattaaacagctgcctattattaagtgcctgctgtgtggcgggcctctagtaggcattttgtgtgtgtttgcacacatactgttcacaacaactctaagagatagatgtatcccatctcctacaagacgggtaaactgagactccaagagtcaaggggacatgacagagttaacagctagcaagtgacaaggctggaactgaataacattttgatgccaaggtccttgccctttctattaagttaaactgaagtttatgtgaacagtattaacttactgaagttgagtggtagataagaggagtgtttagcaggctggttctagacctctgcgtccatcttggttagaaagaaatagctccagggctcagccaggtgcagtggctcacacctgtaatcgtaacactttgggaggccgaggtgattggatcatttgaggtcaggagtttgagaccagcctgaccaacgtcgtgaaaccctgtctctaccaaaaatacaaaattagctgggtgtggtggcacgtgcatgtaatcccagctacttgggaggctgaggcagcagaatcacttgaatctgggaggcagagattgcagtgaaccgagagatcgcactgttgcactccagcctgggtaacaaaagcaacactctgtctcaaaaaaaaaaaaaaaaaataggaaacaaaagaaaaaagaaataccctccagggctcaaaacaaagactcaagctttaaaacctcaccatttacactgtctttcctccagcatctcatgaatatcagtggcttatataaagtaatcattaggctattaaaaaaatttattctcatgtctcaaaactcttttggtaaaatcttcacaagttttgttttgttttgctttttaaggaaagccacatttagcaacagtattaggtagactttcccatctgaaagattaagataaatgatctctttcttttctttttaggccactggagaatgcacggcaaccgtggggaagaggagcagtacgaaattctccgtggctacccagacctgccagattactccaggtggctggtttatcctctggcactgccctggtgggaaattaaccatttctgtgagccaggaacacaatcttgaccaggctctgcttgctcccagagggtggcagtagtaaagccatttgcagagttagggagcattgggtggagcggcagagcccggaggttgagccaggctcgtgaccatcatccccttaggactatcccaactcttcccgtgtgctgcattgtacccagtgtgtgcaagggctcaacagaaggaccagaagacataagacctgccctccattgcaggcagcatcccagattgaggagcgcataggctttgagggcagacctggcctggaatctttcagagctccttgccttcttgcctctccttttccttgtctagaaaagggaggtaagagtacttcccacttcacaggactgttgtgaggctgaaatgagatgatatgcctggaggtacaatcataataacatactaacatattaatcataataacatattagcaacaatcaggataaaagtaatagctaagatatattgagtccttatgtcccagccatgactcaaagcaccttacatgtattatcttctttttctttttttcttttactgatacataatattttacatatttatgaggtacatgtgagtgttttttacatgcattgaacgtgtaatgattaagtcagggtatttggggtatccatcacctggaatagttatcatttctatgaattggtaatatttcaagtcctctcttttagctactttgaaatatacaatatattgttgctaactatagacactctagtctgctatgtaacattagaacgtatttcttctatctaactataattcagtacctattcaccaacctcttcatttcccccttctacccgcttaccccgctcagcctctggtatctgtcattctcttcccttctctatctccatgtgatggttttagcttccacatgtgagtgagaacaatgtgaagtttgtctttctgtgcttgagttgtttcacttaacgacctctagttctgtccatgtggctttaaatgatatgatttcaattctttgtttacggccaaatactatttcattgtgagtatataccacaatttctttctttttttttttcattttgagacagagtctcgcactgtcgcccaggctggggtgcagtggcacgatctaggctcactgcaacctcccgggttcaagcaattctccagcctcagcctcagcctcctgaatagctgggattatgggcatcgccaccacgcccggataatttttgtgtttttagtagagatggggtttcaccatgttggccaggctggtctcgaactcctgacctcaggtgatccacccgcctcggcctcccaaagtgctgggattacaggtgtgagccactgtgcctggtcccccacattttctttattcattcaccttttgatggacatttaagttgatttcatatctttgctattgtgaatactgctgcgacaaacctgggagtggaagtacccctttgataggctgatttactttcctctgggtagatgcccagtagctggactactggatatatggtatttggtgttttcattttttgaggaatctccgcactattttccatagtggttgcactaatttacattcttaccaacagtgcattagagttctcttttctccatttcctcctggctgtgtttaccgcttacatggcaggcagcgagagctctgtggtgaagaagtccaggctcccagggggtccctccaggtgtgccactcactctgcagctacgttccctttttatggactttgcctctattgaccagtaggttagggctatctgttatgaacattacttgataatttaatacaaattctttttaataatagccattctaactggggtaagatgatatctcatctcataatggttttgatttgcatttccctaatgcttagtgatattgggcattttttcacatacctgttggccatttgtatgtcgtcttttgagaaatgcctactgagatcatttgcccactttttaatgggattacttggtttttttattggtgagttgattgaattccttgtatatgctggatgttagtcccttgtgggatgcatggtttgcaaatattgtttttctttctttttttttttcttttgagacacagtcttgctctgtcgcccaggctggagtgcagtcgcatgatctcggctcactgcaacctccgtctcctgagttcaagtgattctcctgcctcagcctcagcctcccgagtagctgggactatcacattcagctaatttttgtattttaaattttgtaattttgtatttttaggagagatggggtttcaccatgttggccaggctggtctcgaactcctgacctcaggcgatctgcccccctcagcctcccaaagtgctgggtttacaggcatgagccaccacgcccagcctcttctttgtttagggcagtgtatgcgaatgctcattgcgatcattaatgctgtgtttttgtctgctctttgttaagccgagggccctgtggtgacagcccagtacgactgcctcggctgtgtgcatcctatatcaacgcagagcccagacctggagcccattctgagacacggcattcagtactttaacaacaacactcaacattcctccctcttcacgcttaatgaagtaaaacgggcccaaagacaggtttgttctttaattctctaagtagcacagtattactaaaatttgttagatctttacatttaaaatgtatgattgcatggctggtggtgttttcatgtgactagcacaggaagcgaagagctttctccttagtcaaagtgagtcggatagtgcaatatgtaaagtgagaaaagatgtcgaatcagacccccttcctttgacgtttgattttaacaaatgggtaatcgtcattacaggctcttcctagagacagtgaaaaggaaaagtcataccggccttaggattttttttttttttttttttttttttttttttttttgagacagagtctctctctgtcgcccaggctggagtgcagtggcgcgatctcggctcactgcaagctccgcctcctgggttcatgccattctcctgcctcagcctcctgagtagctgggactacaggcgcccgccaccacactggctaattttttttattattattatttttagtagaggcggggtttcaccatgttagccaggatggtctcaatctcctggccttaggattttaagaaaactatattatcacctagccatcatgagttaaacacagctccaaaatattaaattgtgtctaaaatggtcggcatggctttctgggtacccactaattacagttcccatatcatcagaaaaaaaaaagtatatatccgtaattttttttttttgacagtctcgctgtgttgcctaggctggagcagtggcgcgatcttggctcactgcaacctctgcctcccaggttcaagcaattctcctgcctcagcctcccaaggaactgggattacaggcgctcatcaccatgtcttgctaatttttgtatttttagtagagacgaggtttcaccatggtggccaagcgggtggtctcaaactcccaacctcaagtcatcctcccacctcggcctcgcaaagtgctgggattacaggcctgagccactgcactcagctacaaatcttcttaatgattcagtacacccagacttttcttcttttttttttttttttttttgttttttgaggaagagtcttgttctgttgcccaggctggaggctggagtgcagtggtgccatcttggttcactgcaacttccacctcccaagtttaagagatctcctgcctcagtatcccaagtaactgggattacaggcacccaccaccacgcccggctaatttttgtatttttggtagagacaaggtttccccatgtcggccaggctggtcttaaattcctgacctcaggtgttcctcccgtctcggcctcccaaagtgctgggattacaggcatgagccaccacgcccgcccctcccagacttttctgatagttgactgggtctcttgtatttcagcctcttattatgagtgattccctttggttagtaacattctctgcatttaataaaccttacaacttgctttcatgcgagcatgctttactcaattatgtccgtatagtgctatcagggtgggagaggcccagaataaagtagaagaaatcttactacttggtaacctgggagcctgaggacccaacagtaaagaccactcccctctaaagttttctttatccgtctagaagggcattattattttatgaaattcagtaaacatttctctctgcagcctggcagaggaaatattgttaggattcacttaaggaaatccatgttccaaaactggctgaaaaatagaaaaatatatatattgcttgtcattttcagatggctagcggtgtatgtgtgtgtgtgtgtgtgtgtgtttgtgtgagagatatgagactcttaaggtgctcaatgtttattcagcatttttttgcctagtaataataatattttatatttcttgggcacttattatattgccacactgttttctaaactcctcataacattcatatcccacagcgaataatgtttaaactgccctttaaatattcaatctgaaattgtttcaggtggtggctggattgaactttcgaattacctactcaattgtgcaaacgaattgttccaaagagaattttctgttcttaactccagactgcaagtccctttggaatggtgtaagtaggcaaaaatttaatgataaagttcttagcattttgtttacattttgtggtaactatcaagctgggtgggaagactgtcacgaaaagtttagatgacattcagcaattcatattcacatttacttgggaagactaaagctcacgtcactggtcaagctgccttacctaactggccaaagaatctgcacagctagcaataagtatttttttataactttattttattttatttattttttgagacaggatctcaatctgttccccaggctggagcacagtggtgtgatctcatctcactgcagcctccacctcgcatgttcaagctattctcctgcctcagcctcccaagtagctaggactacaggcgccaaccaccacgcatggctaatttttgtatttatagtagagacagggttttaccgtgttagccagagtggtctcgaactcctgacctcaggtgatccgcccaccttggcctcctaaagtgctggtattacaggcatgagccaccgtgcctggccagcaataagtatttacagagcataaccagggactacgaatagataaaatgcttgaacggtcaactgtatctttgttatgtctccacactttcccatttccttttcttccccaggtgctcaatgcccatatggtgttcccttgctctacccagggttattcttcatgtcaaacttttctctgtttgttttctcatcttcccttccctacctttatctttaataaacagaccctgagtctctagcccttagtggtccttcttagcatcgtatcttgttatctgaaccaaaattatattaaaatggtatatctcaaggtagtagtagctagcgaatgttaagatggcgaagacatgatatgtgcccagggatgtttgcatttgagcagaagactgtgctttagccaaggaaatgctgcaagtcctttgatctagtaattctgcttctaattcatttatatgggaaatccagaccataagatgttaatgtcagttgttttttaatagaaaaatattgtaaacaaatagtttatgcaacattacagaatggttaagtaaattacagtatatccatacagtagaatatgatacagctatcaaaaatttttagtttttagtgacatagtaaaacggttacaatgttaagtaaaaaacaaaaaaagtgggatacaaaactatacatacggatttatttaaatatgtaaaataaatgtaaatacaaaaagtgatggaaaacaaattatgacaaaatatagaatgtagttaactttcagttggaattgtgggtgctttttcttttttgagaagaggtcttgctctgtcaccttggctggagtgcagtggtgcgatctcggctcactgcaacctctgcctcccaggtttaagcaattctcatgcctcagcctccctgagtagctgggattacaggcgcccgctgcaacgccaggctaatttttgtattttgggtacagatgggggttttgccacgttggccaggctgttttcgaattcttgatctcaggtgatccacccaccttggccttccaaagtgctggtattacaggtgtaagccactgcatccggccgctttttctgattctttatattttttggaagtttttgatatttcccgagttttctaattgagcatgcatttattttataattggagaaaaaagtaaaaaggacactatcaagagagtaaaaatacaacccacagaatgagagaaaatatttgcaaatcatgtatctgataagagtttaacatgcagaatatataaagaacctctttttgttcataaaataacaagtattagaaagggcatggagaaattagaacttttgtacattgctggtaggactgtaaaatgctgcagccattatagaaaatcatttggcaatttctgaaaaacttaactatagaattactatgtgacccagaagttgcactcttaggtatatgcccaaaagaactggaaatgcatattcaaacacgtgtttatacatgaatttctatagcagcaaaattcataatagccagaaagtcaaaacaacccaagtgtctatcaataggtgaatggataaacaaaatgtgctattatatatacacaatgaaacactgttcaccctttaaaaagaatgaaattctgatacatgctacaatgtggatgaagcttgaaaatattatgttaagtgaaataagccagacacacacaaaaaatattgtatgattccacttatataaaacacctagaataggcaaattcagtcagagactattggagttgctagaaatgtaatgtaggcttttcttttttttttttgagactgagttttgctcttgttgcccaggctggagtgcaatagcgcaatcttggctcactgcaacctccgcctcccgggttcaagtgattctcctgcctcagcttcccgagtagctgggattacaggcatgtgccaccacggccggctagttttgtatttttagtagagatgaggtttctccatgttggtcaggctggtctcgaactcccaacctcaggtgatccgcctgcctcagcctcccaaagtgacttatcacacagcacctggctatgtttgtttattattcttttttcccctcacttctggagacctaggcataggtctttctatttgtttgttctatttgtttgttctatttgtttttctccctctgtttttaaattatgaaatcatgtcgagtcaaaaattaacttagaatgctgttctaataacattatatggaattctcatttttgttattttgtttttttttccttatccaagaaagaccctaactttattggcaagcatgtttatatttccaagtatattgtttttgtttgtttaaacatgttatgaatttttagagattattttttctttttggtgctgaggtgaaagaacataccctgtattgtttctgctttgtaaaatgtattggatctttttgtgacctggtgtaaaaacaattaaaaatatttgtatgatactggccgggcacggtagctcatgcctgtaatcccagcattttggtgggtggatcacttgagatcaggagttcgagaccagcctggccaacatggcaaaacctcatctctactaaaaatacaaaaaaattagccgggtgtggtggcagacgcctgtaatcccagacacttgggaggctgaggcaggagaatcacttgaatccaggaggcagaggttgcagtgagctgagattgcgccactgcactccagccttggtgacaaagagagactccatcacaaaaaaaaaaaaaaatatatatatatatatatacacacatatatatatacacatatatatatacacacacacaaatacatacaaattagtatgatacttataaagtatcatttaaaatcatatgtagcatatgaaaataccatttaaataaatctttaatatgttattcaaatcttctatgttcttgtttattttttattcacttgccctgtcttagatttgtaattgcatactaaattttcccaccatattatttctatccatttctattcacgtgtaattttttctactttaggtattttgattccatgccttctggtctatgcttttgaaaaataaaatgatcatttttactacctttaggaatgagtgttttgttctcgtgaattttactttgtccaatattactaatactgtagttcctgctacgtttatatttgtctcacgtagctttgttcatctgttatttttaagctttatacattgtttttattataagatgattcttgaaactgtaatacattgatttggtgttttaacagtgtgaaagtcttaccttatttttttagaaatttacctttttacttacatggctgttatttctgtactagatcttcctgctttccacgtgctcatgtatatgcatgtatttgttgatgctattgatactattaccttagtatctcttttgcagtaaggctatgttttgcttctttcttttttttctatgcaatgatttggaaagtacacgtcctattcttcaattttactagttgtttacttttaagactctaaaaaatgtttttaactgagcacttatatgctttttaaaaaccaggataccggtgaatgtacagataatgcatacatcgatattcagctacgaattgcttccttctcacagaactgtgacatttatccaggtaaggaataacacatgttggcaccgcaatagaggaatagtggtcccagacaactggctgagtcttttcctataagttgggttttggttcccgtgatatactccaaagtctgtgtaacctgcagacacagatgcaccccttgatgagaacactgtaccccttccctgcccagttgtgctgcagctcagactgttcttgtcagaatggtttatgaagacagaagggaaatgtatgacccctgggcaaagttggcctttgggtacaatgccatctggtctctcttctctgtaagttgtccttaagtcagatgttgtaagttgaagagacctgtattttatttctaagcactcagaacaaaaccctttcaattaaggtggttttttcctgcatgttataatgggaagaaatggagatagtgtgagtttgtggtcaggtcagtgtttcttataacaagggtgtgcttttttcatacttggaaaacgtttgtatgcgttccacgagtagtctgaagctgcctgttcatcagaaccatagcacttaaacttttctcatgagagtcactcctttaaattaagcattgctttttacagtttccatcaaaaatgcaaaaattcaggaaaagtgtagcgttttgttggagttactcgcaccttcctattgaaaatgtttccctaagtacactgtgctctgaggaggagaaaagaagagaggcaggaagtgaaagtcagacagacaaccttcccccactcactactgggcctgggctcccatgtagccccttatacatgtggatgctggttcttgtgcaggagggatgctaggccaggctgctacttcagtgtacatgttgacttaaaacctgatcctttcagggaaggattttgtacaaccacctaccaagatttgcgtgggctgccccagagatatacccaccaacagcccagagctggaggagacactgactcacaccatcacaaagcttaatgcagagaataacgcaactttctatttcaagattgacaatgtgaaaaaagcaagagtacaggtgtgtaaactatactacaaaagcagtaacactatagtctatgtgcaaattgctgactaattttgccactgatcttggctctggattgggaaaccatacatttgataatgtgatttggtgcattagatttggtaaattaagtgccaatctccctgtatgcttcatcccggacaagtattttacaacattctctctgttttctatatgtaaaggactgaggtgaggatcaaataagttaatatatgtcaaatcactttttcaaactctaaaatgctatataaatacaatagcagctgggcgcggtggctcacacctgcaataccagcactttgggaggccaaggcgggtggatcacaaggtcaagagatcaagaccatcctggccaacatggtgaaaccctgtctctactaaaaatacaaaaattagccgggcgtggtggtgcacacctgtagtcccagctactccagaggctgaggcaggagaatcgcttgaacctgggaggcagaggttgcagtgagccgagattgcgccactgcactccagcctggcaacagagcgagactctgtctaaataaataaataaataaataaataaatacaatagcaaccatgatataattaataaaattcagggctagggccaggaagacttacgctatgtctttctggactcatctctcattataacatcacataatgtcttgggctcagccatatcagtcaatccatcattgccaaggctccacgctttcttgcctccatgtctttcacccactgttctctctgcctgggatcccgctctcctgcaaatgtaccctctggggattcatctctcctttcatgccctatcaatagaagactgacaggagtgtcttctgggagtcaggagactcagttccaccatagcatctgccgctcacatcccagatcactctgggtggtcattcaaacgttctaagcctttgtggccccgtctgtaaaatgagtgactgtattagaagagcctacattttgccgggcagagtgcctcatgcctataatcccagcactttgggaggctgaggcaggcagatcacctgaggtcaggagttcgagaccagcctgaccaacatagagaaacctcatctctactaaaaatacaaaactagccaggtatggtggtacatgcctgtaatcccagctactcggaaggctgaggcaggagaatcacttgaacccgggaggcggaggttgcaatgagccgagaccgtgtcattgcactccagcctgggcaacaagagcaaaactccttctcaaaaaaagagaagagcctacatgtctagcaactccaatagtctctgactgatgtcattatggacagacccctattttagagactaaaaattggcttccctaaatacaagctaaataaaaataatcaaaatagagccaaattgttacagcaagccaacataatcctcataatctggtgaaaaaattctcactaaaaagttcatacttttggctcagaattgaatttctaggaatctaaagtaggagtctttatatacaatgatattcactgcagttttaagtataacagcaaaaatagtaaactgtcaaaatgattaatatgagaatgattagatcatgtctggcatatcctcagaatagagtgttaagcagcaacttaaaagcatctttgtgcggagctcttgatatggggaatgtcttgtgttataatattcagtgaaaaaaaggaggcataaaattgaatatacatgatgttatcagttgtgttattttaaagtacagaaaataatgtgggaaaaaaaagtggctcacgcctgtaatcccagcactttgggaggccgaagtgggtggattgcttgaggtcaggagtttgagaccagcctgggcaacatggtgaaaccccatctataatattaggttggtgcaaaagtagttgtgggttttgccaaagtaatggcaaaatcacaattacttttgcagcaacctaataaaaattccaaaattagcagggtgtggtggtgcacacctgcaatcccagctactcaggaggctaaggcacaagaatggcttggacccgggaggcggaggttgcagtgagccgagattgtgccactgcacttcagcctgggcgacagagtcagactccacctggaaacaaacaaaaaaacgaatgcctcatagtcatagtggtgatttttaggtgatggaataacactactttaatctttctaattttctgtgttacttttgtaactgaaaaaaagtaaacaaactagattaaagtaaatcaaaactgatactttgatctctctgctacttgagcacttgtttctatcccagacacgaccaccctctctctctgatttcattgccatatgaccacgttaggtttacttgaaagggacgccagtctatgctattcatgcttttttcagctttaacttctcactttatatttctgctttcttgtgaaattattttattcttttttcgttgttgttttttaagagagacgggggccagacatggtagctcatgcctgtgatcccagtactttgggaggcagagacaggaggatcacttgagccccggagcgagaccagctggagcaacatagcaagaccctgtctctacaaaaaaagaattaaaggccaggcgtggtggctcatgcctgtaatcccagcactttgggaggccgaggcaggtggatcacctgaggtcaggagttcgagaccagcctgaccaacatggtgaaaaaccatctctactaaaaatacaaaaatcagctgggtgtggtggtgggtgcctataatcccagctactcgggaggctgaggcaggagaatcacttaaactcgggaggcggaggttgcagtgagcaaagatcatgccattgcactccagcctgggtgacaagagtgaaactccatctcaaaaaataattaaaaaaaaaaagaattaaaaaattagctgggtatggtggtatgtgcttgtagtcccaactactttgggaagctgaagtaggaggattgcttgagactgggaggtcgagactgcagtgagctgtgatcgtgccactgcactctagcctaggtgatagaacaagaccctttgggcaacagagcaaacaaaaagagagagagatgggggtctcactatgatgcccaggctggactcgaactcctgggagcaagcaatgtgcccatctcaacctcccaagtagctgggattacaggcgcacaccaatgcacccagctcccttattctttattctgaatgttgtaggaataggccaccatgtattgtatgtcagaggtttgccatcaaaaacagaaccactcattctcaagcatgaatatctagtcttcttagtagttacagttttctctgtggattaatgaatcaacattctagtatgcatatgtgtctacattaaggatgtcagggggacacaaagaggtaacccatcagatagctgccaagtcaatctgaatattgcaagaatttcaaacttactttagagagataaatctttactaatttttgcatttaaagagagcaatttggttgcttggacatagtcacccaaggcagccttgatggaagcagccaatttactggaaatcaattaaacatatgatgaatttgctaaaagctagtctccaaaatgaccaatttgccaaattgctaaatatttatagttttaatcttgccttgggtttgcacatttagtcctgtttggatgcatgttgattccacgttgggttcatatttcagatatgaaacacttcctgaatcttccattttcacacattagtgattacagtttcatataagttttattttgccctaccaccactgctgctgtccccaaggctgttgatgctcctgtctgcctctgctgagatgaataaacttccaagatctgtgtgtgcacatgcagaaatttttcctttgacaaagtcctaggaatgtcaaataatatgtagatatataagacttgatgcaaattgccagaatcaccaaatatttgcaatgatgccaatttacattcacatcacctgggtataagacaccagttgaggccaggcgtggtagctcatgcctgtaatcccagcactttggggggccgaggcgggcggatcacctgaggtcaggagtttgggaccagcccagccaacatggtgaaacctcatctctacaaaaaacacaaaaattagccaggtgtggtgacacttgcccgtaatctcagctacttgggggcgctgaggcaggagaatcacttgaatttaggaggcggaggttgcagtgtgtgtcactgcactccagcctgggtgacagagtgagactccgtctcaaaaaataaaagaaaaaagacaccagttgaggatcttaatttgaattctcttcctaccagcagtgactgaggctgcttgattcctatgcctggccaatgccacgtatcatcaatttttgttttcatctttgcctgcatggaaggctaacaatgatgtctcattgcttttttaatgtgcatgtttttgtttattaatgaagttaaacttttttttaggcttaatgaccgttttaacttctctgaaatacctgctcatggcttttgtccatttttagtgttgggctttacattcatacagacattgattctatatcatagttttcccagcttgcctttctactttgcttattgtgatttttcagaagcagttttcatttttctctagtcaagttttagtattttccccttccttcagatttctttcctctgcttttcacctaagaaaggccttcctcatcctgggttttggtgaatatttatttatttgtttagttgttttttgtttgtttgtttttgttttgttttgtttcccgaaacagagtctcactctgtcacccaggcttgagtgtagtggcgtgatcttggctcactgtaacctctgccacccaggttcaagcgattctcctgcctcagcctcccaagtagccgggattagagatgcttgcaaccatgtccggctaatttttagtatttttaatagagacagggattcattatatgttagccaggacggtctcgaacccctgacctcaggtgatctgcccgcctcaggcccccaaagtgctggaattacaggcaggagccactattcccggccaacacatttaaatactatgatttaatactaaataatttggttgagaaattgggccacaaaatatttaatggaagatagtgttgagtagtgattaaaactgttgctagagattaaaataatttttttttctttttgagacagagtctcactctgtcacccaggctggagtgcagtggcatgacctcagctcactgcaacctccgcctcctgggttcaggtaactcccctgcctcagcctgtcaaatagctgtcaaattacaggtgtgcatcacaaagcccatctaatttttatatttttagtagaggtggggtttcaccacgttggtcagattggtcttgaacagctggccttaagtgatccacccgcctcagcctcccaaagtgctggaattgcaggcatgaaccaccacgcccagcctaaaataatttcttaatattaaaaatagtaagagaacaataaaaaccccaaataatttttctaattacaaaatttaatccacataatttctatagtagtactaactcagtatttcaccaattcaagatttggcaggacaataaggcatatttaaaaacattttaannnnnnnnnnnnnnnnnnnnnnnnnnnnnnnnnnnnnnnnnnnnnnnnnnnnnnnnnnnnnnnnnnnnnnnnnnnnnnnnnnnnnnnnnnnnnnnnnnnnnnnnnnnnnnnnnnnnnnnnnnnnnnnnnnntaaaactcaataaatacataaataaataaaaattataggccaggcatggtggctcatgcctgtaatcccagcactttgggaggccgaggcaggtggatcacctgaggtcgggagttcgagaccagcctgaccaacatggagaaaccccatctctactaaaaatataaaattagccaggcgtggaggtgggcaactgtaatcccagctactcaggaggctgaggcaggagaattgcttgaatccaggaggcggaggttgtggtgagccgagatcgtgccactgcactccagcctgggcaacaagagcgaaactccatctcaaaaaaaaaaaataaagaaaattatagcttgcttatttcttcccccacttagaaaaggaaatgggaccaaccgatagccaaatattttaaatatgcatgccaagctttaatgccaaacgtgtacttttttgtatgtaactctctaagttggtcaattaaaatttcaagattctcccttaacatttcttaaagataaatgatttattatgcaaatatttttaagcgtttactttgtactaattaatttttcaggtggtggctggcaagaaatattttattgacttcgtggccagggaaaccacatgttccaaggaaagtaatgaagagttgaccgaaagctgtgagaccaaaaaacttggcgtgagtagtcatgcacctgtctactttttcactggaagcctatttgatgtttttagaatcatttgtttaaatgtctcgtgaataacactgtctctctttcgacttctgttttcatggatagcaaagcctagattgcaacgctgaagtttatgtggtaccctgggagaaaaaaatttaccctactgtcaactgtcaaccactgggaatggtatgattctaattacagtcagcgtggggtcagttctgctcattctgaaaatccatatttgggggctgaaaatgaaccattactgaaatgaattggggagctatcttttttaaatggggagtaactctcacacttctgtgctgatctctgtttaatggctagaaagaagagtaacaatcctcctgatcacttctcacacattgtcagtgtctcagtgaagcttctatagactctctcctagtgcactgcagtcctgctgtgggggagcaacattggctatgccaggtgtacctgaggccagatacagcactccactgcattctgctgacatgcaaggaccatgtgaaaaatgcatggctgggcgcggtggctcacgcctgttatcccagcactttgggaggctgaagcaggcagatcacctgaggtcaggagtttgagactagcctggccaacatggtgaaaccctgtctctactgaaaatacaacaattagctgggtgtggtggcgcctgtaatcccagctactcagggggctgaggcaggagaatcccttgaacccaggaggtggaggttgcagtgagccgagatcctgccactgcactccagcctgggcaacaaagagcgaaactttgtctcaaaaaaaaaaaaagaaaagaaaaattcagactcgcaaaccccacttcacagctaccgaattttaaccagatccccaggggattcatatgcatgaatcaagtttgaaaagcattcgttgatgtcatctttcttttttaagtcttaaaagaactctgggaggtagtaacactttccctattgtcaaggatgagacactaaaaattagaaagactctgaggtcctgagtgaataatgacattatcaaatgcttcctctgtcccaggcactatactgaaggtttcacccacattttcgagtcctccttataactctgtgaggcaggtgctgttattatttctattttacagaaaggaaaagtgaagctgatggcacttggattcaaatcttggtcaattcagagtctaccctttccatcacgatgctgattaccagtagggtctggccggactccaatgaccatgttctttgcatcaccagacactgcttccaattaacacattctcacaggtagcaaaagtgtaggtagaattaatccacagatcgacatatttgaagcaggttacctcttttccctcttttctgatttggtcttttgtcatgtgtaggtatgtagatggtgtaacacaaacattgtcctcaggttgcatttcaagcttgcgaatatgtcctaatgtgcttcagcacaacaaagtgatcatggatacatgctccctatatattcagttcataaagccacttagggccttttaggataaaagcagtgatggtggtaataacagtagtatcaataattaaatactgtgctcagtaaaaacataggctcagaagctaccctagagattagctagttcaaccatccagatgaagcaaaaacactccagcttattttacagttttttttgttgttgtttggctgggtttttttgtttttttttttgttgttgttgttgtttgttttttgttttttttgacagagtcactgtcgcctaggctggagtgcagtggcgccatctcagctcactgcaacctccacgtcctgggttcaagcaattctcctgcctcagcctcctgagtagctgggattacaggcatgtgccaccatgcccagctaatttttgtatttttagtagagatggggtttcagcatgttggccaggctggtctcaaactcctgacctcaagtgatctgctcgccttggtctcccaaagtgctgagattacaggtgtgagccaccatgcctggctattttatggtattattaacaacaataattaatgtccacaaattttaagatcaatcaaaagacaaaaaaaattattcatcctttctggaatgttaatatagcatttaaaatctggcaaacacctcccccattgtaaactaagatagcattgccagatctcagtgtttttttctatcatcaatagcatgatttttgcagtaatacattcatcttaatattttctgtttagatctcactgatgaaaaggcctccaggtttttcacctttccgatcatcacgaataggggaaataaaagaagaaacaactgtaagtccaccccacacttccatggcacctgcacaagatgaagagcgggattcaggaaaagaacaagggcatactcgtagacatgactggggccatgaaaaacaaagaaaacataatcttggccatggccataaacatgaacgtgaccaagggcatgggcaccaaagaggacatggccttggccatggacacgaacaacagcatggtcttggtcatggacataagttcaaacttgatgatgatcttgaacaccaagggggccatgtccttgaccatggacataagcataagcatggtcatggccacggaaaacataaaaataaaggcaaaaagaatggaaagcacaatggttggaaaacagagcatttggcaagctcttctgaagacagtactacaccttctgcacagacacaagagaagacagaagggccaacacccatcccttccctagccaagccaggtgtaacagttaccttttctgactttcaggactctgatctcattgcaactatgatgcctcctatatcaccagctcccacacagagtgatgacgattggatccctgatatccagatagacccaaatggcctttcatttaacccaatatcagattttccagacacgacctccccaaaatgtcctggacgcccctggaagtcagttagtgaaattaatccaaccacacaaatgaaagaatcttattatttcgatctcactgatggcctttcttaatttaagtggctatgggtatttctttcatactttattaaagtatcaatatccctctctccattgtccagatgaaaatatcctgatataatgcaccaaaaaccatgcagcttcggaacagtctaaagagaagtggtgagactcccagtggagacaccatcagtctccacggactgcataaaattgtgtgccacaattctaactcttttctgaatcttcttcccaagttttctaaactagcacagtaaacagacaaactaatgtgccgtatggcctgctgcaattggcttctctgataacaaatatgtaccttacaacatatgtcatgaatttgcatacaaagattcttgtcattcttaataaactgtggcacttggtatttgaatgtgtgtgaaaataagggaagtcaagagattaaatgctgaacttattaatggaatagaaataataaggaggctgaggctggagaattgcttgaacccgggaggcggaggttgcagtgagccgagatcgtgccactgcgctccagcctgggcatcagagcaagattctgtctcagaaaaaaagaaaaaaaaagaaataataagaaaaacttccagatttcaaagtaacaagaaagaagacaggttggccaaagggaggaaaggggggacataaattaattgactttctattcccaaaatgggctagttatatcaaataaatactcccactgccctttctgagtgagagtgtttctcataagtcaaaaatttctgtttactcattaactactctttgcaacaggctttcatatagaagtattctgtttatttttgctgagcctagattgagtaattcttagtttacagaagctccgagcttaatgataaggatgaaaagcagagggagcaatatagaagcaggcttgctaataaaactttttaaataattgacaagggaatattatggaatgtgatgcaaagtttgttccgaaattttatgaggaaattactctctagtctcactttatagtctttttgctatgactttgaagaccattgatttttgagaagcagaataataggattgcctttcattgccctatagtgcaaagaaggtatatgctttataaccaatgttgtacttttgcctagaaaaacaagatatggctttaaatagctacaatcatctttggatgtatatgtcactgctgcttcaagttattggatgcatttgaacctctgagtttgtctttcattttaaatattgtctgttcttttaaataaacaaccacagatgtcaggaaaaagtcttaccttgtcaactggttgctccactttttaaaaatgattgaatgataacatcatattaactgcgttttactatacttacagagtcacctaaggtcctgcgagtacaagggtcgacccccaaaggcaggggcagagccagcatctgagagggaggtctcttgaccaatgggcagaatcttcactccaggcacatagccccaaccacctctgccagcaaccttgagaggaaggacaagaagaaagatgggatagaatttaaatagagaagaatgccattttatcactctgcctctgggtgaaataaagatcagtcttgatgttctaactctaattcacagtggtctcctttcagccctacccattctgcagcaaattccagctggtcagagagtcagtgctgtggctctgccatggaggctcataacccaacactggaacattccctagccaaggcagaagtccttaggcgggacttccttaccaccacgggtgctaaaagaagagttagtaggtcatgcttctaccagtaatctaaggactctctccttctcttcttcctctttctccagatttccaagccttagctaagagtaatttggcttgtttagtattgttttcttatggtccagttaattaccaaaaatatttttaaaatcatctctgttaatagaatgtctaccaacttctcactatcagaaaatactcaacctccaaacaatttgaaattatctttctgatccaggtaaagaagcaaattgaaaatcaataaagtaaaaagtgacggagattttaaattttctgtaataaaaacacttattgggttgggcatggtggctcacgcctgtaatcccagcactttgggaggccgaggtgggtggatgacctggcgtcaggagttcgagaccagcctggccacatgtcgaaactccatgtctaataaaaatacaaaattagccgggcgtggtggcacgcacctgtaatcccagctactccagaggctgaggcaggagaatcacttgagcctgagaggtggaggttgcagtgagctgagattgcaccactgcattccaggctgggtgacaaaatgaaattcagtctcaaaagaaaaaaaacatttatcgaacacctattacagccatttgctatgctagataatttacttttggcatataacttaatcctcacaaccactctaaggcccccatgaacatcattcttttacaaggaaactgtagttcacagtgccctgcccagggtcatatagttaataagtggcagggctggcattcagacttagaccttttgaactccattacaccatgtcatctgaaggctttattattaatgttgtcattacaaaagacacaccaagtcactgactacagtcacagagacccaataaattaaaaaaaaaaaaggcatgccaagataatgtctgactctgagaggatccttgtctcaatccaaaatatccttattaaatacctaattgtggctggtgctgttctgtgtattggtcaggataaactgagttaagcagcagtcactaactatttaccatatgcttcgcatgaggtcctgagaggaaaagaaagaaattttaaaagacataaatcctttccctcaaagatcttgcaatcccattggcaagtcaagatgaaagcatacggaacaaagatttgatccaggctgcagtcttttgtgcaacagtgagtgaatgcaaccaatgtgactggaagaagttgactaggtagagggatcagctgtgaaaggtagtatgaagcccagctgggagtctaggctgaaatatgcagtagagttccttctacagtctttgccatactcagagggagtttgagatagatgattctgaaggttctgggtagggtggatcagaatgggaagagaatggagtcagggttctgttctgggtatttcctgacaatcatgttttagcagaaaaataacgactcagggctgatatataaagcctatacctctcagcttactcaacaacatgaagtatttccacttcaggcctttgttaggtaacataaacatgagtttcccgtgacccagaaactaactttcttattttttaaatatctataccagccgggcgcagtggcttcacgtctgtaatcccagcactttgggaggccaaggcaggcggatcacttgaggtcaggagtgcgagaccagcctggccaacatggcgaaaccccgtctctactaaaaaataattaaaaaaaaaattagcttggtgtggcggtgggagcctgtaatcccagctactggggaggctgagacacgagaatcgcttgaacccgggaggtggagattgcagggagccgagatcatgccactgcactccagcctgggcaacagagtaagactctgcctcaaataaaaaaaaaaaaaaaaaaaaaaagacctaactaccaagccaaagtcacaccccaagtgtctggccctggctctggggccacacagctacatcgctccgtgcttctcttcagggcaggcatttcctgtcgtcgagtccaacccacattcctcacattgtctacgcctagttcctcaaacaggaggcccctattggctttttactccactctccacttcctgcttctaagcctggttccaagggagttaactcacagaaagacacatgcttttcggcctcaccccagtctgtccggcgcccatgctccccttctgctcatactctgtacattcacctcgcgggaaagcccagactcccaaggctcctctgagaagatttga

SEQ ID NO: 166 - DNA, 28316 bp, Human; identical to SEQ ID NO: 165
  misc_feature (1)...(28316): n = A,T,C or G

SEQ ID NO: 167 - DNA, 7833 bp, Human
  misc_feature (1)...(7833): n = A,T,C or G
gctcctgtggggggaaaaggggcgctcctgcctcggagggggaaaggacgcccctgtggaaggaagggggggctcttgaagcggtgtggtgagaggacgcttccgaggaaggaagggggtgctcctgcagcggtggggggagaggacgcccctgcggaaggaaggcggcgctcctgcgggggctggagagacgcccgcgcggtctcccggctcagggaccgctggctcgcgggtccgccctctccccggcgctatggaaaccgcactttctccgcctgccgtccccgatctctttctcctattacctcccaaacgcgatttcaacttcccgacaagctgacaagtgaatggcgcagaggacgccccgtaaagcgcccgcgagcgggtgggacacaggcgccccctccgcgcccctctgtcctccacggaagggcgcgcgccgctctcgatctggagcgcggtgctcgcgaacccgcggccgcgggccctggaacctccccgcgtttcgcggctgcggggggacggagatgcggccgggagacggggacgggaaacgggggacggggatggggcgcgcccaccccgagcgcgggagcggccgccctcgcccaaaatggggaccccgcgccccgagagcacggcccggctcgccgcccatgcttccactgcaaggccgcagcccccgccgccgatcccgatcccccgccccgcccagccgcggccccgcccggcgccccctccccggcggaagctcaagcccaattaattgagtccgaggcgggagggaagggccctgcgcgccgtggcccgccccgcccctcttccgcgccccttttcccgccctgggtggcatctcctccgccggcatccacaacaagccgctgattaatgaggccggggccgccccaccccgcccggccgggccggggccttcgcgggagggggaggggacggcgggaaacgcggcccggggagaaaggggggnnnnnnnnnnnnnnnnnnnnnnnnnnnnnnnnnnnnnnnnnnnnnnnnnnnnnnnnnnnnnnnnnnnnnnnnnnnnnnnnnnnnnnnnnnnnnnnnnnnnnnnnnnnnnnnnnnnnnnnnnnnnnnnnnnnnnnnnnnnnnnnnnnnnnnnnnnnnnnnnnnnnnnnnnnnnnnnnnnnnnnnnnnnnnnnnnnnnnnnnnnnnnnnnnnnnnnnnnnnnnnnnnnnnnnnnnnnnnnnnnnnnnnnnnnnnnnnnnnnnnnnnnnnnnnnnnnnnnnnnnnnnnnnnnnnnnnnnnnnnnnnnnnnnnnnnnnnnnnnnnnnnnnnnnnnnnnnnnnnnnnnnnnnnnnnnnnnnnnnnnnnnnnnnnnnnnnnnnnnnnnnnnnnnnnnnnnnnnnnnnnnnnnnnnnnnnnnnnnnnnnnnnnnnnnnnnnnnnnnnnnnnnnnnnnnnnnnnnnnnnnnnnnnnnnnnnnnnnnnnnnnnnnnnnnnnnnnnnnnnnnnnnnnnnnnnnnnnnnnnnnnnnnnnnnnnnnnnnnnnnnnnnnnnnnnnnnnnnnnnnnnnnnnnnnnnnnnnnnnnnnnnnnnnnnnnnnnnnnnnnnnnnnnnnnnnnnnnnnnnnnnnnnnnnnnnnnnnnnnnnnnnnnnnnnnnnnnnnnnnnnnnnnnnnnnnnnnnnnnnnnnnnnnnnnnnnnnnnnnnnnnnnnnnnnnnnnnnnnnnnnnnnnnnnnnnnnnnnnnnnnnnnnnnnnnnnnnnnnnnnnnnnnnnnnnnnnnnnnnnnnnnnnnnnnnnnnnnnnnnnnnnnnnnnnnnnnnnnnnnnnnnnnnnnnnnnnnnnnnnnnnnnnnnnnnnnnnnnnnnnnnnnnnnnnnnnnnnnnnnnnnnnnnnnnnnnnnnnnnnnnnnnnnnnnnnnnnnnnnnnnnnnnnnnnnnnnnnnnnnnnnnnnnnnnnnnnnnnnnnnnnnnnnnnnnnnnnnnnnnnnnnnnnnnnnnnnnnnnnnnnnnnnnnnnnnnnnnttcttcgtgctgcgcggacccggcgcgggcggcgacgaggcgacggcgggcggggggtcggcgccgcaaccgccgcggctcgagtactacgagagcgagaaaaagtggcggagcaaggcaggcgcgccgaaacgggtgatcgctctcgactgctgcctgaacatcaacaagcgcgccgacgccaagcacaagtacctgatcgccctctacaccaaggacgagtacttcgccgtggccgccgagaacgagcaggagcaggagggctggtaccgcgcgctcaccgacctggtcagcgagggccgcgcggccgccggagacgcgccccccgccgccgcgcccgccgcgtcctgcagcgcctccctgcccggcgccctgggcggctctgccggcgccgccggggccgaggacagctacgggctggtggctcccgccacggccgcctaccgtgaggtgtggcaggtgaacctgaagcccaagggtctgggccagagcaagaacctgacgggggtgtaccgtctgtgcctgtctgcgcgcaccatcggcttcgtgaagctcaactgcgagcagccgtcggtgacgctgcagctcatgaacatccgccgctgcggccactcggacagcttcttcttcatcgaggtgggccgctcggccgtcacaggccccggcgagctgtggatgcaggcggacgactcggtggtggcgcagaacatccacgagaccatcctggaggccatgaaggcgctcaaggagctcttcgagttccggccgcgcagtaagagccaatcgtcggggtcgtcggccacgcaccccatcagcgtccccggcgcgcgccgccaccaccacctggtcaacctgccccccagccagacgggcctggtgcgccgctcgcgcaccgacagcctggccgccaccccgccggcggccaagtgcagctcgtgccgggtgcgcaccgccagcgagggcgacggcggcgcggcggcgggagcggcggccgcgggcgccaggccggtgtcggtggctgggagccccctgagccccgggccggtgcgcgcgcccctgagccgctcgcacaccctgagcggcggctgcggcggccgcgggagcaaggtggcgctgctgccggcagggggcgcgctgcaacacagccgctccatgtccatgcccgtggcgcactcgccgcccgccgccaccagccccggctccctgtcgtccagcagcggccacggctcgggctcctacccgccgccgcccggcccgcacccgcctctgccgcatccgctgcaccacggccccggccagcggccctccagcggcagcgcctccgcctcgggctcccccagcgaccccggcttcatgtccctggacgagtacggctccagcccaggcgacctgcgcgccttctgcagccaccgaagcaacacgcccgagtccatcgcggagacgcccccggcccgagacggcggcggcggcggtgagttctacgggtacatgaccatggacaggcccctgagccactgtggccgctcctaccgccgggtctcgggggacgcggcccaggacctggaccgagggctgcgcaagaggacctactccctgaccacgccagcccggcagcggccggtgccccagccctcctctgcctcgctggatgaatacaccctgatgcgggccaccttctcgggcagcgcgggccgcctctgcccgtcctgccccgcgtcctctcccaaggtggcctaccacccctacccagaggactacggagacatcgagatcggctcccacaggagctccagcagcaacctgggggcagacgacggctacatgcccatgacgcccggcgcggccctcgcgggcagtgggagcggcagctgcaggagcgacgactacatgcccatgagccccgccagcgtgtccgcccccaagcagatcttgcagcccagggccgccgccgccgccgccgccgccgtgccttctgcggggcctgcggggccagcacccacctctgcggcgggcaggacattcccggcgagcgggggcggctacaaggccagctcgcccgccgagagctcccccgaggacagtgggtacatgcgcatgtggtgcggttccaagctgtccatggagcatgcagatggcaagctgctgcccaacggggactacctcaacgtgtcccccagcgacgcggtcaccacgggcaccccgcccgacttcttctccgcagccctgcaccccggcggggagccgctcaggggcgttcccggctgctgctacagctccttgccccgctcctacaaggccccctacacctgtggcggggacagcgaccagtacgtgctcatgagctcccccgtggggcgcatcctggaggaggagcgtctggagcctcaggccacgccagggcccagccaggcggccagcgccttcggggccggccccacgcagccccctcaccctgtagtgccttcgcccgtgcggcctagcggcggccgcccggagggcttcttgggccagcgcggccgggcggtgaggcccacgcgcctgtccctggaggggctgcccagcctgcccagcatgcacgagtacccactgccaccggagcccaagagccccggcgagtacatcaacatcgactttggcgagcccggggcccgcctgtcgccgcccgcgcctcccctgctggcgtcggcggcctcgtcctcctcgctcttgtccgccagcagcccggcctcgtcgctgggctcaggcaccccgggcaccagcagcgacagccggcagcggtctccgctctccgactacatgaacctcgacttcagctcccccaagtctcctaagccgggcgccccgagcggccaccccgtgggctccttggacggcctcctgtcccccgaggcctcctccccgtatccgccgttgcccccgcgtccgtccgcgtccccgtcgtcgtctctgcagccgccgccaccgccgccggccccgggggagctgtaccgcctgccccccgcctcggccgttgccaccgcccagggcccgggcgccgcctcatcgttgtcctcggacaccggggacaatggtgactacaccgagatggcttttggtgtggccgccaccccgccgcaacctatcgcggcccccccgaagccagaagctgcccgcgtggccagcccgacgtcgggcgtgaagaggctgagcctcatggagcaggtgtcgggagtcgaggccttcctgcaggccagccagcccccggacccccaccgcggcgccaaggtcatccgcgcagacccgcaggggggccgccgccgccacagttccgagaccttctcctccaccacgacggtcacccccgtgtccccgtccttcgcccacaaccccaagcgccacaactcggcctccgtggaaaatgtctctctcaggaaaagcagcgagggcggcgtgggtgtcggccctggagggggcgacgagccgcccacctccccacgacagttgcagccggcgccccctttggcaccgcagggccggccgtggaccccgggtcagcccgggggcttggtcggttgtcctgggagcggtggatcgcccatgcgcagagagacctctgccggcttccagaatggtctcaactacatcgccatcgacgtgagggaggagcccgggctgccaccccagccgcagccgccgccgccgccgcttcctcagccgggagacaagagctcctggggccggacccgaagcctcgggggtctcatcagcgctgtgggcgtcggcagcaccggcggcgggtgcggggggccgggtcccggtgccctgccccctgccaacacctacgccagcattgacttcttgtcccaccacttgaaggaggccaccatcgtgaaaggtgaggaggccctttgccttggcgtctggcgggaaggaggggcggggcgctgagggagcctcttgggtttcactgctcccactttttggggaccttgacccagaagccgacagcctggcactggctccttgttttgtttttctgcgggctgccctgttctcttccctcagagaacttgccaggaacattcgtcttggagttgaatgtgacgttttccgcgtgggagggagactgattttttgaggccccacccattcacccattctgtgcgtcccacagccccctgtcccttaacacagtggaagttctcccagaccggccacactagaggccgcggggcacccgactgtcttcatccgggtgcgtgggtccgtccttctggaaggacctcgggtccggaccgctgccctcagccgcagctttcacctttccctgtgttcctggagctgggctccgcctgattcttggtgagcttgaaggttcagacctgaaagtcatttaagaaatgagcatccattttgatggctgctaatagcgacagttaaccatttccgttttacacacaaactgtgggagcttttccatcagaggcattgtttttctcggaaggggtgaaacggtaaggctgcacacagcctaatgcagtggtgttcaacttgagcatatgtgggagttacctggaggctttgctgaaacatggatctctggcctgtgttaaccccgcagtttccgatgctgtagctttggggcgcggcccaggctgtgcatttctagtgagtctccgcataatgccgatgctgctggccgggggaccaccctgtgaggaccctgccccaggtgagactcacctggggaggattgaaaaattacctgttgggcctcaccccagacccgttgaagtgaaacatgagatggctaggaggcagggacggacatttttcagagttgtccaggtgatttgaatgtgcagccaggatttacaatcagtgctttggagaaaacaagggaaagacaaaaaacacaggtcttctcaagaacaattggataggagggtgcctggtattgttcttcccgttctgatcaaatatccatgaggagagagagctgatgcagaatgcagctggtggtgcattctggctgtctaaactttgaatggtgtttggggtcggggagatgagagggaaaggtgaatgctcaattcgggagactttatttaattttgtagctgttttctttgtagggttcctagcaggatagaggctttgtgggaacagtgaaacatatagtaaaatttggatgctggattagatgtgagcctaaggtgtaaacagtcttcaagggtcatgagatgaggatcaaggtgggctggagattcacagccttttgttcttaaatagaccagtttagtgctatctaaatccagcatctgttttatagtatacttaggactgtcggtccatgggatttaaaattatagctgtggggtgaactccctgttattctagtgtaatagagaaaagctatttcctttattaaaaccgtatactagaagatgaagagtcacagagaattatcaggagtgtggtgcttcagcatccaattaaatcattggaagtcgccagaatgtatcctgtgaacagtgattctcagctgaaggtcactttggttggagttacttatacactattgctagtgtgtcagaaagttgaaggattagctgccttataagacacagaccattataaacacagcagcagcagcagcagtataattgagtggggaaaaacacacatatttatggtctgcacaaatgggtatatgccagagtgaacatgaaagtaaattacatcttacccgaatctgattctaatcagaaaacagccaagaacataacaccttttcctgctttcagtggagctggtgggacaaacctggactgggtggagctggggccccagc

(The sequence listing continues in the following parts.)

1. A detection reagent capable of detecting one or more single nucleic acid polymorphisms selected from group consisting of the SNPs provided in Table 1.

2. A detection reagent capable of detecting 100 or more single nucleic acid polymorphisms selected from group consisting of the SNPs provided in Table 1.

3. A detection reagent capable of detecting 500 or more single nucleic acid polymorphisms selected from group consisting of the SNPs provided in Table 1.

4. A detection reagent capable of detecting 1000 or more single nucleic acid polymorphisms selected from group consisting of the SNPs provided in Table 1.

5. A detection reagent capable of detecting 5000 or more single nucleic acid polymorphisms selected from group consisting of the SNPs provided in Table 1.

6. A method of determining whether a trait is linked to one of the human chromosomes, or a sub-region thereof, comprising the steps of determining whether said trait is linked to one or more SNPs using the detection reagents of claim 1.

7. A method of determining whether a trait is linked to one of the human chromosomes, or a sub-region thereof, comprising the steps of determining whether said trait is linked to one or more SNPs using the detection reagents of claim 2.

8. A method of determining whether a trait is linked to one of the human chromosomes, or a sub-region thereof, comprising the steps of determining whether said trait is linked to one or more SNPs using the detection reagents of claim 3.

9. A method of determining whether a trait is linked to one of the human chromosomes, or a sub-region thereof, comprising the steps of determining whether said trait is linked to one or more SNPs using the detection reagents of claim 4.

10. A method of determining whether a trait is linked to one of the human chromosomes, or a sub-region thereof, comprising the steps of determining whether said trait is linked to one or more SNPs using the detection reagents of claim 5.

11. A computer system for studying SNP linkage, said system comprising storage means containing the SNP information in Table 1 or a subset thereof specific for human one of the human chromosomes mapping studies.

12. Computer readable medium having stored therein the SNP relational information provided on Table 1.

13. An isolated nucleic acid molecule for detecting at least one SNP provided in Table 1, wherein the nucleic acid molecule comprises at least about 12 contiguous nucleotides selected from the group consisting of SEQ ID NOS:184-2172 and fragments thereof.

14. The isolated nucleic acid molecule of claim 13, wherein the at least about 12 contiguous nucleotides hybridize to a SNP identified in Table 1.

15. The isolated nucleic acid molecule of claim 13, wherein the at least about 12 contiguous nucleotides are adjacent to the SNP.

16. A method of genotyping at least one SNP position provided in Table 1 in a sample, the method comprising contacting the sample with a detection reagent that differentiates between alternative alleles at at least one SNP position provided in Table 1, and determining which allele is present at the at least one SNP position.

17. A method of identifying an individual having or at risk of developing a disorder, the method comprising the step of genotyping at least one SNP in a nucleic acid sample from said individual, wherein the at least one SNP is selected from the group consisting of the SNPs provided in Table 1.

18. The method of claim 17, wherein the disorder is at least one of: type II diabetes and obesity.

19. The detection reagent of claim 1, wherein the detection reagent is a nucleic acid array.

20. A kit comprising at least one container, wherein the at least one container contains a detection reagent of claim 1.
